United States Patent Application Publication US 2024/0301345 A1 - sequence listing, part 15

SEQ ID NO: 2493 - DNA, 17344 bp, Unknown
  R50_10m  MAG No. k141_20025
aatgtattcgtcaagcgcatagccactcacttgggagacgtcgattgactcgtcatgcacgatcttggcgagcgcctgataggcggccagcgggctggagccagtggccaggcccagcacggcgtccggctttgctttgatcaggtcagccacacaacggccatagatctcaccggcctcagcctcatccctaacaataatgatctccgacacgctcatatcctttcttccgtggcgagcccttcagcaacgacccgccacaatcagacccatctcatcttcaccagtcgtctgtcatccaccgtcacggcccgcctcaaaaggccgaccagacctgccaccaccagtggcacagacaatgggatgcccctcaaaacggcaggcctcccgccaacctgaccaccggtggtgcaggcgcaactcacatgtttttcacgttgtacggcatcttgccggcaaagtattcctcaatgcacttggcgatgatgacttgggacctgtattccgattccatcgaggccgcgcccatatgcgaggtgacgaacacgttcggcaggtgtagtagcggatcatccttctcaggcggctcatgcacaagcacgtcaagcccagcaccggcaatctcgccgctggtgaccgcctcaatcagatcagcttcatcaatcacgccaccacggcatgtgttgaccagataagcagtcggcttcatcagcgcgaacttctccttgttgatggaaccgtgcgtctcgtcggtcagcgggatatgcaggctgatgatgtcactggcgcgaaagacctcttcggcgctgcccacgaaatgcaggcggtcgttcgcgtcggagcggtcgcgtaggtaaggatcgtagaccaacacgttcacatcaaatccctgcatcatgcgcaccagctgccggccaatattgccatagcccagcaggcccacggtcttgccgtccagctcgttgccggtcacggtcgacggccatacgccgttgctgacgccgtcaacacatgtggtgaaacgacgcccgaggttgaggatgtgcagcagcgcggtttcggccacggccgcggcgttggcgcccggcacattgcccacggggatacccacggaggccgcgaacggcagatcgatgttatccaatccggcgccgtaacgcacgatgtacttcacctgtcccttgacggcgctcagtgtgcgctcgttccatggttcggacgagctgatcactgcgtcggccttcatacccatctcgatggtcttgtcttcatcggcgaaatcgatctgctcggcgatgaggttgtagccgtcttccttgaacttgttctgcaggtagctgacgtccaccttgtcggggtccagatccagccagatggtgatgttcgacatgattgctcctttatattgtgaatcttgtgatgattgatatgggaatgatggtgcgagcaaggtggcggcactattgatgccgcccgtctgtcgtcactgctcggtaaacagcgacttaagctcgtcaatcttgcgaatgttgtctttcagcgcgtcatcgatgctggtattcaccgtgacgatctggttgagcatcttcgcttctgggtaggtgaacatgttcttggctgccacggcgcgatcggcggtagaccgtgcggggtatccgtagtagccctccgacgtcttgacgtagttgagcacttcggcgttgacgtccttctgccacacgtccacctgctcggaatcctggaatacgggggcgaacacgggggccgtctcctccaggaagccgtcataccagtccttgtccagcaggtattcgacgagcttggtggccgcgtcgacgttcttgctggccttcataatcgacagtccggtgacgaacgacatcttcacatcgttgtcctcacccttgggcaggttcactacggcggtattgccgagcagcgtctcatatgatgggtccgaggccatggagtagtacagggtcggcgcgttgaagatgatgccggattcgcccatgaggtacgaggtgttgttgccgccggaatcccaagtgctggctgatggcggtatcaccttgttctggtacatcgtcttgtactgctgcatcagcttgcggctcaccttgttgtcgatggtgacgttgccgtccttatcgaacatgtagccaccttggttccacatgatgttgcggaagatgttgtcgccgtcctcatccgtggaaccgcagccccagcccaggccatagaagccctgtgccggatcgctgatcttctcggctacttcgaacagctcatcccaggtagtgggcacctcgtagatcccagcctcgtacagcttgtccatgcggatgaacatcatcgtcgacgagctgcggaatggcgcgaaatacagcttgccgtcaatcttgctgccctcgtacacggacttcagatacggccggtccttattgatgcgctccacgatgtcggtcatatccatgtatgggttgccagggtaatagttcactaccttggacacggcggacgtggtgatgtccggaatgccgcgccccgcctcgatggtggcgttgagcttggtcatatagtccgtggcggaaatgaactcgtaattgacttttatgccggtttccttggagaagatttcgatacgctgcttcatctcctcgttcgacttctcgctgaacactttctccacccagatggtgagcgtgttggcgtccgaagcggaaccacatgcgccaagtggcagcagcatggctgcggcaaggcccgcggccgcgaacttcatggttttcatggttgtgcctttcctattcatcatcccttgacgcctccctcggtctggcctccgaccagggatcccgatgccagcatgtagatgatgaccactggcacgcaagccagaatcgcgccggccgtcagctggccccacggatacatgtcgccgaatatgagtccggctatcaccaaggggaaggtctgttgggaggtggatgtgatgttcaccaacgcgtacatgtattcaccccagcacatggcgaacgcgaagatcgtggtggcgatgattccgggcaacgccagggggaagatgatgcggtacatgatgcgcagtcgtccgcagccatccaccagtgctgcctcgtcgatgtcgcagggaatcgcctggatgtgcgggatcagcacccacgccacataggggatagtgaaggtcggatagatcagcgcaagaccccagatgctgttcgtcacgccgatgcgcgcgttcatcaggtacagcgggatgtacatgacggccgtgggtagcaagtaggtgaacaggatggttttggagaacgtgcgcttgcccctgaatgagacgcgggcgatggcataggccgccgggtacgccacgaaaatggagaacgcacataccaccacggcgatgataaggctgttaagcacggcctgcaggaagttggtgtcctgaatgaggtatttgtaggattccaacgtcggcttatgcgggtagaaggtcggcttttggctataaatctccgactgccctttcagggaggtgttgatcatccagtaaatcgggccgagagcgacgatcagacaaataatggtgtagatgcggctgatgattttgacgcctttggtttctctcatcgtaatctccttaccttcgcccgtctttgggcaccatgtgtcgtgcgagtacggtgatcagtgcaataagcaccggcatcgccagaatggataccgcaatacccttaccgagcatcatgctcttcatcgcggtctggtagctgaacacgttcatgacttcggtggagccgtttgggccgccgccggtcatcagccacacggattcgaattcgttgagcgtccagatggtcgacatcagcgtcgacaacaggatggtgtcacggatctcgggaagcgtgatgtgccagaactgctggaatatgttcgcgccatcgatggacgcggcctcgtaaccgtcggcggagatggtctgcaggcttgcaagaatggatatcgcgaagaacggggtgccgcgccacacgttggcgatgatcacggtggccatggccagtttgggactgccgaaccacaccagatcatggtctgcgatgcccaacgtggtcaatatgtagttggctataccgcccgtggagctgaagatccagcgccagttcaataccgccacgatgttgggcagggtccaggggatgagtagcagcgctcgcacgatgttgcgtccacggaacttggtgttcagcgcgagggccatcgccagaccgagcaccagcttaaggctgatggagatcgcggtgaacaccagggtgttcacgatagatgaccggtatgaagggtccatcaacagattgatgtagttctttaatcccacgaatgcgccgttgccgccaccgatggtcttgttggtaaggctggtgtagaagccccagcaaataggccatgccaacatgcagaccaagtagataatcaacgggatattaatcaaatacgcgaaccgcgtatccctggacattatggcacttcgttctctcctcatgccgccatccctcctgttcgtctgtgatgtgatgggaaccctcaccatcgagggctgttatgttcgccgcgtgcacatcggttgtgctgtgggcggcgatcatgtcgtccgtactcggttagcttatccgtcagcgcaaataatttccacttagactaacgaagtgggtagaactttcagctgcaacaacatagatcagcccaaaaataatcataaacagccatttaaagccagactacaccacgacctacatggtaagtattttctatttactcttttttggctggtcgaactttacaaatcgatttccagcgctttacgatgatggcacacgaaaggaggggcaatgaaaccaccaccgaacatcaaaggacaactcatcgtatcctgccaagcgctcaaagacgagccacttcattccccgtacatcatgggaaaaatggcctacgccgcagctcagggaggggccaaaggcatacgggccaactccgtggaagatatacgggaaatcaaactgcgcgtcaacttgcccatcatcggcatcatcaagcgcgactacccggactccccggtgttcatcacccccacgatggaagaggtggacgagctcgaagcagtcaaaccggacatcatagccctggacgccaccgaccgcccccgacccgccggccaaagccttgacgatctcgtcgtgcaaatccgacacacctaccccgatcagctactgatggcggactgctccacagtggacgaagccgcccacgccgaccagctgggtttcgacttcatcggcaccaccatgatcggctacaccgaggaaagccaaggcgatcgcgtagatgaggacgacttccgtatcatccgcgacatcctagccagagtcaagcatccggtcatcgcggaaggcaacatcgatacaccggacaaggcgaaacgcgtcattgagcttggttgccacagcgtagtggtggggtccgccatcactcgcccgcagctcatcaccaaacggttcgccgcggctctcgcccccgcgtagcccctatcaataggcccctacgccaacaacactgtttaccaacaccaacaccacaaccaacccaccaacaaaggagaacaccatgaccatcgatccgaacaagtaccgcggcatcttcccagccttctatgcttgctatgacgatgacggcgagatcagccccgaacgtgtgcaggctctcaccgaacacctcatcagcaagggcgtcaaaggactgtatgtcggcggatcatccggcgagtgcatctaccagagcgtcgaggaccgcaaggtcacgctggagaacgtcatgaaagtcgcgcgcggcaaagccaccatcatcgcgcacgtggcatgcaacaacaccaaggacagcgtcgaactcgccaagcacgccgaggcgcagggcgtcgacgccatcgcatccatcccgccgatctacttccgcctgccggaatattccatcgccggatactggaacgacatcagcgccgccgccccgaacaccgacttcatcatctacaacatcccgcagctcgccggcaccgcgctcacgccctcgctgctgaccactatgctgaagaacccgaaagtggcgggcgtcaagaactcctccatgcccacccaggacatccagatcttcaaggccatgggcggtaaggacttcatcgtgttcaacggtcccgacgagcagctggtcagcggccgtgccatgggtgccgatggcggtatcggcggcacctacgccgttatgccggagctgattctcaagatcaacgagctggtgagcaagggcgagattgagcgcgcacgcgaaatccagtaccaagtcaacgacatcatcgcactgatggcgagcggccacgcgaacctgtacgcagtgatgaaggaggtactgcgcatcaacgaaaacgtgaacatcggcggcgtgcgcaagccgctggagaaccttaccgaagacgacctgcccatcgcccagcaggctgcggcccgtatccgcgaggcaatcgcggcactgtaagctgtgcaatcagagggaaaggggtgaaatcatgacgcactatatctgcatcgacatcggcgggacatccatcaaatatggaatctacgacgacgcttcgcagcaattcgtacggcatgattccacccccacccatgcggatcaaggcggtccgcacatcgtaatcaccgtattggggctcatcgaggacctctcccatgctgcaacggcgccattatacggcatctgcgtatccacagcgggcatggtcgactgcgccacggggagcatcgcttactccagcgaactcattccgcgctacaccgggaccccattgaaatcgatgatcgaacagcagaccggcctgccctgcgaagtcgaaaacgacgtgaattgtgcgggtctcgccgaatatcatgccggcaatgcgcgaggcgccaaaacagcgctgtgcctgaccgttggtaccggtatcggaggctcgtacatcgatcacgggcgcgtactgcacggcgcgggcggcagcgcctgcgaagtcggctacattcacctgccgggcggggacttccaagacctggcctcaaccaccgccctcgtgcgcagggtggccacgcgcaagaatatgcaggccgaagatctgtccggcaaacgaatattcgaacttgcccagcagggagacaccgactgcgccgaagccatcaacaccatgaccacctatctgggcatgggcatagccaacatctgctatgtgcttaaccccgaggtcgtgatcctcggcggcggcatcatggcccaaagtgactatttgggcggtcccatcaggcgcgccctcgacgataacctacgcaaaccagtggcccgagccacaagccttcgttttgcacatcaccggaaccgcgctggtatgcttggtgcgtactatcatttccggtacatgcaagaaagtcggaaacatggctcattttgacaaggacgtcattccgcagatcgaagccgtatacgccacactgtcgcctacggagaaagtcgttgcggacttcttcatccataaccgccgacgtatggatttcggggcacccaatatcgcggatattctgcacgtatccctggcgtcgctctcccgtttcgccaagaagatcggatttgccgggtatcgcgaattcatctataaatacaaggaagatctgcgcgaggacactgcacagacagtgcctgaccagtggtcgatgcaggcgctcagctcttatcaggaactgttggacaaaagctatgcgctggtcaacgagcgccagatcaacgcactcagcgacatgctgtccacctatcagcgcatctacgtgtatgggcgaggcagctccggccttgccgcgcaggagatgcaactgcggttcatgcgtatcggcagtatcatcaccgccatcaccgatagcgatgtgatgatgatgaattccgtcctgttggatgacacctgtttggtgattgccatcagcatcagcggtaagacaccggcggtgatcaaggcactgcgcaaagccaaggagtccggagcaaggacagtactgatgacttcccataaatctccagaacagcatgaatactgcgatgaggtggtgctgctggcgcttcgggagaacatcgaagcgggcaaggtcatctctccgcaatttccgattctcatttacctggacatcctatacgcgcatttcctgcagcatgacagcaaccataaggagctactgcacgagcgaacgctggatatcttgcagcaggacgcaacagagcaggagccgggcgagcaggcggagtaggcatacccgctaatcaagcttcggcagccccaatcacgcttccaacacgctcaacaccttcttctcgttgtagaacgcgaatacgatgccgcccaagccgcacagcacggccgcgcacacggcggcgatgcgatagcccgcgccggacgccatgccgatggtggagacgccggtgaacagcagcatggccacggactgccccatcttcatcgcaaaggtgcgggccgcgtagaacatgccctgacggtcctggccggtggtcttggagctggcgtcggcgatattcgccacgatggcttgcggcagaatgccgaacgcggccatcggaatcgcgccgaccaccgagagcgccaaaccctgggccatcgccggaatgaagccgagcgcggccgaaccaagggcgccggcaaatgcgaacgcacaggtgaagatcacgaaggcaaccagcagcaggcgcttcttgccgaccttattggccaagatattgaccggcagatagaacagcacagagacgccggtcatgagcacgaagtagatggtcgtggtggtttccggcagcttgagcaggctggtcacgaagaacggcagaccggtctggaaggtggtgatggccacccagtagaccacgtcggaacacacgaacttgcggaattcgtcgtcgccgaacgtctgcttcagggattcgatggccgattcggaggtgggctgggagttgacgtagtccttctcgcggatgcccagcggcggcaccagcatgcacacgaacgccacggcggccatgatggtgaaggtcacgcggatggcggtgatacggcccatcatcggcacgaacgcgccccaaatcaccggcgccacgtacgcgatggccgtgccggccacccaagtgaaggagatggcggtggagatggtgagttgctgcttggagtcgtggccgagttcggcgatgagcgcgttgtacggcgtgcagtagaacgtgagggcgatgtagtagccgatcacggtgacgaacaggaacgccgcgttcacccagccggtgccgttgatcggactccagaacacgagtacggtgaccaccgcgagcggcagggcggcgaatttcaggaacggcatacggcggccggatttggcgtcgcaacggtcggagagggacgccacggccgggtccacgaacgcgtcgaagaatcgggcgaaggcggtgatgccgcccaccacggtcacgatgccgagaacgaccaggccctgcggcacgaatacggtctgaccttgggagatggtctcctggtcaggttggtagaaatacacgagccagttggagatgatgccggaaagcagcgcccacccgaactggccgaccgcaaacgcccacactttggcgatggggagatctttgatggctgatttcgccggtgcaacttgcgcgcccgttacacttgctgtagtcgtattacccattccccataacctccgaatcaacattgacacagtgtcaaaaaccagtatacaccggggttttacactcaattccctgcagggcaaaaccgtacaccacaatccacaccccgagccgccttcccctcagccatccgcaggctctacgatgagagccatgactggtctggccgaacgactaccgcacgtcgccgctttccccgaagcgctgggcaccgggttgctgctgcataccgatgtcgcgctggatgacgggctcagtaactgcatcgatatgttcatcagcacctatgaagccgcattgtcccggttcaaggatgattcgacggtcggccggatgcgcacggccacgcatggcggcacgttcgattttcctgactgggcattgggtttatttggcctgtacgaccagctgtttgcgtcgactaatgggaccatcgacccatgcgtgggcgaggatttgattcggcttggctatgacgagtcgtattcgtttacgcctgcgccagatgccgctgaacatgcaggcgcgatccacgaacgagccatttggtcagccgacgttgagcggcatggcacaacactggtgacgcgcggaccggtcgcgctcgatttcggcgcgtgcggtaaggggtatttggtggatttgcttgcggggatgttgggtgatggcgcgggtcaccctcaacccattcaatacgtcatcgacgccgggggtgatttgctagtgcacacggacgaaccaatcaccatcgcccttgaagatcctgccgatccggccaacgccgtaggtacggtcgaaatcagccacggcgcattctgcgcgagctcccccagccgccgccactggtctgacgccgcaggtcaccaacttcaccatctgctcaacgccatcgacggactaccggttgacgatgtagccgccacatgggtggccgtcacgccgccatcgagcgccataaccacgaagacatcgacgcatggcagcaatgcctcgacaacggcaaaccgcgataccgacgattcgtcgaacaccgttgcggcacacgtccctgtcacactggccgacggcctcgccaccgccctgttcaccaccccggccacccagctgcgcgctcacttccccttcgaatgcgccattctcaacgccaaccgcaccgccgcccaatcccccaattttcccggcggctttttcacacactaatgtacgaaatcatcagtatcacatccctcgggtggaccgatgggttgctcccctcagtcagctacgctgacagctcccctcggagaggggagccgagtatagctaatccgctaatccgctaacgcaggaaacaatccgtcagtcagcgagtgcgaactggctgttgtagaggtcggcgtaaaaaccgcccgccgccagcagctcgtcgtgcgtgccgcgctcgatcacgtcgccgtggttcatgacgagaatcatgtcggcgtcgcgaatcgtggagaggcggtgcgcgatcacaaagctcgtacgccccacggtcagcgcgtccatggccttctggatcagctcttcggtgcgggtatcgaccgaggaggtggcctcgtcgagaatcagaatcggcgcgtcctgcaccatcgcgcgggcgatggtcagcagctgcttctggccctgggacagcgacgacttgtcatcgagcacggtgtcatagccgtccggcagcgagcggatgaagtggtcgaggcccacggccttgcacgcatcctcgatctgcttgttggtcacgccgggcttggagtaggcgatgttctcgcgcacagtgccgcggaacacccacgtatcctgcagcaccatggagaactggtcgtgcacgttccagcgcggcacggacttggtgtccacgccgtcaatcgcaatcgagccgccggaaatctcatagaagcgcatgagcaggttgaccatggtggtcttgccggcaccggtcgggccgacgatggcgaccttctgcccggccttgacggaggcggagaagtcgtggatgatcggcttgcccggttcgtaaccgaactgtacgtggctgaattccacgtcgcccttcacttcgtggccgttggtcccaagcaaagcggacttgccggattcgtcctccatctccggctcctcaaggaagccgaacacgcgttcggcggccgccgcgcaacgctgcaggttctggaaggcctgggcgaactgcgccaacggctgggtgaacaggcggacatacatcatgaacgccacgatcacgccgaactcgatctgcccgtcgagcgcgagcgccgcgcccaccacgcacaccaccacgtagccgaagttgcccacgaaattcatgagcggcatcatcaggccggagaggaactgcgacttccagccggactcgtagaggtccgagttgtacttctcgaagcgacgaatcgaatcggcctcgccgttgtatgccttgacgatgaggtgaccggcgtacatctcctccacgtggccgttgacgtcacccagcgccatctgctgccgggcgaagtacttctgggaggacttcatgatggccatcatgatgatcaggccgatgaggctggcaccgatggcgcacagggtcatgatcacgttgttgtagaacatcatcaccagcgcgcccacgaacagcgtcaccgaggtaatcagcgagccgagcgactggcccagcgtctggccgatggcgtccacatcgttggtgatgcgcgacagcacgtcgccgtagctaaccttgtcgaagtatttgagcggcagtttgttgattttgaccgagatggactcgcgcagtcgctgggcggtgcgctgggtgacgttggccatcatccagctttgcacgtagccgagcacggcgtagcccacgtacagggccaccaaggtccaggcgatgtggcccaccgtgccgaaatctaccgagttcatcaccggcctgccgttgacgatggcgggcagacctttgacgatctcgttggtcatgtccttgagcttgtccgggccgacgatctggcagacggtgccggccgcgcccaggatgagcgcgatgatgatgacgggaagatagttgcggcagtagttcacgagtttgcccatgactttgccgaaatcatggggcttttcgacggcacgcctgccgcccattggtcctcttggcatttgttttactccttaaaagtccgtattgacctccctctgatgagggaggtggcgcgaagcgccggagggagagaagccgtacgcgactacccctcagtcagctgtgctgttttattcgctcgcttatcagctcgtcttcgcctgggaacagcccactgggctgttccctttacggctcagcccctgacatggggagctaccgctgccgccccccctacgccgtaagctccgactggctgagctgggattcggcgatctggcggtatacgtcgcagttgtcgagcagttccttgtgcgtgccctgacccacgaccttgccgtcgtcgagcacgacgatgcggtcggcgttcatgatggtgccgatgcgctgggccacgatgagcttggtggaatccttggcctcgcgggcgagcgcgtcgcgcacttcgcggtcggtcttgaagtcgagcgcggagaacgagtcgtcgaaaatcaggatttccgggtgacggtacaccgcgcgcgcaatcgacaggcgctgcttctggccgccggacacgttcgatccgccttgggcgatcgcggcggaatacccgccgtccatgcgcgccacgaactcgctggcctgcgccacgtcggcggcggccttgacgcgattcagctgctcggccggtatatcggcaccttccgcggcctcgccagcggcgatcaacgcggcctcgcgcttgcgcccggccggggtggaggtatcggccatctcgacctccgccgggtcgcccggctgatcgccgtagctcacgttggaggccacggtgcccttgaacagcacggactgctgcggcacgtagccgatcttgtcgcgcagggccttcaggtcgtagtcgcgcacgtccacgccgtcgaccaacacctggccttggctggtgtcatagaagcgcggcacgagattgataagagacgacttgccggagccggtggagccgatgaacgccaccgtctggccctgctcggcggtgaagttgatgccttccagcatcgcctcgcgcgaatccgggtaggtgaagctgacgttgcggaattccacggtgcccctctggccggttttggccacgtcggcggcggttttggtgccgttctcgacgattggctcagtgtcgagcacctccatgatgcgctgcgcggacacgtcggcgcgcggccagagcacgaacaccatgctcatgagcaggaagctcatgatgacctgcacggagtagttggagaacacgaccatgttggagaacacggtgagcttgtccttgagcccggcggcgtcgatgaggtaagcgccgatccagtagacggcgagcatcaggccgttcaggacggtgttcatcaacggcatcatgaacgccatgacgcggttggtgaacagctgggtctcggtgaggtccttgttggccttggtgaatttggcttcctggtagtcctcggcattgtaggcgcgcaccacgcgcaggccggtgaggttctcgcgggccacgaggttgatgttgtcggtcagggtctgcatgaccttgaacttcggcatgaccatggccatcatgacggtgatggacaccagcaggaccgccacggcgatgccggtggcgagcgtccattcgaagccttcgccggcgatcttgcacacggcccatacggccatgatcggcgacttgacgatgagctgcaggcccatggtgatgaacatctgcacctgcgtgacgtcgttggtggaacgggtgatgaggctggcggtggagaacttgctcatctcggccgggccgaaggactcgaccttgcggaattcgagcgagcgcagacgctgggtgaacgaggcggccacgcgcgcagcgatgtagccggtgatgatggcacacgccacggatccgagcgagatgagcagcatcttgccgcccgcgatccagatgtccttcatgtcgctgcccggcgtctcgaccagcgtggtgatgtctgacatatagtcgggcagtttcaggtcgaagtagacctgcccgacgatggtcaccagggcgatgagcatctgaccgatctccgctttggagaggtatttcatgatgcgaaacattggtttccccttgtgttggttgggttggttattggttattggcgattggttcttaagttggctgggttatcggtgattatcggttcacgatgtcttaatagtttccattgtttgattacttacactgtgagatattatacgcacttctgtatgttcgctgtgagcgtcctcaattacctttacctccctctgacgagggaggtgtcaccgcgcagcagtgacggagggagagacccgccagcgggaggaagctagtctcgctcagcctccgcgcgcttagctgccatgtgttcagccacgcgcttgtcccgctccacgaatgcctcacgcacttgttcagccgtcggccgaggccgccccggatggcaaatcgacatatatgtggtgaactcagacaccaggtcaacgaattcgcgcgtgcgccgctcccccatttgcgagaaaatccagcaaattgcggaacgcatttcctctatcatccgatgagactgctcgcgcccggaatcagtgagattcacgcgaataatgcgccgatccttggaatcaatgtcacgcgtgacccagccttttttctccagagacgacagcacagtggagatgcggccggaactggcctgcagcgccgatgccaattgcgatggcgtttgcgtccccttcatggacagctcccggagcacgaactgctcaccatgggctccacgagtgaattccctctgcattgtcgaacgattgccccacacgctggcatacagttcactaactgcttcctgctcaaatcccataagagcaccatccattcccattcgccacacggcagagcgccgcaaacacccccaagaatatctcacaccgtaaacaattcattactagaaactatttttggaacgcataatgcacacactccacgctctttgatattctgaaagccgcatagatattcacttcggggcgtcgtctaagaatatttgctgggccaacggtagcgacgttggcattgtgctccatgaggtatctggtcgaaaaggcggacgaagacagaccagttgggcggagcgcgcccatacctcaaaaccattgcaattattggctttgaccattttcgtggagccacgaaaatggtcatgaaaaacataaggacacacccatgaaccgagacgaaatcacacgcaaaaccagcgaactcagcactatcgcacacaccaccgaggactccaaagttgagtattggtatgcacgcgagctaatgacctatatggggtacgacagatgggaaaacttcagcaaagctattacacgagccaagcaagcttgcgacaattccggcgtatccgttgaatcccatttccgtgacactacgcgagacgtgactctcggcagcggtgccacccgctccatcgcggacgtcaagctcacccgatacgcctgctatctcattgctcaaaacggtgatccaaagaaagaagaagtggcacttctccagagctattttgccgttcagactcgcaaaacggaaatcattgagcaacgcatgggagaaatcagccggctcgccggccgagaggcccttgccactgcagagaagaaactctatccgtatacccaaatcacacacaacaaaaccacacaagagcacatgtacacgcccaaccacgccgcagaacgccggcaaggatgtgatacaggccacagaaagcgttgtaccgcctaggcaatgcaacaattgtccgctatgctctgaaggcagatggcggcacggatgccatcccaaagagggggtatgaccatgattcggggtatgaacctatgcagcatcgccggctgcacgcacgaagcagaagaagcgggcatgtgcaacatgcatttcacatcggcgctggttcacggagcgctgcactacactgcggacggacgtccgtcgcactgctgagcgcaacaacaaagcaaaacaaccagtaacgctcaacggcttccacatgttcatgctctaattgcatgtacttgcagacacaatggccggtctgagccagctgccctcgcatggagcagctggctcagaccggccattattgttgctttgtactgtttgcactgtattgcgcctgcattgcgcaagctcggggtagtgcccgaaaagttgcgcactttggatcgtggccgtccatggcgcgatagtcagttcgcttccacgaggttgtcaccgagccgggacatgtcgagatagcggcgggtcgaccattcgttcgcggtgacgtgacggat

SEQ ID NO: 2494 - DNA, 2775 bp, Unknown
  R50_10m  MAG No. k141_20465
ccctccttccctaccgagaacaataaacgggcccgcattccagcccgatgcactcgccatatgggcatgtccggaagaccgtccaaattccgtacttggttttaccgtcagccgtcaatcgtggcacatcgcataaagccgactagtatgaggtgggaatcgatgattcgacaacaactacatacaggagagtggcaatgggtgaagtgatcaccgccaaggacaaggaatatgaggccgaggagcgcgctacggcgccgggcgcgaaccagtcgatgagcgaccgtgtgaacaaccgctcgctgcgcccgcagtcggctgcattcaaggagtttatgaagtccggctgggccgacgatgatccggagatcaagcctctcgaatcctccaagttcacgccagcccgccttgaggcgctgggcaaagccttcccgggcgagcgtctggtcattccggccggccagccgaaggtgcgcaacaatgattgcgattacatgttccgcccggacaccacgttcgcctactacaccggtctgggttccgattacgaggccggcgccgtgctggtcctgaacccggtcgaccccgactcccccgaagccgccgccggcaagacgcacactccggaactgttcgtggcacctcgcgccgacaactccaccgaggacttcttcatgtccgcccactacggcgaatactgggttggcccgcgtgctggcctccaggagatgcaggcgatgaccggcatcgagacccacgacatcgcccagctggccgacgccctgtccaaggacgtgggtgccgaggccggcgccgtgcgtgtgcgcgtggtcagcgagaccgatcccgaaatcacctcgatggtcgagtccatccgcgaggccaacggtttcgccgatccggacaagaactccgcatccgacgacaagctgcacgagttcgccgccgaggcacgcatggtcaaagacggctacgaaatcaacgagatgcgcaaggccgtggacgccaccaagcacggcttcgaccgtctgctctccgcactgccggccgcgctcgacaagccgcgttccgagcgtatcctcgaaggcgcgttcaacgccgtgtcccgtgagctgggcaacgccatcggttacgactccatcgtggcctccggcccccacgccccgattctgcactggatgcgcaataccggtgtggtgaagaccggcgacatgctgctggtggatgccggcgttgaggtcgattccctgtacacggccgacatcacccgcaccttcccgaccaacggcaagttcaccgacttccagaagcgtctgtaccaggccgtgctcgactcgcagcaggccggtttcgaagccgccaagccgggtgccacctattccgacatccaccacgcctgcatgcgtgtgatcgccgagcgtctgcacgattggggtctgctgccggtgagcgtcgaggagtcactgtccccgcaaggccagcagcaccgccgttggctcgcctgcggcgtggcccaccacctaggtcttgatgtgcatgattgcgcgcaggcccgctatgagtcctatcagggcgcgaagatcacgcccggcatgatcttcaccatcgagcccggtctgtacttccgcgaggatgatctgctgattccgccggaataccgcggcatcggcatccgtatcgaggacgacgtgctcatgaccgagaacggccccgaatggatttccgccggcatcccgaagcagatcgacgacgtcgaagcgtggatgcggagccgtaaagcaatcagtccggtggactgattgtaggcgacgccgaacgctgacaagcgcgaggaaaatgaaatcatgcgcgaagcgcaccatattaagcaggctgcccaagccaagtaacccttaagctccctcatcagagggagctcctttttttctactaaggaggcaatgtgcctactccggaatttgtgttggaattgcgtaagaagatcggccatgatctgctatggctcaatggcgtgaccggttgtgtactgaacgaacatggtcaactgctgttgggccgtcgttcggacacgggcgaatgggcgatggtctacggcatcaacgagccgggcgaacagccggcggacacggtggtgcgcgaaatcaaggaggagacgggcatcgatgccatcgtcaccgatttggtggccgtcacctcgtcaaacaaggtgctgacctacgccaatggcgacaacaccatgtacatggatcattcgttcctgtgcgccctgaagcccggcggcaatgccgagccgttcgtgggcgacgaggaaagcctcagcgtcggctggttcgatctggatgacctgcccactcccctggcggccagcacgagcgagcggctggagctgttccatacttacatcgagaacaaaaagcacggcgacgcccacgccctgttccagttcgatgggcagcagtactagcggatataaagttagctccctctgacgagggagctccaatgctatgcgattacgcctcttgggctaggagctcgtggaggtgggcgcggtgctgctgctgttcgcgcgggtcgggcacgggcagggaggccagcagcttcttggtgtacgggttctccgggtgctgcataatctggtcggcatcgccgtgctccacgatctggcccttatgcatcaccatgatgcggtcggcgagcatatcgaccaccgccaaatcatgggtgatgaacaggcacgcgaagccgatttccgcctgcagtcgcttgaacagc

SEQ ID NO: 2495 - DNA, 7227 bp, Unknown
  R50_10m  MAG No. k141_20700
gaagtgagactgaggaagagactgcgacgcagtcgctaaaacattgaatcggacgcaggccgatacctattattcagcggctacgccgcaacttctctccctcagtcagctacgctgacagctccctcatcagagggagctaatgtttactgtcatcgactgatcacatcagcgacttgtaaatcgcgagaatgtcctcttcggtggcctgacgcgggttgccgggggtgcacacgtcgttgaaggcgtcgtgggccagcggttccagatcagcctcggtggcgccgacctcgctgatcgtggtcgggttcttcagatccacggtcagcttgtggacggcctgcacggcctcttcgcgcaccttctccaggtcgccggtgtaggcgtcctcgacgccgaacgcgtcggcgatgtcgcggtacttctcgcccgtgtagtccttgttgtattccatgaccggggccagcagaataccgttggccacaccgtgggccacgcccagacggccgcccagcgggtgagccatgccgtgcaccaggccgaggcccacgttggagtaggccataccggtgatgtaggaggcgtacgccatctgctcgccagccggaatgtcgccgtcggcggacttggctaggttcttggcaatcatgcgaatagtctgcatggacaggcagtcggacaggctccaggcacccggggtaatgtaaccctcgatggcgtgggtcagggcgtcaagtccggtggcaaccttcaggccgcgcggcatggagtcggtcagatccgggtccacgaaggcgacgatcgggatatcgtgcgggtcgacagccacgaacttacgcttgttggcggtatcggtgaccacgtagttgatggtcgtctcggaagcggtaccggcggtggtcggcacgccgaagatcgggacggacgggttcttggtatccgcgacgccttccagggacagcacgtcggcgaactccgggttggcggtgatgatgccgatgcccttgcaggtgtcttgcggggagccgccgcccaggccgatcaggaagtccgcaccggactcggcgaacttggcgacgccgtccttgatgcactcgaccggcgggttcggcttgacgttggagaacacctcgtacggcaggccggcctcatccagaaccttggtgaccttctcggcggtgccggtctccagcagtaccggatcagtgacgataaatgccttggtgaagccgtgctgcttggcgacggccgggatttccttgatcgcgccacgtccgaagtatgcagtctggttgaaaatcatgcggtataccatagggactctccttttgagctagtgtcttaactggtggtccactcactctttgagtggtccaacggttccccagtctactccgcgcatgagcattcacctgaaaacacgctgaaagaacaacactgaaaataatggcaagaaatggcggaattccgcacttgtcgaattattgtccattgaccaaaccagttcaatcgcccgagatctcaacgataagaccattttccggagtcgcttggtgctctccgagaaactcgtctcttatctgcttacttcgcgcgtacacaatcaatatgcgagatgcctaattccattcgtgtttcatcagccgaacgcgaactggttcaccagatggtgtattcaacggtttcagtctcctgaagaggactaagatacctcgacaattggggtgatcatcataagagaatgaggcagataatggcaaatggcaaggctatgacggtcggcgagatggcatccctgtttctcgaccccgacgctcccgttcgtatcgacgcttttgacggctcgcatttcggcccggcagacgcggatttgaaggtcaaaatcgccacgccgaactgcatgtaccagctgctcgcgcacccgaatgaaatcggcatcgtgcgcgcatacattctgggcgatttcgacgtggacgacattgactacgccgacccgtatccggcgatgcgcaagctggtgtcgctggccaaatacgttcgcccgctcactcccgcatccattgcccgcgtatccgccggcattctgagtcacggcttcaagaagccgccggtgcccgccaccgagggcccaagcaagttcgcccgcatcaagcgtggcctgatgccgcacaccgaaaaggccgattcggaaaccgtcagctttcactacgacatgtccaacgagttctacgccgacttcctcggccctccatgacgtacacctgcgcggtattcgacaacgagcacatgagccttgaagacgcacaggccaacaaactgcgcctgattctcgacaaactggacttgcagcccggccagcacttactggacatcggctgcggctggggttcgatggtcatcaccgccgcccgtcgcggcatcaaggcgctcggcgtcaccctctccaaggaacaggccgcgtacgccaacgaatggatcgcccgtgaggggctgcaggatctggccgaagtgcgcgtacaggactaccgcgaggtgcccgagcatgacttcgacggtatctgctcgatcggcatgatggagcacgtaggcgtcaagaactaccagagctacttcgaagagatgttccgtctcctgaagccgatgggccgactgctgaaccaccagatcaccatcagccatgacaagcctcacggcaagcccggcaccgacgaattcctcgaccgttacatcttcccggacggcgacctcggcgcgcccggcttcatcgaatcgtgcatccatgactccggcctcaacgtggtgcatcaggagaacctgcgccagcactatgcgctcaccctgcatcactggaaccagaacctctccgagcattgggacgacgcggtcaagcaggtcggctttgaacgcgccaaggtatggggtatgtacatggccgcctgcgctctgaacttcgagctcgacggcatccagattcaccagttcctggctgtcaagccggatcgcgtgggccacccggacggcaagtggtaccctctgcgccaatggtggcaggcctgactccgtttctgtgggacggcacgcggtttttaccattgttcatctgccgtcccacagaagtgtgggatagcagatacatcaatcgtttgacgtatctgctatcccgcatgacataagccgagaaccgcagaatagagccgttctttgccctcagctctgagggcgttcttcgaacgctgtgggacggcacgtcgaaaatcggcaaaatcacgtgccgtcccacacgattcccttcgcacgcgcatttcgcaggtgctttttctgcaatactgactctatgagcgccacagccccagaaacggctggggcggacgatcgcaccgaccatgacacgcgcggataagacccacgtttctttatttaaccctaacccgatgttcgcattggtgctgttggcgtgcgtagttgcggcgaggaagacagttgttggcgaacgcgagcctttgcattgaccggccagcccgccattttggcctataaccccagccggagtaggtacgtgacggatatgcaaaagccccacacaaggcggggcttcattgtggtggctccgaacggcgtcgatccgttgacctagcgattttcagtcgctcgctctaccaactgagctacagagccatgaacagtcaaaaacccggataatccgggcttcataaccattccagcgaccccggccggacttgaaccggtgacctccgccgtgacagggcggcgctctaaccaactgagctacggggccattgttctcacttgcgtgaggcaacagatgtatatattactgaaattcgccggtcgtgcaaatttcggcgtgttccgcgtaatttcaaggtttttgctatcaccagcacacggacacgtctgccataaacatccacaaacgacgaagggcgcgaccggaaccccggtcacgcccttatgaacagaagcacttcacggcatccaccgcaaagcaatcgtcaatctcagtcagcctgcttccaggtgtcgacgtcgatgtggtgttcggggttggcctgccaggcatcccacgcggacttgacgatgtcttccacgtcgtacttggcgtgccagcccatctcctcgttgatgcgcttcggggagccgatcaggtgcggcgggtcgccggcgcggcgggccatgacagcctcggtgaacggcagaccggtgaccttcttgacttcgtcgacgatctggcgcacggaggtgccttcaccggtgccgacattgaaggcgtcgtacttgcgctcgtcacggtcgaggtacttgagggcggcgatgtgggcgtcggccaagtcggagacgtggatgtagtcgcgcacgcaggtgccgtccggggtcgggtagtcgtcgccgaagatggcaggggccttgccctgcttgaggcggttgaacagcatcgggatgaggttcagaatagccgggtcttcgagttcgaccgggccgcagccggccacgttgaagtagcgcagcgcgcagaagcggatgccgaacggctgctcgcaggcgcgagccatccactcgccgaacagcttggtctggccgtaggggttgatcggcagcatcgggacgacgtcctcgggcaccacatcgaccggcggcacaccgtaggtggcggcggaggaggagaagacgagcttcttggcgttcttggactgggtcatgccggtgagcacgttgagcatgccgttgatgttctgctggtagtaccacagcggcttctccacggattcgccgacctgcttgcgggcagcgaagtggatcacggagtcgacgccttcggcgtcgaggatttcggccagacgctcgccggcgcccggagcggcgatatccatgccgtacagacgggagccttcgatgcgggtgggcttgccgtagctcagatcgtcgacgacgacgaccttttcgccggcctgatggagtgcgtgaacgacatgcgcgccgatgtagccgcagccgccggtgacgagaactgtcatagttgacctttccttatgcgggttgcaagtgtcggccgtgtggagttcagcggctgttcacttttggtccgctttgttaccttttgaaacaatttgagtatatcacacgaacataatcgcacaaaacggtggtgtcgtccggcaatatctgcattcattaggtcgatttggcgttcattaggtaggtcggcccggagccggcccgcacgaacaccgggtaaatggcttgatatggtggttggtatcgcacaccacccacctaatgaacgccaaatcgacctaacgaatgaacagcggtgcggcgcacaaggaaaatccgaggaatatatgaccgatcccgaatccacagcaatcgattccgtcgccgcgatggccacagaccacaccgaggcaccggcgcaccccctgcacaaggtgctttccttcgtgcgccgctccggacgtttggacgatcgcctgcagcgcgcatgggacaactatgccggcacatatctgttggacattgcggccggcaatctgctggacgtgcgcgaaggcgtcacgctcgaccgcgcgctcgtggagtccgcatggggcaacgacaatccgctcattgtggaaatcggcaccgggcagggagaaaacgtggcggccgcagccgcggcccatccggagacgaacttcctagccttggaggtctatgaccccggtgtggcccacacgctgctgctcgccggcaagcaggggctgaccaacattcgtgtggcccaggtcaatgcgcccgagctgttcaaggtgaccgcgcccggcaccgtggccgaggtatggaccttcttccccgacccctggcccaagaagaagcatcacaagcgccgcatcgtgcaggaggccatggccggcgacattcatcgcgcgctggtcacagacggcgtctggcgcatcgccaccgacatcgaggactacgccctgcacgtgcacgaggtgatggacggcctcgatggctggaagaacctgggcagcataaccgtcagcctcccgctggagcacgtgggtaagggcaatgccgacatggccgccgacatgccgcacgccgacttcaccgaatccgagcggttcgagggccgcgtgctcaccaacttcgaaaagaagggcctggccgccggccgcgtgattcacgacttcacctatcaggccgtcaccctgaactgattgcgacacgccgaaatgccgtcgatttgcataaccgaacaacctcccgtaaagtaattcgagttgttcgcccccatcgtctaacggttaggacaccagactttcaatctgacaacgagagttcgactctctctgggggtaccggtttgctcctgtcgccatcattgtgattcggcaggagccttttgttttcaacgggtcgcacctgccggcgatgtggcgtgccaggagcgtcgaggtcagcgctgccaccaacgatgcacctttgccttcgtttgtgttcgtgtcgtcgttgttgacgatgtcgtacagcgtgtcgtcgagcagttcggccggaggcatgccgagggtgacggccgcggccgcgatggcgttgaggtcccatgcggcgtcgaggttcattctggccgatatggtggccttggtcacgccggccgcctcgcacagggcctgctgttcgagttcttccttggccaggtgcaggcgcacgttccatgcggcgacctcacgcaggtgctctcccagttcgatggcctgtgttcttgccgtggtgttgccggtcatgtccgttcctttcgtttgcgtgcccttgggggtttgtgcgcaccatgctatgggcggcgcgcttggttgcgcaatacgaccgcctccccggttcggtctggtcgaactgggccgggaaaaacatggaaaacgaaagcgctccgcaccgtgttggcgcttggtgcagggctgatcgacaaccttgggcgggattccgggcgattcaagtgacaagagtcccgggattcgccctccattgaaagagagttatcgcaatgaccaatcctatcatcgcttccgccccgcgtgcggcgggagccgtaaaaaccatcccgtcgctgcgtgtgcggattgctcgcgcgcacttgctggcggtgctgctgcatcccgcgcgctcgtcgcgccgtcgccgccggagcgcctgagatgggccgggctgtggcggcggcggccgtcgtcgcaa

SEQ ID NO: 2496 - DNA, 4512 bp, Unknown
  R50_10m  MAG No. k141_21162
caagcatcttgtaggtgatgtcctgacggatgccgaccacgaagttcgaccagtcggctccgagcagcacggccttggtggtatcccacgcgccgttgtctacctcgttgaggccgaagccgtacagggtggacggcgcgccggaggcgagcgagggcacgtagatcgggctgccgttggcgttgcgcaggccgataagttcccagttcaggcccggcttgctggcgaagccgttcatggcgaagccctgttcggcgagcttctgacccatgctggcaacgtccttggcgaggtccttgccctgggtgagcatgttgtgcgccgcgatggcctgcgggatgatgccgtcagggaagctggacggcttgtccacgccgaacagtgtcgcctgatccagcttgtagccaagcgcggaagccagacgcggcatgacctccggccagatggggatgccggaatccgcgatgacggcctccgggatgggcacgatggccgcaagctcctcggccgtgatgctcaggccagaccatttcatcttcgtggtctgcttgaggccggtatcaccgccaacccagtaggcgatcggcttggaatcaagcaccggctgcgtgcgcgtgcgggtgctcatgcgaatctgacgcatgcgggtcagggatacgctcgacttgggagcgtcttggataatctgggtggcgtattcggtggggatgagtccgccgccgaggtcgccgctggtgatgatggagttcacgttggaagacatcgtcataccttctttctatgaggtggattatttgcgtttctgcttgaggaactcatcgcgcagccaatcgccggacgagccggaaggtgcgggcggctggttggattcggatgaggcgtgcaccgtgggcttggttttgtcggcgatgtagtcggcgagcgcctttccgttggcctgcatctcttcgagggtggagccgtgcagcagtccggtgggcacgccggtttccttggagacctgcgtcttccattcgttctgctgtttttccgcctcgtaggcggcgttcttggcttcaagctctttgatgtgcttggcggtcttttcggcttcggacagctgggcctccttgagctgttgcagctcgtcggcggctgctttgttgtccttggcgcgtttctcccattcgcgggaatgggcgacggcctccttgtatttggcctcgtagtcgatttcgggcggcttcgctccgttctcggtcgatgccgcctgctggttgccgttggcctcttcggtcatggttcctcctagtgggttgggcccgtttcgggcataaaaaaaccacccgtgcgggtggttgtggaaaatctcagttcgagtgcgatggtcgtggcaccccgtagccgtccttgtagcggtcggggtagagtcggcgcatcacataggtgatcgtgttcgggtcgttcggattctcggggtcgccttttgtggtggcctttatcatccgataggtgtcgtcgtccaggccgccgttctcgatgaggctgcgggcgtgcatgtattccgagtacatgcggtcggggtcgtagccctcgatgtgcgcttggtccctgtcccattcgggcacgatctggcagtcgcagtcgtcgtggaacaggctgaacgagcctttggcgtatttcgcggttttctcgctgtggtacacccagcctcgcgagcagagcatcgtgcagaacgcgcacgtcttcgcgcctctcggcacgcgcgcgtaccgtggttcggacgggtcgtgctcgcacaggcgggcaacggtttcacgccccgaatacatgacccagcgttgcatcgcgccgaccagatacgcctgcatggtctgcgggtccgtccacaggtggccggcctgccagcgtatggtcttgtcgatgccgtcgccggggaaagagtcggacaggtcgtactcccacgggtctggcaccgattcgccacggacgcgcatataccattcataggcggcatgcgccgcgaggtcgccgtatttgacgaccagttgcggcacgtagtcgagcagcatgtcacgctgccattcagggctgagctgttgcagcgtctcccacagtttcgccagatcgcggcgtgccagttccaccgccctggcttggctggcttgcagctgttccagttgccggttgtccgtcatccttgttgcctccgttcacgagggagtcaagcacgctgcgggtttcggccttgcgcttgtcggccaacaggcgtgtgatgtcggaatccgtgtagccgagcttctccaacaccacgtcggagttggcgagccatggaatggccgtcacctgcttcacgatggcatcggagagcgcggcctgcgatgggcgttcggggtcacgccagttgacctgcaggcggtcgagctcgtcgctgtcctcgctggtgccgttgagtatggcgatgtccctcgcggccttgcgtagctgcacgccgatggcgcggcaggcgttcttcgcctcgatgacaagctcgctttccgccgccatgatcgcgtcggacgaggaagggccggagtccgtcatcacgccgaactggctgagcggtacgccggtcgcgccgctcatgcgtgccgcgagtgcgcgaagcatgtcggtgtgcggctgcatggtcatctgcgtgaactggccgatggcgggtgcctggccgtcctcgttgaggctgatgttgagcatcttcgagatggtggcttcccagccggtcagcttcttgccgttcttgtcctcgggcggctcgtcagcgccgatgaggtagcgttgcgggctcgaatagaattcggcgcttacctccatgcgcagcatggtgcgaaccgccgtgtcggtgatgctcatgacctcgcggctgatgcgcgagcggccaaaggggcggttcaggtcctgatggtaggggatcaggtaaacgggcacatgatccatgtacgtgttccggggagcgtccgcatgatagcggcctgattgcgcgcggcgtatacgaatcgtgtagccgggcatgtagagcatgagctcggaaggcacgatggtgttcgcctgcgcgtactgggaacggtcgatatcggttatcgacaacgccgccgacaggccgcgacgggcgtaatcccacaggccggtctcatagagcgcgctgcggaacgataccgacaccttcgagcgcagaccatcctcgggttccgcgctgcgcacattcaggaacgagcatgaatgggtgagcgcgctgcggatggcctgcggcagttccacgtcgaagtcgttgtcggaaagaatcgaatccaaacccaacgggtcgcggccgtcgtcgccgactccaacgaaaccatcgaacacgatgcggtcggccaaagcgtccaccgatttctgcggccagcccacgacctcgcttatccccgccatgctgtccggcacagcgatggacagattcttaagctcgtttcgtccgtcgtagtatttggtgcgcaaaaggttacgttcgagcttctgggaccattgacgtatcatcaaatcccacggttctcggcactcgtcgggcagattatcgacctgcacgttttcaagactgggaatctgcatcagaatgccaccgccttcgctcttctgcccggatgacgtttggaagtcttgacgttccaatacgcgagagccaccgcttccacgggactcacgtcgatgttctccatggacgtctcgtagccgaacccgtctccgattttcctgtgcttcgcatgacccaccgcctcgtcaagcagaggctggccgaaatgggtaagcccatggtcgttcacggcctgttcgagcatcgaacaagcgtccgccacgtcggaagggcgcggaaccacgatcactcttttggacacgcccttgtcgatgaggctgttgaccagggtgggcgctcccacgcgcccgtcgatgatgatgccgatggcgttgcgccaccgttccgcaccgtctttctcggcggtcagccagtcggccagccagccggtgccgccacgcatgctgcgcgaggcgatgacctccacgtgaggcaattcacccgacttgcggggcgggcgcacgcacgccacgagggtgacgttcgcgccgtccgcgctgaacttgaccgcatacgagttgtagccgtccatgcagggcttgtcggtcttgcattcggcccaagcatccaagtcgatgtcggacagcgcgccggcctgatcgttccaccagccgagacgttcgcgggcgaaaccgtcaggggtcatcttctccgactcggaaacgaccacgcttttcagcagtcgggtgccgagacttggattgtattggtaccagcgttgctggtcgtgcacgtcgcctatctcggtcgccgcccattcgaaccagcacaggttcttcggcggcttgtccctgtgcgcgttgcggcgcatgcgcgcgaacaccgtgcccggcgaggtcggcggggtcggtgttcccgtgtagatggtcaacggattgcccgagggtgcc

SEQ ID NO: 2497 - DNA, 3016 bp, Unknown
  R50_10m  MAG No. k141_21298
gtacaagacaaggtcaacgaccggaaggaaaccgggtcgtttcccacggtgcgtaagaagccccggaaggatctcaaccgtgccagcaacaaatcacggttactatcctcgattctcatcgctctgatgtgcgcgttgttgggtttcgcctacatgagccagatcaataacactaaatccacgtacgaaacgatggacgagagcgaactggtaaggctgctgaacgagtcgaatacgcaaatctcgaatctcgagcagcgtaaaacccagttgaacagccagctcaactcactgaaatcggcggctaacgagcaggagcaggcgcgtaagatcgccaagcaaaacgaagagaccagcggcttgatctccggcagactcccggcgaagggccaaggcgtgaccatccgaatcggacgaggctcgacgactaaagtggacgcctcaatcatgttcaacctcatcgaggaactccgcaatgccggcgccgaggtaatcgccatcaataacgtgcgcgtcatcacctccacctacattcaggacgccgaggaaggcttgatcgtggatggcaccaccatcaagcccacatacacggtgaaggccatcggcaatccgcaggagctgtccaacgcagtcgatatcgccggcggtgtgggcgctcagctccaggtgaaatacggatccaacgtcaacgtgcagccttctgacagcatcattatcgacgaagtacgcgaagctacgcaaaaccagtatgcaaagacggtagaataggggattatgaccaacccgattcctagcgcaggcgaaaccaccattatcggcctgcccgcgattaatgtactgcccattaccaccaccggcgatcgaccgctgactcaagaggatctggacaccatcaccagattgtccgagggaacggcattgctgatttccgccaggggagcggtctcaggttctcgttacttgcttgacgaggatgaaatcaccgtcggtcgtgatccgcgagctgatattctgctcgacgactccaccgtatcccgtcagcatgccgtgttccgcagggtcaacggtcagttctttgtggttgacgcaggaagtctgaacggcacctacgtgaaccgtcagcgtgttgatcaggcgtcgctgaagaacggcgacgaaatcatgatcggtaaattccgtctcgtgttcttcacgaaatccgccattatttcccaatagtccacacccagcacggggttagactgattgcagaaattgcaatcatgtgattacaccagtgtgagtcacatgcgagacacgcatgagttaggggagtgccatgggacagacagggctgcatcttcatgtttcgcttgaggaccgtcagaatctgaacgctgacgcgattcagggggagttgttctccaatgtcgatactgaggagatcaagcgcggctaccgtggcactgtggcctccaaggtggccggcatcacgtaccgacagctcgattattgggcacgcaagcagattgttgagccgtccatcacgccgtctcatggctccggttcacgccgactgtactcgtttaaggatgtggtgattctcgctgtatccaagaagctgcttgatgccggtgtgaatctgcagaacgtgacggcggctatcggattcttgactcaacgcagcaccgatcagctggccaatgtgaccatcatgtgcgatggtcaaaacgtacatgaatgcacaaccagcgaacagatgctcgaactgttgcaaagcggtaaggcagtgttcgccgtgtcggtgggttcgttgtggcaccagattgagacggccttggaacaggaagaatatattgatcttgaggccaagccgctgacgattgccacgggccgtccgattgatgaactgactgccatgaggatgcgcaagaagctcgaggcacagcgcttgcaacgcgcaaccgcctgatacatgtatggttgttggcgccttgccggctttggtcggcaggtcgctttgttgtatgtgttgcttttgttgcctgccatcttatgtttttatatgttgcggtgattattatgactgattggaggaccgggtgaacgggattgttgttggattgttgccgggcgttctgtggatggtcgccgtcatctttgctgtgtccatcatcactataacggtcagccgaggccatctgttcacgccgaaacgccggcgaccgccggtcgatccggtcgactggccgatggtgaaaacgcatttcatgtcgtttgcggcggcgctgattccgtttcccgtgttgacgtttacagcggatttgatggatgctcgcatgctcgcgttctacgaccacgcgcaattgcccggagcaatcatcatattcgtgctggtgctgctggaactcatcgccatgtatctgcaggcacgcaacgcctcagaaaccgaaatggacaagcgtttgggcgttgcttctcaccggaataaggatgatgttgcgaagtagccgattctctgcggcgaggctaatccgcagctagatactactggttcggctaaaatcaccacatactattaaccgataacgtacgttatgtcagattagttatccttgacgaggattcagtcgcctgtatcaactagtccacgcataccaggccgacagccaaaaggccgacagccaaaggagcaccggagctaccaccgcaattgcaagaatcgccgtgcctttcagccaatccttgtcatctcgtttccagtggaatgctcgccaaatgaaccatatcagcatgggaatctcatacagcgacagcaatggcaaaccgatgaaaaccaggtcgaagcccgcggcgcaggctccatcgcatcccatcatgaagaagtcctcgccgttgtgtttcagtgcgtttggaaataacggttcacggcttcttcgatctgctcgggcttctcgaggatctcgtacgcgccgtgttcctccatctcaccggccggagcgtagccccagcggcagccgatggcgtccaaattgca

SEQ ID NO: 2498 - DNA, 5773 bp, Unknown
  R50_10m  MAG No. k141_21877
aaccagatagaaatgctgagcgggcgtccaccgttctgatttgcgcagtcccactcgttctcgaatatgttgcagcactcgattgaacacttcaggtttcgatgcgagaggatttgctgctacgggtatgtctggccgagagtcgtcctgctttgcaatcatcgcatcgtatgtcacgttctgctgatgattaccgccgtgtttgtaatcacgcaacgtcaagagcaccgcaccaatatgcttgcagtatccgtcatagtcgtaggggcaggtgcaggatgcgaacacgatatcgttgccacgaagtcgaatatcgacatcgtagagttcagaaccgtgcacttcggcgtggaatagtccggccgacacttcctctaacccaccgatcctatgctcgtccacgtaatcatatgctcgctccaggctgcgggaggtcatctcctcttcgaactcgtcgaaatgagcagtcatgacgggcctcctaatgattggtcatacattacggtgtgggacgtagtagcctaatgcagttcggctatcatctgttcagcatcacccatgcaacatcatgtcacggtgcttgtgccaacggaacagacgctcacgatggcggttcagcgtgaaacgatcccacatctggtcctcggcccactcaaccatgccatcatgttcttcatcttcgggattgcccaaggtatcaaggaaccgctcgaacccatacaccccgccgacatcctccggaggcgcatccccagccccatcccaaagctgaggatccgcaacgtgcacgctgcggtaggtacgcagcagcttaatatcatggatccaatcgtcaccataatcgtagtaatagcgagcggtacgcaccttgggaaacacgtcgcccagctcggtttccgaagcaacgcgaacttccggcaacggctccaccggcatatattgttcgtatttcgcctcatggtatgagggctcttctccccacaattcttccacttgcacctgcttcccattcggaaatgtggcgcagaagcagaacagatgctcgccgtaccacataaagcattcctgcaataccgcatgcaaatcgaagaacgtcaatgatgccggcaccagaatctcccgccagcattcacgcccgtcaaggcgcaaagtgactcggaaacgaaatgccgtgttgccattgcctgccatgaagactcccttatcaacgatgaagttattatcaccgtaacagagtctggggcaaaccactgcgttacgaatctgattcgcgccctcagaaaaggccgaatcatctgttcaatctccgtgttctgtggaaaagactctaacaataaccggtactgttcatcatcagcaagtccaatatgccatgtgaccaggtgcgggacactcatgtgatcagtcgctatggtggtgagacgtgacttcggttcgtaccgtcgagcagacgcgaatggggatagccgcgccgctcgtgtccaatatcggctggggcgtgctgccgctgtactggcgcgcactgtccagtatgaatgccatcagcgtgctcgcgtatcgtttggtcgccacgttggcggccatggtcgcgctgttggtggctttctccggcctgcccaccgcgattccgctggccacgttctcctacggcgtgcagcacagccattacctgaccgtgagtttcatccaatatctcaacccgctgatccagttctgtgtggccgtgctcctgctgcacgagccgatgcgcgcgcagggctatgcggcgttgatggtgatttgggtcgcgatcgcggtgtattcgttcggcgcgattcgggcgtattaggagcggctgaagccctatgctcgttaagcgcttccttaactcccctccccgaatgcgattacccagtggaaacaagactacatcagaccagtatgcaccgccaagcggcgagtaacactccacccgctacaatcagcagtatggttgttccgcaaaagccaacgctggctcaattcgaggtcatgttcgaaggcacaccgttgattcttgaacgtgccaccgattactgggaatcgggccgcgtgagttcggtgcaggagattgcgccgcagctgtataacgcgcaggtgtccggcagtgccgatgactattacgacgttgacatccgcctcggcaaagacgctcacggcgagaacaccaatgaagcaaacaccgatgaccaagccactaccagcagtaacagcgaccacgaatccacaaccgacgacaattcgattcgcatacaatccgccgcgtgcacctgcccgtatcagagaacaccatattgcaagcatataggtgccgtgctttacgaactgcgcaaacagctcattggcgcgcacggcaatcaccacaatgattacaccgccaacgctcacgatggtgtcatcgcactcccccgcaccgtgctggatcccatccagcaacacctcgacgcgcgcgcagagcaaggcaaaggccatctgctgttcctgtggtccacccaactgcgcgaagccgcaaagacgttctgcgcccagccagacgaagaacgaccgctaatcccgctgatcgacgcacaaaccatgctctccgacacaatccgccgatgccatgaacgtttcattattcatatcagtaaacacagcgatgcgtacagcaaatcatgtgactacacagaattcatcaaaaccgtgcaggctatcgcgggcaatgccctgcaatccagtgattacgcgagcgcatgcggcaacctgcgactgtgcatacacgaagtccacgcgcttctgctctcgtccgagaacgatgatggctccgaacctttgctcacgcttatggatgatctggcgatgcgcgtgcgatgctatatggagaatgtggcggaattcgccgactcatctaccgccggcaaggcattgaacaccattgcgcaggccgcgaacgacaaagacatgcggcaatgcgaaccattgaacagtatgttgctgatttccagcgcgctcgctttcgcccaatatgataacaaacgcatatgggcctatgacgtgatcgagaacgcgataacgcgcaatctggaatactcgttcaacgaagagagcgaagaaagcgacgaggacgacgaggatgaggataacgaggatacgagcgaagtagacgacgaaaccgacttcattccggatgaatcgttacacgtattgcagttgttcacactcatgagcgcctacgacctatacgctctatccaacgatgacgctggacgcgagcagcttctgagcgaatactcggagtcaatggccctcacgctgatgaacgctgcgaacatgattcatgaagggcacttgcgttccgcatacatgctcgcacaagatttccttctgtcgagccgggatatggaagatgtcgatatcgatgcccgacataacggtctgctgccggacctgctgccccatggatggcataccatcatggaatgctgcgccgagggactcaatgacgttggactgctcgccaacgtgtatcggtactacattctttcctgcaacgacagatccgatacccattacgtgagtaaactacgcaatctgttacgcatctacggcggtcttagcgcagaagaatggcatgacgtggctgatgggctggccagagattgcgcccggaacatcatcgaccgcatcaagtaccagccggaaataaccaccaaaggcggcacacagcgccacagcagttggcgcaatcccgcttacgagaagctcatcgtggacgagcggctttcggacgcggccctgacttattgcgccatcgtcgattacccgccgctgccattgctgcgcaccatcgccatcgaacaccccgaatcggcaaaatcgataatcctcgaagcgatgccatacggcaccatgggcgcgcccgtgttccggtttacggtggaacgtggcgtcgacaatacattgacggcgcgccgcaccacataccagcagatcgccaaacagctacgtcgtttcgccgcagtgttcggcgatgaggagacccgtgtgctggcacacgagattgttgagcgttatccgaatcgtactgcgttgcgggaagagctggcgtttgcgttgtagtgacgacattggcaacgcggtacggcattcggcacatatccattgactatgcagagaaatgccagcctgttcttcgctgagattcctgatgatattggtcagctggctgcaaacccagaccttggccaaatgctcgtccatgaggaatcccttgcctttggcatagcgaacgacgacacccggcatgttgagtgcattttcagcgcattcaacatcatctgcgtgcgcttcgcgtgcattttcagcacaatatccgtcacataccttaatggatgcagcactccttcaaacgctgctgcaggccttcgtccaccgcgaaaaggtacagaccgtggacgccgcgcttgagcaggacattcaactcatgcttcaaattttcttcggcaaaatctcctaaatctttgcgcttattggttgccagatagttttggctggcctttgcatcgaacacgattcccccgttacgatacgtcaccgagggtccaatgatcacaccggcatagttcaaatcaaacccttggatggtgaagatggagccaatctcatctatggtgtacggcttctccgcccaagacagttctttgtcgatgcctttcctgcttttcggagcggaatcttcgagctgatagttccaaggcttgcagaattggtcagaacttattgcggaatgatcgaatccatggtcatccgcaagtcccatacgccatacgccggaagtatcgcgatgcagttccacattccaaaagccatgcggatcattctgattctcagatttcgccgaatacttccagtcataggtggccaacaaacgggacagtccagccccatcccaaccatcgggattcagctgggctttcgcgtgaatggcattaaacaaatcaaccggcgaatcgaacaccttaacgtcataaggttctcgaatcacttcaccatctgcggcatactcgcccgtatcaacgggcaaaggaccgatacctttccccgaagcgaatcggtcaatccactgaatcatcgacttactcgcggcaatacggaattgctttttcaaatggacatgcgcaatgtccacggaaatggacggcagatgatattcggcgcccaaatcaaccgctttgaatgcgccgattttcccggtcgcacatgcggtctgagtcgaatcagagtccagctgaagtttttccagcaccgctgggtcccactgctggctggactgcataatctgattgtgatcaaagaccgcaatcaccacccgggctctgcgcagaatgtcatacagctggttcttcccggaatatccctgatttccttgcgtcatcaacaaatgggcctcgtcgatgagcacgatgtccgccaggccttgcggttggtctggaatgcctcgaccatgctcgttgcgtaagctgaatcgattgatgaactgactgggcagcatgaccacttcatcagatttcttctgcaaacccagtttcgtggcaatctgattatatacgtgcacctgttccttatgattgacaagaatgtatgaggaaagccggccgttcgccgtttgtgacagctcaggataatcttcgtcttcggaataggtgtcgccttggatgccgatttcagccgcgattctgtagaacaggtggcttaacaggaccgttttgcctgtccc

SEQ ID NO: 2499 - DNA, 7499 bp, Unknown
  R50_10m  MAG No. k141_21896
actacatggtctggtaccgggacaggcggatcaagacggagttcggcatgagcatcatggatcgtcgacgcgagctcggtcttgtggcatgattggtggtgatggaatcaacgacgagtccaacaaaacggcaccagccccaaaccgaaaaaaattagtgacgaaacacgaaacaccgacttgactaaaaacatgcccatcgcggaccggcccgaggcggtcggatccaggaaggggttcggccacttcgagtcggacacggtggtcggcgccgcgccgtcgaggcgctgcatgaacacgcaggtggagcgcaggagccgcaggctgttcgcccggctcgtcgacgacaagagcgcgcccgccacggccagggccgaatacgagatcttcaaggacatgccgccggccgcgcgcgtcgaccgcacgtgggacaacggcacggaggcgagcctgcacacgctggtggacgaggcgctgggcatgctcacctatttcgccgacccgtacagttcctggcagcgtggcagcaacgagaacaggaacggcaggatccgccgctacctgcccaagggaaccagtttcgaggatctcacgcaggacgagctcgacgcgatcgtcggggagatcaacgacacccccatgaagctcctcggctacaaaacgcccaacgaggtatgggacgaggagatggccaagctacaatcaaaggcaaccaacacgaaaccagccgttgcacttacaagttgaatccgggtgttgcacttctaaatagacatcgggatttgagatccaaatggctaaggagactaaaatgagattcaaccgatacctataggctctagatagtcaaaaggagaaagatggcgagcgcggagaagatagcaagcaaagggcatcttcagttatcgatgaaagacaacgcgtatgattcgctgaatgaagcactgctaaaatccgaagaagcttcagatggcaacccagttccttggaaatatgctgtgctgcatatcacgcatgctgtggagctgatgctcaaacagcgcttatacgacgaacatcccttactgctatgggccaagctcaaacctgacgggcatactgtcatgcttgaagaagctattactagactggaaaatgcaggaatccagttcgatgaagatgatagaagtcgtcttcggcaagccatcaaatggcgtaatgccatcactcattacaatgttgatcttcagactgaagagatcaaaacttgctttgcgcttttattcgaatttctaacacgatttcaagcagagcagtatcctgccgatcctgagctcacgaagcattgatccgctaaggctaaaatcattgcggcgcatgtgatgactttcttcagaaacgagactgtgctttttgacggcaagcgtatgcaccgtacttggccagctttacttactgatgctcagggatttcccactgtcagtcttgatggtaagtcatatcagcgtattgtttatgggcaagagccgttttggcaagagcatcaagattgggttcctagaacagagtgcggcgattgcgcttgtaatattggacaacttcatggtccaggctgtgacattgaggtatgccctagatgcggagggcagttctggttctgcgattgtaatttcgatgagagtgagctatggggattgacatggagtgaagcggacgtcgagaatgacaattccgatgatgacgacgatacgttggtcggtcggtatggcagacccaatgccgaaaataacgtccagtaaaacttttttgttttactggacgaggtttcgacaaaaagaagaagccctacttcccaagcgggagtagggctttcgtggtcgggccggcgggatttgaacccgcgacatcttgctcccaaagcaagcgcgctaccaaactgcgctacggcccggtaattatgtcacttggcataacttttttagtctacacatacctcaagacggtctgtgcctccagatgactcattttttgcactcagataggccgagaaaatcggaggtctgcggtcattgttactgagtgttactggcggtcatttttcagttttagttgaagtcctaaaacccaagcgggaatagggcttatcgggtgtcgcaagcgcaacgttttgggaacatcctgctcccaaagcaggcgcgctaccaaactgcgctatagcccgatgtgccattaaggcacgaggaatcattataaacgacgctggatacattgcgtgtcgagcatatgaattcaaaaaggttctggattctcttgatagcttatgagtgacatctttattcattgatgctctacaacgactaggtttggatctgcatcgatatccggcgcatccgctggactaacaaggaccgtgcaaacgatgtggcccccgacttcctcgcaggaagtcgggggccacatcgtttgcacggtggactatcggatcaattctgatcagatcagctcgaggtcgacatcgaggctgatcggcttgtccgccgggatatggtactgggggtgcaccggcgacatccaggaatcatcgccgccaacgcccatctgtgcggcaaggacgcgcaggaacatgtgcttcggcttcggcagctcgtcctgatgctgagcctcctcaagcatgaagctggagtacggcaacaggcttaccgcgaacggcgcggcaccatcggcgcggctgacgcgcatgccgtggccgtgatcgtcggtaatctcggcccaacgcacatcctcatggttgcccgtctcctgcggcatgaggtacggcgcatgatcggcgaaggcgttggtgctccacacgccgagcttggcgtgtttgcggtccaggtacgtctcctccgggccggtgccgaagaacctcaggttcgtgtactgcacaggcagcgtccattcgatgccgaacgccgggatggtgggcaggtcaccctgctctccagggtattcgacgtgcaggttcacgcggccatcggtgtgggccgtgtaggagacggtcaccttggtgcgctgcgcggtggcgagctcatacgtgtacgtgcccttgagcgtgctgtcgtcgatctgctcgagcacgttgtccacgcagcgggcgtagcggccggcgcccagccactggacgcgctcgaagccatgaccggcaccgcgatcgttgtcggtcagcggacggaaggtggtgattgcgggacggcgcagcacgaactcgttgccggcgaaggtgtaggagaccatgccgccatgggtgcgcgacagcaggacctcgcgtccggcgcctcgcacgccagcgttccaacggcccacggtgatggtcccatcggccggcttcgcgtcgggcgtcgcggtggcgtccgcgggcaccaccgcctgtccgaaggcaagctcgtagccgctctcggcccaatcggtcgccttggcgagacgctgcgaaacctgcagcaccagttcgcgggcgtcggcgcggtacgccgccaccggccatgcgacatcgaacgtgcgggtctcaccggccggcacgtcgaaacgccgggtggactgccagaccggcttgccgtcggcgagaacgctcaggacgaacacgtagtcgctggtggcggtgaacaggttgtcgttcttgacggacaccgagtccttcgtcacgtcgatgtggacgttcgagtacagctgcttgacttcctgggccttgggggacggcttgcggtcggcgaacagcaggccgtcgccggagaactcgtagtcggacggacggtcgccgaagtctccgccgtagcgcaggctcctggtgccgtcgggctgggtggcgtagatggcctggtcgatgaagtcccagatgaagccgccctgatacttcgggtagcgttcgagcgccgtgtattcgtccatgttgcccacggagttgcccatggcgtgcatgtattcgcaggagaggtacggcttcttcgggtcgtccttcaggtacttctcgatctcgtcggcatgcgagtacatacgggtctcgatgtcggtgacgtcatcgtagtcacggttgtgggtcacgccctcgtagtgcaccggacggttcgggtcgatgtcgtgcacgtgcttgtacatggcgcggaacacgtcacccacgtaggattcgttgcccagtgaccagatcagcacgctcgggtggttgtagtcgcgacgcatcatgctgttgacgcggtcgacgcaggtgccttcccattcgcgattgctgcccggcacgatggtgtcctcggtgaggacgtctccgggcagggaccagctgccgtgggcttcgaggttggcttcgtcgatcaggtagatgccgtactcgtcgcacagttcgtaccagcgttcctggttcgggtagtgcgaggtgcggatggagttgatgttgtggcgcttgcagaagaccacgtcatcgatcatgtcctgctcggtgatggcgcggccgcgttcggcgtcgaactcgtggcggtcggcgcccttgaacacgatgcgcttgccgttgatggtcaggatgccgtcctcgatgcggaagcggcggaaaccgaccttctgggacgtgcattcgatgacgtcccccgcttggtcgatgacgtcgacgtcaagttcgtacagcgtcgggctttcggcgctccagggttcgatgccctgcagcggctcgctggagatcgcggtctgcgcctccgcgtcgcccgtcgtctgccacaccgtgttgccgtcggcgtccttcagggtcgcgcggaccgtggccgcgtcggccgcgttgagcacggtcagcgcggcgtcgagggaagcggtgccggcctcgggatcccaatcggcttcgatttgcgtgttctcgatgtgcacgtgcgggcgggcggcgagttcgacggagcggaacaggccgtgcagacgccagaagtcctgatcctcaagccaggaggcgctggagtattcgtagcaggcgacggccacgacgttctccccgtcgtgcagcagttcggtgatgtcgaactcattgggcgtgaagccgtcctcgccatagccgacgaacgcgccgttgacccacacgtagatcgccgtggccatgccgtggaacacgatcgacaccgatccgccggcctgcttggcgtttgctacgggggcggagacggtgaacttcctgcggtagagcgcgacgtgattgttctccgggatgttcggttccaacgggttctcgtggccgtcccacggatactggacgttcacgtacttgtggttcatcagaccggccgtctgcaggtggcccggaacctggatacgctcgaacgaggagtcgtcgaacgactcggccgtcgcgggttcctcttcgaggttgatgtcggcggcctgaacgacctcgacccgccactcgccgtcaaggctctgcttgagatcggaccattgtccgctctgggggtcgcgggcgtaccacttgtggctggaatgggccggagtccggttcacctcgaacaccgtcgggtcggtcagccaagcctgcgatgcgcgatcgacatgtgtgacgtctgtcatgctctcctgctttctgtcattacctcgttgtgaatgatattatggaggaggtcggggcctcctttaccgaaaaggataaacagtttttatataaaacgcaaatcctgtttaccgcttccaaatcactggcactgcttgccgtcgacgctacgccgcgtccatgcaatgtctcggttcagcccatgttatcccatccttgcgacacgctgtttatctccttgtttactaatgctttttacttttggtgataaaacttgtatgcttactttacaaaatcaatgagtgattccatgctctgggttcttaaggagaagattaatgagcaacgaaaatgccgcggacggtgacgtccgcaggaagagtgggttaggccagcgcatcgcctacgcgttcggaaacctcggtcaggccgccttctacaacgcgatgagcacgtacttcatcgtgtatgtcaccagctgcctgttctcgggcgttgacaaggcgcttgcggccaagctgatcggcgtcatcaccagcctcgtggtgatcatccgcatcgccgagatcttcgtcgatccgctgctgggcaacctcgtggacaacaccaccaccaagtggggccgtttccgcccgtggcagttcttcggcggactggtctcctccgtgctgcttgccgtggttttcagcggcatgtttggcctggtgaacgttaactccacattgttcatcgtcgtgttcgtcatcacgttcatcgtgcttgacgtgttctactccctgcgtgacatctcctactggggcatgatcccggcattgtcctccgactcccacgagcgttccacctacactgccctcggctccttcaccggctccatcggcggcaacgccatcaccatcctcgtgattccggtcgtcacctatttcagctgggtgttcaccggcgagaacgccgagcaccagtcgggttggaccgctttcggcatcatcgtcgcggtgctcggcatcatgaccgcctggaccgtcgccttcggcaccagggaaaaccaaagcgcccttcgcgccaacgccgaagacaacggtggtccgttgcaggcgttcaaggccgtgttccagaacgaccagctgctgtgggtcgccctgtcctacctgctgtacgccatcgcgaacgtgaccaccaccggtgtgcttctcttcctgttcaagttcgtccttgacaatcaggccgctttctccgcgaccggtgtcatcgccatgatcgcgggcctggtcatgtccccgctgtacccgattctgaacaggtacattccgcgccgctacctgtacatcggcggcatggtctccatgatcgtggcttatgtgatgctcgccctgttctccagcaacatcgtcctggtcttcatcgcgctggtgctcttctacgttcccggcacgctcatcatgatgacggtcatcctctccctgaccgactccatcgagtacggccagctgaagaacggcaagcgcaacgaggccgttacgctttccatccgcccgatgcttgataagatcggcggcgctctgtcgaacggcatcgtcggcttcatcgcccttgcggctggcatgacgggtgatgcaaccgccgccgatatgaccccgacgaatatccacgtcttcaagatctgcgcgttctatgccccgctcatcctgatcgtgctcagcctgctggtgttcgtctccaaggtcaagatcaccgagaagatgcacgcgcagatcgttgacgagctcgaagccaagctcgcctccggcgagatcgtcgacgatgaggcgcagaccgtggaggccgccgaagccgccggcgatgaggcgcaggcagttattaagaactgatctcccgttcccatccctcccataaggcccgtccgcctgaaccgcaagatgcggtccgtggcggacgggcctgttcgttcctgcggtcggcggtcatgaacatacccatg

SEQ ID NO: 2500 - DNA, 9306 bp, Unknown
  R50_10m  MAG No. k141_22050
cctgtcgatggcttccgcaatacgcgcggccatcgcctcgctcatatatggctgtttgttcagaaaattagacaccgaggctaccgaaacaccggcctcatgggccacgtccgccatcgtcactctgtttttgcctcgcacggtgaccaccctacccgactttgctggagatacgaaaacgactcccctgctacgatgagcagcaagggagccgttggataattaggcgctatgcgcggttttacagcttgacgacgagtacgccgttgggctggatggcggccgtgtgctcggactcgttgacctgggccagcgaggcgaccagcggttcgccttccacgtccacgaccgcaacatcgtgggtgcggttgaacaggaacacgaagtggttctcgccagtttcgtccgcacgctcgacgcgcagcacttcaccgcgatcgtcctcagccgaagtctcgatgccgagttcctccagcagcacgggcaggctcttggccaaaccctcacggccgagacgggcaccgacgtatgcggccttgccgtcgccgaagtcgttgacggtgatggcgggagcgccgtcgaaaccggtccacttatccgccttgaaggaggcgaccacgtgagcggtatcggccacggaggtgatcacgtcggcgaaatcgtgcgccacggttccgttgtccaagtcaaggtggtccatggcaccggggaagtcgttgcccatcggggcgaattcctcaacgcgcacacccaccacgtcacggatggaaccggggtagccacccagccagacgtgatccttgtcgtccaccagaccggtgtagtaggtcacgaacagcttgccgccgttcgccacatactcgcgcacgcggcgcgtggtctcttcggacaggatggtcaggctcggcagcacgacggcttcgtactcgtcccaagggccgcgaaccggcaccacgtctgcggtcagaccgttgtccgccagcgcgcggaaccacgcgagcggctcggtccaatggcgtacctcctgagtaggcgtggcggtgtgttccgtagcccactgggactcgtaatcgaagacgacggcgaccttggacttgaccagcttggtgctcagcaggccctcgtcagcaagcttgttgaggtcggcacccagctcgcacacatcgcggaagatctgggagtcggggcccgcgtgaggaaccatcgaagagtgccacttctcggcaccggccttggactggcgccactggaagtagcagatggcgtcggagcccatggccaagtgggccagggagtcgcgcaccaattcgccgggctcgacgcgatagttgatcgggcgccaattgacggcggagctggagtgctccatgaggaaccacggattcttgcgggcgatgccgtcacatagggaggccgagtaagccagctcgtcgaagtgagcttcgccaggcgtgaagtagtgatcgttggacacgaagtccacgtcgtaaccccacttgtcgtaatcgatgccggcaccgccggcggagaccatgaagttggtggtctgcggcttgggggcgatctcgagcagggcgtcgcgctcggccttgtaaaagtcgagcagggcgtcggagctgaagcgcttccagtcaagcagcttgcccgggttcatgaagttgccgtcgccgatgaagcgcggcgggatgatctcggaaaaattgttcatgcgctgcgcccagaatgcggtgccccaagcgtcgttgacggcgtcgatggtgccgtacttcttctcgcaccacttctggaaggcgcgctcggcgtcttcggaatagtcgaagcggttgtggcagccgtactcgttgctcacatgccaagagaccacataggggttgtccttgtagtgctcggccatcttgcggcacaagctgagcgcgtagtcaaggaagaccgggctggtggcgcgccagtgctggcgggcaccgggctggcagacgtcgccgcggtagtcgacccagaggatctccgggtgggcctgggtcatccacatcggcggggatgcggtgccggaggcgagatcgacggcgatgccggccttaccaagcttgtcgatgacgcggtcgagccaatcgaagtcgtacacgccttcttcgggctcaagcttggcccaggagaagatggctacggagacgaggttgacgccggcctgctgcatgagggctacatcttcgtcccacacttcctcaggccattggtcggggttgtaatcgccgccgtaccagatgcggggcttgttgcccgcaagcggctgcggccacttgaactctttacgttccatgatgattcagctcctttattgaattttatcgataatctgcgtccgcgggaataaacagcccacagggctgtttgcctaacggctcagctcgtcagaggggggcttggcactattacctccctctgatgaggaaggttgtctcggcggagccgggacggagggagggaccccgccgcgaggcggtgaagacaccgcgtcggcggagccgactccatcactccttgacggcgcctgcggcgagtccggactgccagtacttctgcaggcacaggaacgcgatcaccagggggatgatcgtgatcagggagcccgtgatcaccaggttctggatcgcctggccgcccgcggtcgaggcctggtccttccactggttcaggccgatggtcagcgcgggtaccagtccgcgtccttgagcatgatcaacggcaggaagtagttgttccacgtcgccacgatcgtgaacaacgccgtcgtcacgatgttcccgatactggccaacaacacgctgggggcgagcacgtcgatgtccgtgcccaggaaatcgttcaacgaacccaccaggccgtacttcgcgccatacacgaaaccccagatcaacgtcgacaccaccgccggcaccgcgtagggcaggaacgtcgagatacggaagaacctcgtgccatgcagcttcatcgaatccaacgccagggccatcaaagccgacaggcacagcatgatcggcacctgcacgcacgtgaacagggccacacgaccaacactgctccagaactggccatcacccaacaggcgcgcgtagttctcgaagccgacgaacttggtgccgccgatcatctgcttcttgaagaacgaaatataaacggcgtacacgatcggcacgatgaacacgaacacgaacaccaccgcaaaaggccacatgaatttccatccacgccaatcggccttgtgcttattcacacgagccttgcccgaatgcacgggcgcagctgcgatatcggctgaagccattcccaacccctctccttcgaaggttgaccaaaatgtttgcgttatcatcataacaccatttgcaacattgtccaatcgtgttgagtaccgtgttgaattaagggtttctcagtcactctgctacaatggtcacgaagacaacgatgttatcgttaccgtaagcgtccctaagataagcgttgcaaacgaaacaccaacattaatgagtcaagcgagggtgaaatgtcgaggccaacacaggtgtccatgcaagacatagcgaaagccgccggcgtttcgccacagacagtgtcccgcgtggcgaatggcagcgatgcggtgaaacccgaaacacgccagcgtgtcgaagctgcaatgaaacgccttgggtatcgtccgaattatgcggcccgagccctaaagcacggccgcttccaggatatcggcgtggtgatgttcaacaccaccgcgttcggcaacgcccgcatccttgattctattgtggccaacgcggccgatgacgattattcagtcaccatccagaccatgcgccacggtgcggaacgcacgctttccgccgccatcgatcgcatgcagcgtcagccggtggatggtgtcatcgtagtgctggaggaacgcatctccgatttcgtcggatacaagcctccgcgagaacttccagtcgtgctcatctgcgaatccgccgccgaccactgccccaccgttgacgccgaccagtatggctgctcgaccgctatcgtcgattacctgatgagcaaggggcacaagaccgtctaccacattgccggaccgtccacctcgcgcgccgccgaaagccgcgcccgcggttggcgagaagcgctggaacaaatgggagcacgcgtaccgagcatgtacatcggcgattggtgcgcggattcaggctaccaggccggcgtggcgttggcccacgaccccgactgcacggccatctacgccgccaacgaccaaatggcatacggcgcaatgctcgggttgcagtcagcgggcaagcgcgtgcccgaggatgtcagcatcgtgggcgtcgatgattcgctggcagatatggttccgcgcttgaacctgacgaccatgaagctgcgctttgacgacattggcgccaccgccttctccatggtccgccgtcaatgcgaaggcgagaagataccggtcggcgtcaaaaccgtaatcccgccggaactgatcgaacgcggttccgtgcgcgacatcagctgacgagcggcatgtgctggcatccactggtacctgtcagtgattcacctgccagtgatccacctgccagtgatccataggcaattccgcaccgaccaatcgactcggttgtgcaatattctgcacatttccaactatgtgcagaatattgcacactttactatactgtgatatattttgcacatgattgtcatggatatcgccgaatacgcgcggcttatcaaggatgaaaggcaacgccagggcatcagtcagaccgacatggcccaacggctgggcgtgtcacgtcgctggctgatcgaatttgaacacgcccgagtccccaatcccggattctccaccattctcagcgctctgactgagcttggcttgtcgctggatgtccgcaaaaccccgcagcccgccgaactctatgaatggtgacaccatgagcgaaaacactctcaatgcatttctcggcgaaacacccatcggccagtttcgaagaacaaacgatggcagcattattttccaatatcacgattcctatcgttggtcgcaatcacccacaccaatatcgctttccatgcccattaccgcagccgaatattcaggcgacatcccgcgtaatttccttgaggccctggtcccggaatcccctcaggcccgagatgaagccatgcgattgcatcatgcccgatcgacaagcgcatttgatctgttgcaagccatcggattcgatgccaccggcgcattacggctgtccgccgacccgcacttgcccatagatgacgattcgcttattccaatcagcgattcgcagatcgcgaatcgactacgcgcagccgcccccacaggcatccagtccgcaagcgtagacgagcattggtcggtcgcgggacagcagggcaagatcgcactgaggaaccgcaatggatcatggttctccaccactggaatcgcgcggacgactcatatcatcaagcccggcataccgacccttccacaccaagcattcaacgaacacatcaccatgcgcattgtggaggcgatgggaatacccgtggcccacacctcttttcacatctttgatggggtcccagccatcatcagcgagcggtatgaccgtatagtgtccgccaatggtacggtgacggccctgcaccaagaagactttacccaagcgctgggcattccctcatcgctgaaatacgaggaacacaacggcccaacgtccaatgcatatgcggaaatgttgcgcaagcacggtctgcccggtcaggccgaaagcaatatccgagccttcaccgacggcatcctcgccagttatctcgtcggggcaacagacagccacgccaagaactactcgctattgctcgatagcgcgtccgtgcggcttgccccgctctatgaccttgcttcggtgttcccttatttggggcatggcaagcagatcataaatgccactttggcgatgaacatcggcggacgccgagatcttcttcaattacgccgcaaacatctggaacgattcgcacagcggatgggattagatgaggaatccgtgattttacgattccacaccttggtggataggctgccggaggcattcgacagcaccgtgcaacccgctcacgacgttatcgcgagcattggtgcgcaggaattcatcgatagctatcgcaagcgcatcatgatggtgtacgacgatgcaatgagctggatggccagtcgaaagggacagtgattcggacgggtggggattggtctcgccatcccccccctaagaaatcagatcctaagcggcacacgggaaacgaattcgcgcttctcgcctgttattggatcggtgaatcgtagcacacgcgccactaattgcagcggctggctgaaatcgtcgtaggggcgtgtctggatgcgcgggtagaagtcgtcgcccacgatgggcaggccgagcgaattcatgtggacgcgcaattggtgggttttgccggtgcgcgggtggagtgtgtagcggcagatggggtgatttcccggatggggaccaccctccggcgcttcgcgccacctcccgccagcgggagggaaacagaggtcgccgcgctcgatgagggtttcggcgttggccaaacccggttcctcgaatgcggccatcgtgccgtgttccttggtgatgtgcgatcggcgcagcaatgggaacgggcgtggcggttcgacctgcatgatcgtgccgaatcgcgggccgctgatcggccggcagggtgccaggcattcatagatcttgacggcctgccggttctggaacagcatctgatacgcgccgcggcaggccgaatcccgcacgaacaccaatacgccggcggtcatgcggtccaatcggtgcgctggcgtgatgtccggctcccccagccgctcacgcaatcggatcagcgcggtctgccgataccacatgccgcgtggcatggtggccagaaaatgcggcttgtccaccacgatgatccgctcgtcctcatacagcacgtccatctcaaacggaatatgaggctcgtcaatcacataccgatgtggcttactcaacggtcacggacttggcgaggttgcggggcttgtcgacgtcgtagcccttgagctttgccatgtccatggcgaacagctgcagcggcaccacgtcaaccagcgggctcatcagcgttgggcaggcggggcgccagaacaccacgtcagcgtaccgttccacatccgggtcgccctgctcggccacggcgatgatgtacgcgccacgagccttgacctcctcgataccagagatcaccttggcgtgcaacacattgcggccgcgctgcggcggcacgatgaacaccacgggctcaccctcgtccaccagcgcgatcggtccatgcttgagctcgccggccgcgaagccctcggtgaacgtgtaggcgatttccttgagcttcaacgcgccctcaagcgccaccgggtagcccacgtggcggccgaggaacaagaaggagttggcgttcaccatgcgctcggcggccgcctggatggtcttgggctgggtgtcgagcacccactgaatcttgcgcggcatgtctttcagggagtcgagcatctgatgaatctcatcgcggaacatcgcgcccttgacctgcgccagatacaggcccagcaggtaggcggcggtaatctgcgccacgaacgccttggtggatgccacggcaacttccgggccggcgtgtgtgtagagcacggcgtcggattcgcgcggaatggaggcaccctgcgtgttgcagatggccagcaccttggacccctgttcgcgcgcgtggcgcagggccatcagcgtatccatggtttcgccggactgagaaatggccaccacgagcgtacgcggggtcagaatcgggtcacggtaacggaattcgtgcgcgagttcgatttccacggggatacgcacccagtgttcgatggcgtatttggctacctggccggcgtagctggcggtgccacaggccacgacgatgattttgtcgatggccttgaagtcgtgttcgtcgatacgcacttcatcaagggtgatgtcgccattcgtgtcgaagcggccaagcagggtgcgctgcactgcggcagggtcttcgtgaatctccttgtccataaaggaatcccagccgcccttttcggcggccgaagcatcccaatccacggtgtaggtcttcgggttttcgaccacgttgccgttgaaatcggcgacgatgaccttgtcggcggacacgcatacggcctgatcctggtcgacttccatggcgcgcttggtgtaggccacgaatgcggcgacgtcggaaccgaggaagttctccccctcgccaaggcccacgaccagtggcgaatcatggcgggctccgaccacgatgtccggctggcggcagtcggtggccagaatggtgaacgcgccttcaagcatgcgggccatacggcgcacagccttgaacaagtctggcttgccttcgtccgcgataatcttgtccacgatcttgccgagcagcttagcggccacctcagtgtcggtggcggaggcgaatcggtagccttcggcttgcaggtcgaaacgcagctgagaggcgttttcgatgatgccgttatggatgatggccaccttgccgtccatactggtgtgcgggtgggcattcacgtcactcggctcgccattggtggcccagcgcgtgtggccgatgcccaccgtggcgagcggcatcggcttgcgctcgatgtcttcgaccaggttcttcaaacggccggccttcttgcgcacgaccaccttatccatgccgggcgcggtcagcgccacaccggccgagtcatagcctcggtattccagacgttccaggccttgcaggcagacctccaaaggcttgccgcatgccgtttcaatatttcccgcgtatccaacgattccacacatggctcaccagcctagcggacgattattgcgcaaagcgaatccaacccgccgcctttgcaggattggaacatgccccttcgtgaaaagcgtacgctgagttcatcagcgtacgcttttggagctgcaacaacgagccttcctacagcacgtgctgtaggcggagccgtaaagcggggagcccagtgggctccccgtaggcgacgccgaagcacgacagtgctgaggcaatataacagccttcctacagcacgtgctgtaggcggagccgtaaagcggggagcccagtgggctccccgtaggcgacgccgaagca

SEQ ID NO: 2501 - DNA, 12019 bp, Unknown
  R50_10m  MAG No. k141_22215
gtcgggaatgatgacgatcaggtccacccagttcgaggcgacggcctgttgcagcgtttcgctggtgtcgtcgaggtccaccagttcgctggaatcgcgcaggtaggcgcgcatcgacgtggcgatatcaccccggtcggagtcgcggtcgatgatggcgacgcgcgtcttggtcgattcgagcaccgcggacatggagccggatgcggaggtcagcatcgcccagctgatggacatcatcaggatgcctatgaatacgaggtagatcatcaggtagacccggtgcgcgaacagcacgcgcagcgtggctttacaggtgttcataacgttgcctcctcagcattgcgatgccggccaagaggaataccgcgctcatcgccagcagaatgatgcaggtggtgatgaacggccggtagctgtcgtagtacaggatgtcgtagaacaggttcgtcacctgctgtgcggggttgatggtgccgagtatgggcgcgttgcgggctatccagtcgctgatctgcatggcaaacccgccgtacagtccggtgaacagcgacagcgtgcaggagatgccggtcgacagcccgtatttcgtgttgtacgagagcttcggcaccgcaccgagcagggtgcctgctgagctggtcatgaacgaggcgatgatgaccgcgaggatcgccgccggttcgcgtccgccgagcgagacgttgcaggcgagccggatataggccaatgcgatggacagggcgaccgacgagcacagccagcaggagaggaagcccgcgacgagctgtttggcccggctcagcggcgctacggtccgccgtatgcccagcgcggacaggttcgcctgtgcggcggcgactgtgctgatggagtatcccatggccatcatgcaggacatggccagcagcgcgtaatagtatcgggcgatctcgtcaggctggaaatgcgtgagcgtcgtctcatgggtcatgtcgacgttctgcccgacgctgttccagaagttccggctgagcgcggcctgtggattgtcggcgatggtctgccgggtaacggcgtcggtgcggttgtacaggtcgatgacgctgcgcagggccgcgaggctaatgtccagtccgctgttttgcgtggagtccttggctgtgacggcggtttcccggctcacggtcatcgccaatcggccgttattgtcggcggtcagatagccgttggcagtgccgtcggcgagccgttgttcggcctccttcacggtgtcgactgtggtgatggtcagcagcttttggtcgatttcggcgtaggtcgtgtcgtctgaggccgattccgtttccccggccagcgcgtctacgaaggtgcgggcaccgtccgcctgctgccaacgggtgtcttcgatgacggccatcggcaccggcttgagttcgtatgcttcggccagcccgccgagcagtccgttgaacatggtcgccagcacaatcgggaacacggtcatccagaacaacgccgaccggttacgcaagttcgctttcaatgcgaccagaaatgtggtccacatgatgtctccttactcaggaactcccctcagtcacctttggtgacagctcccctcggagaggggagccaagttatttgcttgccgactgaggggagcatggtcagtccctcagtgctttgccggtgagttcgaggaacacgtcgttgagggtgggcgggcgactggtcaggtggccgatgttggcgccggagcgtttcaccgcgtcgagcacgtcggtcaggttgtgttcgccgcgacggcatcgcacgtcgagttccttgccgtcgtaggtggcttcgatcacgcacggcagcgcacggacctcggccatcgccgaatccgccagatcgagcgtttcgatggtgatgcgctcgcccgtgtcgatcatgttcttgagctcgtcggcggttccgagcgccaggtgccggccgtggtccatgatgaggatgcggtcgcagatctgttcgacctcctccatgtagtggctggtgtagatcaccgtggcgccggcctggttgagccgctggatgccttccagaatcgaattgcggctttgcgggtcgacggcgaccgtgggttcgtcgaagaagatcaggttaggcttgtgcgcgatgccgcaggcgatgttcaggcgtcgcagcagaccgccggacagtttgccgggccggaacttgcggaagtcctggagtccgacgaattcgatggactcctcgaccagcggcgcgcggtcggttttcttcggcacgtacagcgagcagaagtagtcgatgttttcggtgacggtcagttcgttgaacacggccacgttctgcggcacgatgccgatacgacgtttcagcgcgtaggaggtcggcgtcatcggctggccgaacacgcgaatcgtgcccgaatcgtaggtgagcagcgcgaggatgcagttgatcgcggtggttttgccggacccgttcggtccaagcagcccgaaaatctcgccctggttcacgtcaaggtcaaaatagtcgagcgccaccatgtcgccgtagcgtttgaccagttggctgacgtgcacggccagagccgggttggttgtcgagtcgtgttcggaagctctgttgtcggttgtcatagtcactcccttccttggcgattccatcatcccaagaaggggccggacgccgccacaggcaaacgtcacgacttggccgtacaggcgtgacatttgtcattacagtccttcggcgtcggtctgcatggccttgtacaccttatcgaccggcatcaggctgatctcgtccatcgaatagttggacgccctgtggctttgcgtaatcatcggtatcatccctttacggttgtgtcgacgacatccgacgcttgtgcctcatctattcgggaagtgtaagcccgttgtcttggaccgtcatgcgggtaattccgcacgcccgtcaagttcgtcgtgttccgcgcaccgctagactggtggtggaagagcgtcgagccggggaggtgccatgcgtgtgttggccgaaaaggtcttgctgctcgtgttgggcctggctttggcctggcttgtcggagtgcggctcgatggcgtgttcatcgccggcctgctgttggccgtttccgtcgccggattggtggaatggctgcgtcccgcgcaatggtcttgggtcttgtgtacggcgtatctcgtcatcgccgtggcagtgccttcatggtgcgcgttcatgccgctcatcgcctacgatactgcacagctgccggccctcgcctcggccggagcccgaactggggcacggactgcgacaagcggccgctcccccagtgtctcgcggaccgcggcctctcgccgttcccttgccgatgcaatacgttcggccccgtggctttcggtcgccgcgcgctggatatggctgttgccgccgatcgcgctctggttcgcccgtggcaccgaccgtctccagacgctggtgatgacgatggtcgccctgcttggattcgttctgggccgggcccgcgcctcctcggacgaggcgcggcgcgcgttgctgcacgcgcaggacagggcgcgcgaatcctcgcgggccactcgttcgcgcatcgccgacatcgatgaggaacgcgcccagtcgattcgcatggcgaccctcggcgagcgcacgcgtatcgcccgggagatccacgacaatgtgggccatctgctgacccgcgcgatcatgcaggcgcaggccggcaggacggtggccgaggcgacgaacgatacggtcgccgcgcaagggttcgccacgttgggtgcgacgttggatgatgcgatgacgatggtgcgccgttcggtgcatgatcttgaggatgacggcactgatttcgccgcgcagatcgatgatgccgtcacgtcgttcgacggcatctcccccggtttcgccgtgacgctggccaacgatatcgccaaggcgcctgcgccggtctcgcgctgtttcgcgaccgtgattcgagaggcattgtcgaacgtggtgcatcatagtgcggcgcacgaggcgagcgtgacgttgcgcgacttccccgcgttctggcagttggtcattcaggatccggggccggccgtgtccgagtccgatgggtcccggacggccgctgcccgcccgcgtgcgatgtgcgccacgcgcgtcggctcgcgactcgccgccgacggcgttgccgatatgcgtggttcggccgatgagctgatgcgcggcatgggtttggcggatatcgaatcgcgcgtgcgcgcccttggcggcaccgcggtctgcgggccgtatgaggacggctggcgtgtgttcgtatccgtgccgaagaagcgttggaccatggaatcgagggattgatgagaatcgcaatcgtggatgatgatccgatcgtctgccagtcgttggagacgattctgacggccaccggcacggccgaggtgctatggacggcaaatgacggcgacgccgccgtgcgccgttatttcgagacgccggcgagccgaccggacgtgctgctgatcgatattcagatgccctgcaccagcggtttggatgccgcgcgcgaggttctggccacggacccggccgcgcgcatactgttcctgaccacgtttgcggaccagtcgtatatcgcgcaggcgatggggcttggcgccaagggctatctcatcaaacaggatgtggcggcggtcgggcctgcgctgcaggcggtgatggccggtcaggtggtgctcggcgcggaagtgctcggcaagctcaccgaacggactccgaatcctgccgattccgacgattccagagataccgccgattccatcgagggcctgcttggcgagcgcgaacgtgagatcaccgcgctggtcgccgagggcctcgataaccgcgacatcgccgccagactgttcctgagcgaaggcacggtccgcaatcgcatcagcgcgatactggacaagctcggcctgaccaatcgcacccaactcgccatcctctggctcaacgcccatcggtgaggggcctttggtcaagtaggtctctccctccgccatcgcttcgcgatgccacctcgaacgcgattcaggacagcttgcagctgacctcttattcgctcgttgtcactcacccttgcctaaaaacacctccggcgttttcttcacggctcggctcatcagagggaggttatgaaaaaccaacctcagctgtttttcatgacgatactgtcgatggtgttggccacgcgctcgcagtcgtcggagcactgttcgaggtgacggtacacgtcatgccaggcgaacacctgcagcggatcggtgcaggtggtgtgcagcgtgcgcatcgactcgatgaacaggtggtcggcgtccgtttcgatcgtgttgatggcgaacaccagttcgcgcaacgtcttggaatgccggaatcgcggcagttcgttgaccagctcgcagatgctttccgtggcgcgcaccaccatatccgacatctggactgcatcgtcacgcatgtcggtcacattgtcgtagtacatgcggttgagtacgccttcgatgctgtcggtcacatcgtcgagcacgtggccaagctcgtcgatgtcctcacggtcgaacggcgtgatgaacgcggtcaccagttcgtccatcatgtcgtggcgcacctcgtccgccgacttctcaatcgcgtgcatgctgtccatgcgttcgcgcagctggcctggattgaagtcgtgcatgacctcggacagcagcttcgcggcctggcatgcgtagtccgcgctgcggaggaatccgtcgaagtagaacacgtctttttgtctcgccatgatgggtggaatcctttctagaacacgaccatgaacagtttggccattacgaagctgatgagaccgcaaccggggaaggtgaacacccaggtgagcatcatgtcgcgcaccacgccgaagttgatggcggagaggcggcgtaccgcgcccacgcccatgatggcgctggtcttggtgtgcgttgtggagacggggatgccgagcacggtcatgacgagcaggcacagcgcgcttgacagatcggccgagaagccttggtatttctcgagtttcaccatgtcctggcccacggatttgatgatgcgttcaccgccgacggacgtgcctacgcccatgatggtactgcacagaatcatgagccagaccggaatcatcacaccggtcacgctgggttggccgttgcagaacgccatgccgaggaacagcacgccgatgaacttctggccatcctgcgcgccatgcatgaagctcatggccgccgcgcccacgatctgcgcgtaggtgaagaacccgttggtgcggcggcggtccatgccagcgcaaatcagggtcacggccttgcataccaaccagccgacggcgaagccgaacaggaggcttgcgaccagaccgtagagcaccttgacccattcgcccatgttgatgccgccgatgccgccttggatggcgatggccgctccggacaggccggcgatcaggctgtggctttcggaggtgggtatgccgagcagcgaggcgcccacgctgtatacgacgatggagaacagcgccgcgcatagggcgatgagcgccgcgttcgtgtcgccgccgaaatcgaccatgttgctgatggtggaggccacggaagcgttgagctgcgtcatgatgaagacgccgaggaagttgaagatggccgccatgatgacggcggagcgtacgcgcatgcatcgcgtggtcacgcaggtggcgatggcgttgggtgcgtcggtccagccgttgacgaagatgactcccagcgtcagcaacgttgtgacggtcagagccgggttggaaagcacttgttggaggaaatgcgccagtgagacgtccaaagggaatcaacaccttcttcttcgggggcggaagccgtcacactgattgtaacggaagaatggctacgtagttcccatggcgcgcggattatatggtgttgttatgttgcgcgccgcgcatcctttcgtgaaaacagagcaggacagtcgtatgcttcgattcggcgcctgcatcgacaactctcgtcatctaccgaggattcggtcatgcgtgtgcgaaaatggacacggtgtcaatcaggaggtgcacagtggttgtaagcacggattcgagccgcacaatgcccgattgggtgaagtacggggtgttctggcacgtgtatccgctgggcttctgcggtgccgatatcaggcccgccggcccgcgccagttccatggccgcggccttgacgcgatgatcccttggctggagtacgtgcgcgatctaggcgcgtccggcctgctgctgggtccggtgttcgagtcggcgacgcatggatacgacacgctcgaccatatgcacatcgatgtgcgattgggcggggatgccgcgttcgaccagctgattgcggcctgccgggacatgggattgcaggtggtgctggatggcgtgttcaatcatgtgagccgcgatcatccggccgtccgggcggcgcttgacgagaccgccggacgcttgaatccggccgacaacccgtggcatggtctggtccgcgcgcatgtcggtgataatgacgaacccgctttggatgtgttcgaggggcacggggatctggtggcgctggaccattcggctgacgagaccgttgactatgtggcccatgtgatgagccattggctggatcgcggagccgccggctggcgcctcgacgccgcgtatgccgtgccgagcccgttctgggcgcgcgtgttgccgcaggtcaaagccgcacacccgtattcgtggattttcggtgaggcgatccatggcgattacccgcgcatcatcgaggaatccacgatggattcgatcacgcaatacgagctatggaagtcgatccagcatgcgctggagacggagaacttcttcgagctggattggaatctcaagcggcacaacgcgttcctgaattccttcgtgccgcagacgttcatcggcaaccatgacgtgacgcgtatcgcatcgcagattggcccggccaaggcggcgttggcattggcggtgctcatgacggtcggcggcgtgccaagcatctattacggcgacgagcagggctatgtgggcgtcaagcaggagcgtttcggcggcgatgacgacgtacgtccgaagttccccgactcccctgccgaactgtccacgctgggagagccgacataccggctgcatcaggcgctgatcgcgctgcgccgtcgcaacccatggctgatggatgcgcgtaccgagaccgtgaagctggaaaacaagcacttcgtctatcgttcgacgagcgccgacgcccagcattccctgaccgtggacctcaacatcgagcaatcccccactttcaccatccgcaacgccgacggcagtacagcgtatcaatactgagctacctcatcagagggagctcaccattcaccgccgaataccacgaatcagcaggtcgagcaggtaaccgtacgaccggtcgacccgttcgcggcctcgtgtgcggggttgggcggaacgcagttcgaattggatgaacccgtgtatggacacccagatggaggatgcaatcaggtgggggtcatcgtcacggaacacggtcgccgcctggccgtatcgaatgatctgcgtgatggcttccaggcaatgctgggccgagtccgacgcctgccccatccagaccagcgtgtaaataccgggggcgtccagcgcgtgttcgcggtagatcatgcccgccctgcgcaggcgcagcacaggatcggattcgtcaatggcgatgagctgttcgcgcagatcggtgaagtatgcgtcgatgagcgcatcggacaccgcctgcttgccgccgatgtgctggtagatgctggtgggcgacacgtcggcctgcgcggacagcgtacggatggtcagaccgtccacgccgtcctgttccacgatccgcctcgccgcgtcaagaattcttccgcggatttcaagggttggcgtgcgtctggatcggggctgcgattgcgtcatatccgttattctagggtgcgtacaggccattaccgccgttttggcatggccacgatcgcaacgaccgcggcgataagtgcaatcgtcatggccgccaggcagacgctgtgcagcccgcccatgaacgcggatgcgaccgagtcatccagcaatctgcgcagggtgcccggcagggagccggaaatggattcggcagccatcacggattccttggatgcgccaaggatgtcctggggcaggtgagatcctcgcagcgcgtccgtcaggccggtggtgtacgcaccggcctgcagcgaccccatgatgccgacgccgagcgttccaccgagttcgcggatcgtgtcgttgacggcactgcccataccctcctcgccgaccggcacggccgtcatcagtgtgtcggtggcgggaccctggacgagggcgatgcctgcggccatcactgccatgacgaccgcgaacggcagtgtggcaatcgccgtctcgagcgccgaatacccacgcagcgcctggaaccattgggttgtgaggaagatgaaaccgaacaggcacaggaaggcggcgcaaatggccaacatgccgatgacggcgcacacccagaacacgctatcccatgcgaaccgttgcagcaggatgccgccgatgaccgggccgagcgctatgcccaccccggatgtgccgacccgcagtccgacggccagcccacgcataggcgatccgtcgaacagcccgatgatggatgacagctcgactcccatcaagttgtatatcaatatatcatacttatggaacattgatacacatcatgtcgggaacaggcatccgcatcgaaaacaccgacctacaacacaatcaggcccgacgaccatcaaaggtcgtcgggcctgattcatacgcgctgtcggactaacggcgtccggacttcatacggaatggcgcattattgcgattcttcttggaatggcggcggttcgggccttccgtgttgccgtatttggcgatcatgcggcgttcgtgacgcttggcaccttctgaacgctcgtcgcgtacgatgcggttctcgttcttgtgatggatgcgcttgtcgaattttccgcccttgccgtaccgatcattgcgacggttcttgccgtactcgttgcggccatcgtcctggcgctcgtcgtaacggtttttgccgtatccgccgcgacggccgcccttacggcggtcatcgccatgctcgaacagatagtcgcggcgctcggcctcggggttgctcatgccggcgcggcgttccgcacggttgcggttcttcttcacggccttcttgctggccttgtcgccgtgcttgcgctgcggctcgccttcggcaacaaactcgccgcctgcgttctcgtgctggaatccggtctcggcaacgttctgctcggcgcggtcgcgattgcgattgtgcttgcgcctgccgctgcggccggactcatcgcccgccgcgttcttggcgcccctgttcttgcccttgcgcgggttgcccacgggctgcgacttgtcgaggctccaaccatccacgcgctcggcgcggtcgcccacaagctcaagcacttcgggcgaatcgtgggtcacttcgatcatcttggttttgatgccggcctggttcagtaagcggcgcgtctcgcggcgctgctcgggcagcacgagggtgaccacgtcgcccgccttgccggcgcgggcggtacgaccggagcggtgtacaaaggacttcgggtcagccggcggctcgacctgcaccacaagctccacgccgccgacgtctatgccacgggcggccacgtcagtggccaccatgacgcgcacgtcgccggaatcgaatgcggcgaggttgcgatcacgctggttctggttcaggttgccgtgcagctcggcggccggaatgccgttctgcgtcaggttcttggcgagcttcttggcctggaacttggtgcgggtgaacaggatgcgacggccttcgcccgaggcgagcacgcgcacgagttcgtgcttgtcgccgcgcgtggtctcgaacacgtggtgggtcatcaggtcaggttcggtggtggccgaatcgacctcgtgcaccttgggatcatgcaggaaggtgttcaccacttcatccacgccgtgatcgagcgtggcggagaacagcatgtgctgggcgtcgggcgaaatctgctcaagcagtcgcttgaccggcggcaggaagcccatatcggccatttcatcggcctcatcgatgaccacgacttcgacggacgagagcgtgagcgcctgctggcgcagcaggtcctcaaggcggcccgggcaggcgaccacgatatcggcgccggccttcagatcgcggatctggtggatgtacttgacgccgccgtacaccgtggtggtgttcatgccgaacgtgtgggccagcggcatcagcacgtcgttgatctggttcgcgagctcgcgggtgggggccagcaccaggccgcgcgggtgcggcaggaaatcgtcagcgcggcgctcttccaagctggccttcttgcggcgcttgatttccttgcggaactcctccatcgcgatttcgccaagcgaatcataggagccaagccgggtgaccagcggaatggagaaggcgagggttttgccggagccggtgcgccctcggccgagaatgtcgcggccggccagtgaatcgggcagggtgtcggcctgaatggggaatgcggtcttcttgtcatctgccgcaagtacgcgcaccagcggtccgggtacgccaagttcgccaaaggtaagggggcgggattccgcgctgtcgttcatctggaaatcagcggaatcgtcacgatcatcgaaattattacggggcacagtggcctttcatgtcaaaggttacgcaaattacgcaagctttccgagcttagcgtaagccccctactttgcttgatgctcgccacgctgtcattcca

SEQ ID NO: 2502 - DNA, 2994 bp, Unknown
  R50_10m  MAG No. k141_22394
cagaatctccgggggaaggaagtcaccaaccgagggcagatgagcgcctgcctcgtcagccaacagcaatcctgcgccgagcgaaccgaccatatcacgcctcctgcttcttcaatatcaggtgtcagtttaaacccaccgggcaggcaaatgtgacgtgctcgttactttcgtctttttttgtctcctcggtgtggagtctgccgggcatggacacggagtctgcgctgggcattcggctccgaatgactgaagagtgattatttgcctgcgtctagacaatgtcaatactacaccggcgcgtcttctggaatcggcggcggcgcaaggtttttcggatgttgcgcaagcgttgtgcgctattagtcataatacgaggatgtgcggcatttgcgctaccctctgatcactccgtatccgtcgtgggcgaacggcttgaaatcatcctggcgcggcccgcccggctcatgccgaatcgaacgatcagtaccgagcttcttctcagccctgagctgcggcacctcggtcaggtcgtacggcgtggtctggtacacccagttgagccagttgcgccacagcagattggcgtgggcacgccagacgaacaacggttccagcttcggatcgtcatgcgggaagtagttcttcgggaagggcacgttggtcatgcccttggccatatcgcgctcgtattcctcggcgagcgtgtacttgccgtactcccaatggccgagcgcgaacacttcggagaagtcacgtgtggcgattaggcccgggccggactgcggcccccaagtcaagatctgaaggtcatggttggcacgtacctcgttttcgttcacgccggcgaggcgggagtgcggctgcagatcaatctcgtcgaagccattggtcaggaagcagtattcgtcctgcaggtactgcgggaatacgccgaaaatcttctcggggtaatccaccttgtggatgccgtagcggtagtacagtgcgcccatcgcaccccagcacaggtacatggtggagaacacatgggtggaggcccagtcgagaatcgtcttgaactcgtcccagtagtccacatcttcgaacggcatatgttctacaggcgcgccggtgaccacaaaaccgtcgtaatagttgtctttgaacgcatcgaggttttcgtagaacttgacgagatgatcggcggaaacgtgcgtggcctcatgcgtggaggtcttcatgaagtcgatttcgacctgcagcggcgacttggaaatcagacgcagcagctgcgtttcagtctcgattttcttaggcatcaagttcaggaccaccagtttgagcgggcggacgcgctgacgctccgcctcgggcttctccagagcgaagatgcgctccgaatcgaggatatctctggccggcaggccactggggatcttgataggcatgttcctattatgtcaatattcgggataacggttcagggcattcctataacggccatttatggcgcgttatcaccccgactccggctccgccccaaacccctcgctgcgtgagccgattcacgttttaaaaccgtgggaaaatgacacgacacgccgatgttgactttctggaatctgcacctattgtagatagagctgtctgagagacaagccgacgcggggtggagcagctcggtagctcgctgggctcataacccagaggtccatggttcaaatccatgccccgctactgcgggcgaggccgtcacgattattcgtgacggcttttcgtttatccgccgtcgtgccctacggggccgcatatccgatcggggcgatgatgtcctgtgaaaaaacaacatccaagcccgctctgggcagaatcaatcaatctatggctcgactccctcaaggcggcgggctactcccccaacacgatcggcacgcgccgatgccagatgtccgcattgtcgagggcgcttaagggcgatctagggacgtggagggcgacgacctcgccctgctgatccgatccgccaacggctatctgttccccggccggcggagcggccacgcctcggtcgagaccacgcaacggtacatcgccatgcccgacgaccagctgcgcgccgccgtggaagccacgcgcctcgccgcctaggaggatcacgatgttccgtttccccgacttgattgtggtactaaattgattgtggtactaaattatggtaccataataagcatgatcgaatgcgagccgtcagccttcaagcactggttcacacagccacagatcgactacatattccggcatccggtggccgtgttcgaggtgcagtcgagacacgccggcgacagggtcatggcgatcctcggacacccggacgagttcagggaacgccccgtggagctgctggtatcccagcgcacccgcaaggtgttccacgcgatggactgccgccgcgaatggctctacaagttcgacgactaaaaaacaccaaggaggacatcatgagcaacgaaacagactgggacgagctctcggacgaatacaccgagcacacccccgccatcatcggcgagaccatccgcccgcaaagggcgatcacgatggatgacatcgacgacatcttcgccggccgccccctcgccgaccagccccgccggaaggccgacgtgctctacaaggcatacctcacgcccgacatggacgcacaggtgcgggcacaggccgaacgagagcacatcggcaagagcgctctgatccgcaaggcactggccgcatacctgaccgccaatcaggcacagcccgcgatggcctgacccatatacggcgaaaagcccccgaacctgccgcgtgatacggttcaggttcgggggcttcttgttattcggccttggatgccttggccttgagggcgctggcgccgatgacgacgccgatggtcagggcgacggcgctgatggtcgtcgcggccggatcggcccacgtccagccccatacggggccgagggtctgcacgga

SEQ ID NO: 2503 - DNA, 27335 bp, Unknown
  R50_10m  MAG No. k141_22429
aggttcagcccgcgcacatgcggggcccgggcggcgacgctcagtcgtgtgccgccgcagtcggtgcatgggccttccttgaggaaccgggccacgcgcttcaggcctttctcgtccttggctttggcgagcgcgttctccaccgtgtatacggcgttgaagtaggtgaagtcgagttcggcgaaatcgtcgcctttcttcggcttgtaaagaatatgctttttgacggccggcccgttgaatacgatgtcacgctcttcgggcgtgagctcgctgaacggcacattggtgcgcacgcccatcgcgccgcacacctgcttcatgaggtcccacatgagcgaaccccatggcagcaccgcaccgtcgtcgatacttttcgactcatccggcaccagggccgcacggttcacttcgcgcacaatgccggttccggagcaggtcgggcaggcgccggccgagttgaaggcgagcgattcggcgccgggcgcgtggaattccttgccacagctgacgcaagtaatgggcagtccggccgccacgttcagcgtcggttcgttgcgcgccccgcaatgcgggcacacgtgcgaggcgacgcgggagaacaggagccgcagactgttgagcagttcggtcatcgtgccgaacgtcgagcggatgccaggcacggtgggccgctggtgcagggccagcgcggccggcacatgcagcacttcgtccacttgggcgcggctggcctgggtcaggcgacggcgcgtgtacgtggacagcgcttccaggtaacgccgcgaaccttccgcatacagcacgccaagcgccagcgagctctttcccgaaccggagacgccggccacgcccaccagttcgcccagcggaatgtcgatgtcgatgttcttcaggttatgcacgcgcgccccgcgcacctcaatcgcctgcggccgttgattgttggtcatgctcggcactgctccgccgccgcgctatctgacctctgttcgagtgtcacgccgtcacctctttctcgacttcgcccttggctgccgccgcctgagcttcatggtctccagtatcatcacggccaacgacggcggccgaacgccggacgagaatctttcgtcttgggcaccgtccgccacctgcaattcgaactagctgaaccagcgtgacgatattgtcggctatcgatctgccgtgatcgtaatggacatcgtcgtccggaagcacgtcaccggttccgagaggagtcggcggcgcgctttcataagggcacacaatcccaagatcacacccacagatcaataccgatcaatactcgtacgtgatcgcggggtcgccgatggtcggcgtctgatccagtttgaggttggccgagccggccgcggtggtcacatcgtattcgatggtcaccgtgtcctgaggcgccagggagatgtcgtccatgtaggtcatatggtccttggcctgcacctgtgcgaaggaactgccgttcgacgccgacacgttgctgacctcgcctccggccggcgtgtagatgaccacgcggttcaccgccacgcctcccttggcgttcgccgtgatgtattccggcagggatccggcctcgcccggctgcagggtgttggtgaacgaatacgtaacgtggtaggtgttgtcgccggtcctcttcaccgtcgacttgcgctggatgtaccagtccatcttcgaggcctgcatctcgttgaagtagacgccggtcaccgggttcttcgcgtcgttggtgatctcgccggtgacgccggcgctgcgcagcaccgcctgatcctcctcgtggaacgaccagaagtacaggtgccgctgctcggccatccggagcatcgtcttggcgacggtcatgagcttctgcgtgttcatgtcgctgaacaggtgggcgaccgcctgggcggcggtctcgctgaagtactggtcctgagcggagggcgtcagttccttgtaggcgccgttgagcaggaattcggcggtgttcgacccgttgagcacgcgtccgtcagacagggtcacgtcgccggtggcgccgatcatcgcctgcagcgcgacggggtcgagcgacatcacgccgtcggacgatccgccaaacggagccgcctgccagaacttctgggccatggacgcgacgcgcgggaagtccggcgtggacgaaagattatggatgacttgaccgaagtacagtccgctgtacagcgtgccgtcaccgtcctggttgacgtcatccaacgcggcgttggaggggaactcggcatccgcgtggaactcccccaccgcgatcttgccgttgtccgcgctgaaggaaccggccgaaccgatcaggccgccggttccgcggatctcggaattcgtctgggccagcagcacgtagttgcgggcgccgttcgcaccgaggaagttcggcagcatgttgagcatgccgctcaggttttcggtcacctgcgccagggcggccatctgcgtcttgccgttctgcagcgcgttgttcaccacgccgagtttggcgtcgggaagatcctggatcgtcctggcctgcgattgcacggactggtcgaccgtggcaagctgctgcgccgcggcgatgatcggctccatgttgagctgcccatcgccactggagaggctggcaccggtcagtgtggtgacgaccttgcccagctggggcagcgtggtctgcgcgaagtcatcgatggtaccgatggcggtgcgcgccgtcttcacgtcaccgccgaccacgggcatcttctccgccagcgtccacagaccgccgctgacatcctgcttggcggcggccgcctccttctggatgtagctcacgtcggacagcgccttgaccatgtcgtcggtggaaccgtccttgatgaccttggccgcgttgacgacattgttgaggtgcgctttggcgctcatcgccgacttgtacagtttgaatccgctgaagccggccgccgcggcgcacatgaccagcaacagcagcacgacgagcagcgcgttgcgaacgcgatgggttgtcctggggaccgtgcgtgcgtgtgatggcatgggctacttccttgcgttatgacatgtatcgatactggctggctgcccggttacgctttcgctggacgggtagcccggcggacggcacgtagcagtgcacgacgtgcacatcgcgtatgacgccgggggtcgtcagcgcggctgactggggtggccgcggaccggtacctggacttgcagctgccctccggcgatgcgtgtcacctgcagcggggaacgtccgctgcagttacggctattaccggccagccgacagcaatcgctggtttagttgttggtcttttccggctggtcacccgttcccatgagctggcatgcacctttcagcgagtatctctcctaccgcatgccagtctacccatgcctgcgggataacccaaaaagccttgcaagaataccgaatttctttacctttggccctgatcgttcgacggctcgcaagacggcgtaacctcatccaaccggccgatccccggaggtggaaccagcggaatcctcgtgaccgggaatgcgatcgttcccgcttgcgcgatggcggatgcgcgcaacgccaacgacgcatcgacaagccactgtatggcactctcaaaatccttgccacgtccaccagctcgcaccacgccgtatacgaacttcttgttctctttcgccaactgggaaggaattgaatcccatacctgattgagacgaagcgtggtgacggcgggactatcacgcatatcaacatgtttggagaaatcgtcacgataatcggagaccagactattctgcaatttacgaaccgccgtgaagtcaggattcggcagagtactggcgaacgcttcaacgatctccggcatgcctcctgtatacatgaaataccgcagccaagtcatgaccctgtcatgcattacgttaattagcggaaaatccttgggctcaagcatttcggccaaggcatactgtttgcacgcatacaggaattcaacaaaagacataggatacagcttgagtctactgaccttgccaaccgggaatgaaaacccaggatgcatggcgatgcccagcgccgatccagtggccaagacgtcatactccggggcgacttcattgaacatcttcagcgaagtcatcgccctcggcacctcctgtacctcatcgaaaatgacgagcgtatcctcgggagtgatcctagttccggactcgatcgacagtgcgggaatcagccgttccacattcagatccgcatcaaacaacatacgcatgttggcattgtcgaaaaatgtgacacagcagcaatacgtaaggtacttgacaatctttgatggagtcgtatactcatatctgtcaggtacttgacataattactgaagaggatgaaaaagacacacgaccagcgacgcttcgctcgcttccttattaaaggagactggcatgaacatcacacatgacatgagcaacgacctcaccgaatacgacccggaatcccgtcaagtagacggaccgaaccccatcgaaaaccgcatcagctcctccgcggcccgtgttcccgacatcatcagctgcacttccggcatcaccgtccagggccgccaactccactcgttcgcgttcaccacggacgcggccatcatccgcaacaccaatgccgacgccattctcgccgtatatccgttcaccggcgaaccagtcatcacccaggccctactcaccgtggcccaggccccgctgttcgtcggcgtgggcggtggcaccaccaccggcccgcgcgtcatccaactcgccatgatggccgagatgcagggtgcggcgggcgtggtgctcaacgcgccggcgccgccctccacggtgtacgacgtggcgcgcatcacgaacaccccggtcatcgccacggtcctgacctgcgatgacgaattggacgagaaaatcgaggccggcgcctccatcatcaacgtggcggccggccgcaggacgcctgacgtggtccagcagatcaggcagcgtcacccctccatcccgctgctcgccagcggcggttcgaccgacgagtccatggccgaaaccatcgtggccggcgcgaacgcgctgacctggaccccgccgaacgcgcaggagatgcagcgctcgatgatgatgcgctatcgcggcgaatccaccgacgacaacatgcagcactgacgtaaggattccgaacatgagcagtaccagcaacaacgccgccgtaaccggaaacgacgcggtcgacaacgtaatggccacgagtcaatcggcggagaacggcacaagccacaacaccgccgacggcgatatcaagaacgatgttctcagcagtttcatcagcattggccgcatcatggcgtatcgcgcgatacacagacggctcgtctcccccggcgccaaatcgccgcgcggcgaacatgctttcgacccgcgccgcggccaaggccgcgtcttggccacgctcagggaatccgaccagaccagccagaaggacttggccgcgatgttcggcatgagccgccaggccatggccgaactgttgaagaaactggaggccagcggtcacatcagccgccgtccatccaggcgggacagccgcgtcatgatggtcagcctcaccaaccagggccgcaaggccgccgatctgctgggcaaagcgcccgaccagacctcctccatgctggactgtctcaatgaaaccgagctacaaaccctacacggctacctgcagcgcatcatcgacacctcctccgacgacctaccggcctcgaccgccgaggatgtcaaaaagtgtgagctgcttatcgaacacctcaagcgcaggcgaatgccggccgaccgcgcatagtttgcgaacagcccgcacgacttgtggccgcataagcatgcggccgcacaacagtccagccgcacagtcatccagccgcccctacaaacacgcccgattcaccatttgcacgacatcttgcaccaaaccctactttgaaatgcggtattttgcgccaaaaccccattttgaaatgcggcattctgcacatacaaggcagaaaatgctactcccataagggattcggaaaggaactgccatgcttgagcgcaagatctcggacgatctgttggaatggaagctgatcggcaccggcaaagcactgctgctgaccggtgcccgccaaatcggcaagagctacgcggtacgcgagttcgccaaacacgaatacgctcattaccttgaaatcaacctgtacgagaacaagcaggaggcccgcgcgctcgcatcggcgaatgacgcgcaggagttcatcagccgacttaccttgttctcaccttcaacgctcactcccggcggtacattgattttcatcgacgaggtgcaagaggcaccggatgtaatgaccacgtcaagtttgatgtaccggcgtcgcaattcggcgatttgacgtttcaccacatgtcgctgattgcgaaaaacagcaagtcgtgattcgagcgtggcatcaccttgcttagtcatatcaacaaaatccttgatctctgcgagactcatgcccgtggatttcagacattcaatgagatcaagcaattcaagatcgccgtcatcgaagcatctccgtccgaaaccagttcaagcgataccgggcaaaagaccttggccgtcatagtagcgcaatgtatgttcggacagcccagtctttcgcgacacctgaccgatggaatatcccatgccaactcctttccctgcagtcgagccagtgtgagtccagccatattcacggatgtcctatgcggaacggacactcttcgactgcctgaaccttgcagcccaaacatgcatcaatcagcacaaatcacagacagtgggccatatacaacggcagcttgatgcgttctccatccacttcgagttggcggggatgcagaacgtattccttgcccaatcgtcgggcataccttttgcggaatttgtcgagcgaagacacaccgtatcgtttcgtggatttcacttcgatcgggctgatgcgaggcttcatcgcggcattatcgtattcccgaacgatgaggaagtctatttccatggttttcgtggcatccgccctatccgagcgcgagaagaaatacagtttgcgcccattcgcccggaattgctgagccaccgcattctccaccagcatcccttcgttgagcgagagtttatcgaacagaatatcccggtacacatcatccggcgttgtctctcgatcggcaaacgcctgcgacaccagcaaaccggtatccgccatatagcatttgaatgaatcgttatcttcgtacaatcccagccccaccaaagggtcagtcgaattacggcacaggttcaccaagcgggcgtcttccaaccagaagaacgccgaatcgtattcacgagatcgagcccccttatcgaccgatgccagagtgaatcgtttctcatgcttggacagctgccctggaatctgagcgaaaatgccccgcacgcggccggcatcgccattggcgaacttgccgatatcatcactgtacagctgcaggatgccacgcttgatcgaatccacctcgccaaaatcgcgctgctcgacataatcggcaaccgcctgcggcataccgcccaccagcagatattcgcgccacagcctcatcgctcgtttgtgcagcgcatcgggcaacgggaccagacgctcgaacgatttgcgaatcgtttcagcaagcagctcctcccccatggcccagcagaactcctcaaaatcgagcggccccatgtccattttccgttcctcggaggggatgacgatattcgccacattcctcttgatggagatcagcgaaccagtttccacatagtcataccggccatccgcaaccagatatttgatgagctccctcgccgccggataccgctgcacctcgtcgaaaataatcaacgattcacgctcgtacagtcgcttgcggtaatacgcagacaacagcatgaaaaatgtgtcaaagtcatcacgctggttttcgaagatgtcgcgaacgtcgcgcggcaaacgcgcgaaatcgatgagaatatatgacttgtactgaatgcggccgaagtcctcgacaatggtgcttttgcccacacggcgagcgccttcgatgagaagagcctcacgcccacccgctttttgtttccatgcgatcagcttatccagcatcttgcgcttcaacatgagcaatcacctcattacacgaaaacaacagtatgggcatatgctattctacacgaaaacagaggtatagaggtagccgattctacacgaaaacaacggtataaggacgcaagccgaaccggctcacccccccaatctctcccccatcacaccggcggcctgttcgattgtgcggttttgtgcgaatggctcacacggttcttagtgagaaccgttctctgcgcacctgaccctagaaccggatcagcgccttgatgaccttgcgctggtccatcgcctcgtaggcgtcctggatatggtcgaggtcgtactcggcggtgaacacgcgaccggggttgatttcgcccttgagcaccgcatccagcagaccgtcatcgaggtcatagtggcgcacgggagccgggccgcccttgatgccgatgttgccgtagaacgtgccttcggcgctgatctccacgtcgtgcggcaggcccacacgaccaatcacgccaccgcggcgaatcaggccaatcgccgtgtcgaaggactgtttggagcccacgcattcgagaactgcgtccgcaccatagccaccggtcatctccagcaccttgtcaatagcctcttggccacgctcgggcacgatatcagtcgcaccgaattcgcgggcgagcgccgcgcgatcctcgtgacggctcatggcaataacgcgcgtggcaccgcgcatcttggcggcaatcacaccgcacaggccaactgcgccatcgcccatgaccacggcggtgtcaccgggcttgacctcggcagaaaccgccgcgtgataaccggtggacatcacatcggaaacggtcagcaacgaagcgagcgtcgcgtcatcgtagtcttccggtgaaccgggcaccttgaccacggtgccgtccgcctcgggcacacgcaggtattcggcctgacaagcggagaagtagccgccgtgcgggcacacggattcgaagccggccttgcataccgggcacttgccgcagctgtacgggaatggcacgaccacgaaatcacctggcttaacggattcgaccgccgcgccaacctcttcgaccacaccgatggactcgtgacccacctggctgtgcgcggcctgtccgctcagcccacggaagaaccacaaatcagagccgcacacgcacgtgcgcaccacgcggatcacgatgtcatcatcctgttcaagcatcgccttcggcacttcttccacggccatcttgccaggctccacgaaaatcgcagctttcatggtttcagacatacgttcataactccttgttttccggcatcgagcgcttaaggcccgttatcctcgtgttctattaaacaataatcgccttgcattaaccaatagccataaaccatgtttcgccatacccatgaggtatggcaacaaccgagcaattcactgcgataggccaatatccgagatacgctcactgttcgattcgtcgccatgagtaatctggagaaccggcgatgggacccgcctgaacttgtttcgaaccgcacactgctgatagttcctacacacgatttgacattgcatggaatcgttgtgtcttcagcaggattcagcggtttcaggaaaggctattatgggctcgcaatccccatccgcagatgcccggccgggcacgcgcacggccactcctccggcgcacaaactccccgatatccatcttgatattgtgttggtcgtcttctgcggcggtgccatcggcaccgcgattcgctatgcgttcgcgcagattcccgcagccggcagcttccataccggcacgtttgtggccaacatgctggcctgcttctgctatgcgggtctgaccgcctatttggccggctcttcccggttcgacacgcgtgccaaggagctcaccagccgtgggctcggcatgggcgtatgcggcggtttgtctacgatgtcgacgttggcattggaaggcttcaccgcgattcgcgacggtcaggtggcggccggcattgcctatctactggtgacgttcgcgctgggtctggtttgtgcgtctgccggcgtgtgggcaggaacgcatctggccggctcctcgaacgcatccgccgaagcgtccgctgatacgaatgccgctacgaccagcaagggaggtaaggcgtgatgaccgtattcctaccaatcttggtctgcctgtgcggcggcgtaggcgcctcctgccgctatctgcttgacgcgaccatcaaaacgtattggcaacgcgcattcccgctgtccacattcaccatcaatctcatcgccggattcctgaccggtctggttgcggcgctggcactgggcgggacacttgatgaaccgtggcggctggtgctggccaccggtttcctcggcggattctccacgttctcgaccgcgatcaacgaaatggtgacgctcttccacaaacgccgctaccccacggcaacggcctatctggtgctgtcgctgggtgtgccggtcgttgctgcggcctgcggttttctcgtctgaccgccacgacgattcccgacgcggtcagcggtatcatcgcgaggtcgaacgtcacaggtacatccgggaggtatatgggcatggcgaacaatggagcggatgtgaagcacaatcagggcgcggacgtcacgaatgcctcggccacgacgaacactgcggaaaataccgtgggcacggcaaccccgaagcaaaatggactcgccgtgttgggcaagtatatgggtgtttccgccacgcagaccattgtggagtatgcgacgttcgccatcctgcacttgatcggcgtgccctcgcagatctccaacggtatcgccgtggtgtgttcggcgacctacaacttcgtgatgaaccgcaacgtgacgttcaaatcgtcaagcaacttcacccgttccgtgatgcttttcgtgctgctgtggatctggaacttcacgttcagcacactgctgatcggctggatgccgggcgcgacggacctgagcccgtatgtggtgaagttcattgcgatggcctgccagttcggctggggttatccgttgtgcaagtacgtgatttttaggtgacgcattccaattgctcactgtcgttcgccttcgcctatttgtatttggagcgcttatcagaagaacagcatcgcaacacctgcggcgaagcacatgagcagaatcgatgtcaggaagctggcgagcatcggcttcttgcccttggaagcgatggccttgaagttcacgttgatgccgagcgcggccatggccatgccgagcacgatgtacgcaaagtccacgagctgcggggtgatggaggcgatgagcggcacgaaggtgccgatgatcgaagcgccgatgaagccgagcatgaaccacgggaaggccacagtcttcttgccggtgttctccacctcggagtgcttcttctcccaccagatagcgatgatgatggccgcgaacacgagcatgagcacgcgggaaagcttcatgatggtggcgatgtccaccgcgccgaaagcgtcgccggcggcgaccgcgtgggcgatttcgtgcagggaagcaccggcggtgatgcccagctggtccttggtcatgccggccagcgggccgagcgcgatctccagcaacgcgaacacagtacccataatggctacgatggccacggccatggtcacgtcgttgtccttctcgtcctgcttgtcctcaggcaccttgatggaaccggccagacccatgacggcggccgcaccgcagatgccggtgccaccggcggtcaggatggcgagcatcgggtcgacaccgagcttgcgggcgatggcatagcacacgatgatggtcagcgtgacgaccacagctgcgatcggcagacacttgatgccctgcgtgaacagcacggcgaggttgagcttgaaaccgagcaggatgatgccgaggcgcagcagcttgttggaaatcaggccagcggcgtccttgacgcctgccttgcggccatcattggaaccgacgtaggcactgcggatcgggaactggatgatcataccgatgagcagcgcgatgataagcgcgccgaacaggctgaatccggggaactgcttgagccaggaggcgaacagcgaggccagcagagtcagaacgccaatgaacaacatgtcaacggtggtaatgcgcttccaccattttgtacagaactctctcacggtgtctattgaagctcaagcatttacatcggtcaaatcattgcaaccaatacatatcatcgattttgtcgatacctaattgatctccctctgatgagggaggtggccgccgcaggcggacggagggagagaaacaacgttcgcgaccttccctcagtcgactatctgactacccgcgcagcgcagcaataatcatctccgccaactcccgctgatcgtgcgtcagaccggatctcggcaccagcgcatagaaccgccgcacaaactcatcgccaagctcccgctgcaccggcacgcccgccggcacggcggcttccgaaatcaacgactgcccgaacccggcggacagcgccgccacaatcgccgcattactggacacttccatcgtgcgtgcaggcacaacctgagcggtcttgaaatacaaatccgtgtaataccgcacgccggaaccgtgctcgcgcaccatccacacgccgtcgggctcccccgccaacaccagccggtcctcgcacagggtgacgcggtccaccgaatcgttcacgatcggcttttccaccacgccgagctgcacggccttcatgctgacccgttcgagaatcgcatccgagttcatcacgtgtacggcgaagtcgaaactgtccatgttccgagccatcaccggcaacgccttcggcagcagaatcgccgcggtcgtgtgcgagaacgaaacggccagcggctcacgcgcctcctgcacgcgggcgatctgctcacgcgtatcccgccataatccgtcgatgccgatggcggtctggtacagcatccgcccggcctgtgtgggcgtcacgtcgcttttcgcattgcgcacgaacagcggcgcgccgaccatctgctccaattgggcgatacgcgacgacaccgtcgactgcgacaccttcagttcgtcggcagccagcgtgaactggcccacctcgtatacggcgaccagggtttcgagcagagggaacatggtttaactgtacgctgtatgatgcacgaatatttcaattagcttgggcgtagccctaggccacggacctggaccaccctcagtctcgctttgcgagccagctcccgccagcgggaccccaatggttttcatatcactatgcttcgcgcagttttgcgagctgtgttttggccttgtggagcttggcatagatttcattgcgctgaacaggattcttgacgcgctgatggtcgcgggtgagcttgtccacttcggattcgagccgagcaatttcagtatggcgaatgatgcgcgcatccagattctcgacctccggcgtacccaaaatggtctgtgagcacagcgatgcccacagctcatcaatagtagagccggccagctccagctgggcctcccccgccggctgccaatcgccggcatatacccgatagatcggcgtgtggccggcacgccccggtatcgcccgacgcacggcgaacgcacattcctcacgtgtgctgccctcgaacggcacgtcgcgtacgcacacgaacacgatgcccgatttacgctgcccggcaatcaaatcgatgacctcgttcggtatgccagtggctttggccgtaagcttcagtccgatgaccagcacttccggaaccagtttgccgtccgcaagcccagtgttaatcgaccggaccaacgccagcatggtaatggattcgatttcgttcaccaatcgctgcttgagtttgcctgaaatcggtgccttgcccacgaacaaggctttcggcagtgtgcctttggcttcgggaatcgccgtggagacgggcagtcccagtgaaagcgcggatacggaaccacagtgtgcggcttgcgaaccagtcatcatcgaccttctttcccggcctgccatcagtgtcataccctcgcagtgcagcagtccgtttatctattggaaagcaacactagcgcatccaggccggaagtcgtggtacatatccatatcctgctgcggttataggaaatcccctccgagtttcctcgaaggggatttcttaagtcgctagttcaagcgaagattcttgtctgatgataatcaggcgaggatcttggtcacacgaccggagccaacggtgtggccgccttcacgcacagcgaaggtcaggccttcctccatagcgatgggctgaatcagctcaacggtgaaggtagcgtggtcgcccggctgaaccatctcgacgccttccggcagctcgatgacgccggtgacgtcggtggtgcggaagtagaactgcggacggtagttggagaagaacggcgagtgacggccgccttcgtccttggtcagcacgtagacttcgccctcgaacttggtgtgcggggtgacggagcccggcttggccacgacctggccacgctcgacatcctcacggccgaggccacgcagcagcagaccggtgttgtcgccagcctcgcaggcgtccatggtcttgtggaaggtctcgatggaggtgacggtggtctgctgggtcggacggataccaacgatctcgaccggggtgttgacggccagctggccacgctcgacacgaccggtgacgacggtaccacggccggagatggtgaagacgtcctcgatcggcatcaggaacggcttgtccaagtcgtgaaccggggtcgggatgtagtcatcgacggcggccatgaggtccttgacggactggacccacttctcgtggtccggagcgtcgtcgtgcagggcgccgtaggcggaggtgtggatgaccgggcagtcgcgatcgaagccgttctcgtcgaggaggtcacggacctcttcttcgacgagctcgatgagctcttcatcgtcgaccatgtcgcacttgttgagggcgacgaggatcttcgggacgccgacctgacgggcgagcagcacgtgctcgcgagtctgggccatcgggccgtcggtggcggccacaacgaggatggcgccatccatctgggcggcaccggtgatcatgttcttcacgaagtcggcgtggcccgggcagtcgacgtgagcgtagtgacgcttctcggtctggtactcgatgtgggcgatgttgatggtgataccgcgggcggcctcttccggagcggagtcgatctggttgaagtcgtactccgggttgacatccgggaactcctcgtgcagcaccttggagatggcggcagtcagggtagtcttaccgtggtcgacgtggccgatggtaccgatgttaacgtgcggcttagtacgctcgtacttttcctttgccattacttttgtcctcctggacgtctcgtgagtttcctgcgccctttcgcacagggactcgcttattctactgggtttctgggttatgtgccactttgaagagccagaacccagtcagcggtatacgatactaccgctgactggagacaccggccacttcatgatgtggcgcgtgtcactcgccgcgctgggccttgatgatctcctcggagacgctcttcggcacctcgtcgtaggagtccatctccatggtgaacatggcgcggccctgggtcttggaacgcaggtcgccgatgtagccgaacatctcggacagcgggaccttggcgtcgatgaccttgacgccgacgccgtcggtcatggactggatgttgccacggcgctggttcagatcgccgatgacttcgcccatgtactcttccggcgtacggacttcgaccttcatgatcggttcgagaatgaccggcttggccttcggggcagcttccttgaagcacatggaacctgcgagcttgaaggccatttcggaggaatcgaccgggtgcatctggccgtcggtgacggtggccttgacgcccacgaccgggaagccggcgagaacaccggactccatggcctccttgacaccggcctcgatggggccgatgaattcggcggagatgtggccgccggtgaccttgttctcgaactcgaaggtcttgccctcggtggtgtcgagcggctcgaagttcatcaggacctttgcgaactggccggaaccaccggtctgcttcttgtgggtgtagccctggtccatgacggccttgcggatggtctcgcggtaggcgacctgcggcttgccctggttgcactcaaccttgaactcgcggcgcatacggtcgacgatgatgtcgagctggagctcgcccatgccggcgatcagggtctggccggactcttcgtcggtcgtgacctggaaggtcggatcctcttcggccagcttggacagggcgatgcccatcttctcctggtcggccttggtcttcggctcgacggccacctggatcaccggatccgggaaggtcatggagtcgagggtgatcgggtcgttgatggagcacagggtgtcgccggtggtgacgttcttcaggcccacgaaggtgtagatgttaccggcgtcggcgcggtccatcgggttttccttatcggcgtgcatctggaagatcttgccgatgcgttccttcttctcgcgggtggagtcgagcacggagtcgcccggcacaacagagccggagtagacgcgcacgaacacgagcttgccgtagaacgggtgggtggagatcttgaagaccagagccgcgaacggatcggtcttgaccgggtggcggtcgatctcgacggactcgtcgccgggcttgtagcccttgatggccggcacgtcctcgggggacggcaggtagtcgacgacgccgtccagcatcggctgaacgcccttgtccttgaaggcggagccgcagaagacagggaaggcttccttggcgatggtgagcttgcgcacgccggcgcggatgtcttccttggacaggtcgccgtcctcgaagaacttgttcatgaggtcgtcgtcggcttcggcggcggcttccacgagcttctcgtggtactcctgagccttgtccttgaggtcgtccgggatctcagtggtgtcgtacttggcgccgagctcctcggtgccgttccacacgtaagcctgcatctcaaccagatcgacaacgccagtgaagtcgttctcggaaccgatcggcagctgcatcacgatcggagtagcgcccagcttctccttgatggtgtcgacggagtagtagaagttcgcgcccagcttgtccatcttgttgatgaagcagatacgcggaacgccgtacttgtcagcctgacgccacacggtctcggactgcggctccacgccttccttgccgtcgaacacggcaacggcaccatcgagcacacgcagggagcgctccacctcggccgtgaagtccacgtggccaggggtatcgatgatgttgatctggaacttgtccttggtgtcgtgggactgacggctccagaagcaggtggtagcagcggactggatggtgataccacgttcctgctcctgcgccatgaagtccatggtggaggcgccgtcgtgggtctcgccgatcttgtagttcttaccggtgtagaacagaatacgctcggtagtggtggtcttgccggcatcgatgtgggccatgatgccgatattgcggacgtcgtggaggtccgaaatctcttcagccatctttttccttagttttactcagggcgagtgattaccagcggtaatgagcgaaggccttgttagcctctgccatcttatgagtatcctcgcggcgcttgacagaagcaccgaggccgttggaggcatccaggatctcgttggcgagacgctcggccatggtcttctcacgacgggcgcgggagaagtcggtcagccagcgcagcgacagggtgttggcgcggttcggcttgacctcgaccggcacctggtaggtggcgccaccgacacggcgggagcgaacctcgagggacggacggatgttgtccagggcgcgcttgagcacagccaccggttcctggtcggacttctccttgaccatatcgagcgcggagtacacgatgtcctcggcgatcgacttcttgccgtcaagcagaatcttgttgatgagctgcgccaccacggtggaaccgtagatcggatcgggcagcacgacgtgcttcttggaaggtcccttacgtgacatatctcttacttcgccttctttgctccatacagggaacgaccctgcttacggtccttgacaccctgggtatcgagcgcgccacgcacgatgtggtaacgcacacccgggagatccttcacacggccgccgcgcacgagcacgatggagtgctcctgcaggttgtggccctcgcccggaatgtaggcggtgacttcgatgcccgaggacaggcgcacacgagcgaccttacgcagagccgagttcggcttcttcggggtggtggtgtaaacacgggtgcacacgccacgacgcagcgggcttcccttcagggccaaagtcttggacttcttcggctttgcctgacgtcccttacggacgagctgttcaatagtaggcaacttgaattctccgattcagtggtttctcttgcttttgtgtgaccgccgcactgcgcccacacttttcagcacactcgcttggcatctgcctgttggcgacacccgacgaatcggaaaagatagcccagtccaccggcccgatggccttcgcccctcccgtcggcgcattactgcgtgcgatcagcggtttgaaggatatcccagcatgctcgcctgttacataaggcgtgctgctggcacacacgaatatctatactacgattccgccggacaacgacgcgccgggcctcgactcactggtttgggacaatccgcgccctgtacttttcctctccttctggcgcaacaatcccgggaatgcgtcgcacaacacacgcacacacgccctcccaacgcaatattcccgggaatgcgtcgcaaaaaagcgaacgccacacagcaggtgcccccgcggagactatgtcacacgggggcaccgccaaggaggttacattatgtttcttttcaccacatgccgcttctgtgttatctgtttccagcacaccctcgtgctcttccatatccgatgggaacctctagcgacccggcctctttgccgtatcaccttgccgctttctgcattactaattatagcaaaaccgccctcgcgaaacgcccgatacattaatcgggagtaagcgggagcggctatgttatgcgaggtaggaaaggtgagtgaccgactgactggagtcgtaccttacccgacctttctcaccatctcaggatttcaggcagcgaccttggcggccttgtcggcgtcgaacgggtgggccacggaaacggtgctcttggcggagcccttctcgccgttgtcagaatcccaatgaatctcgtgccggtcgtcatggttgcgccaccagctggacaggatggagccggagatgttgtgccacacggagaagaacgtggacggcacggcggcgagcgggttggacgcgaaggaggtcagggccagcgtggcgcccagggcggagtcctgcatgccgacctcgaacgtgatggccttctgctgcgcgtagcggaagcccttcgggtagatcctgtacatcagcttcgagaagccgaagcccagcgagtagccgcacagattatgcaggatgaccaccgggatggccatcagagagctggccacgaacagcttcgggccattggcggcgacgaccacgccgatgatcagcaggatggccacctgggagacgatcggcagggccaccgtgaccttctcgatcttcttgccgaagatcatgtggcagatcacaccgagggcaatcgggaagagcaccaccttgacggcgttaaggaacagggattcgaccggcacgctcacatactgggaggccagcagctgcatcagcagcggaatcatgaacggggcgcacagggtggagaggatgccgatggagacatcgagggccacatcaccacgggacaggtagctcatcacgttggaggaggtgccggacgggcagcagccgacgagaatcacgcccacggccagcgggccggacaggtggaagatcgcgcacagggccacggcgacgagcggcatgatgacgaagtgggccaccgtgccgacgatgaccatcatcggctgggtgaggatgcgcttgaaatcgtccagcgtcagggtcagccccatgccgaacagcacgatgcccagcatgtagccggtgtacgccttgccccacaggctggcggccggcacgaagtagttgaagacggcccagacgatgacgatgaccgtaaaccacttggtcagccaatctgcaaaggctttaaccttttccatggtgtttctcttcccttgttcggtgtaggtaacatcgcatgaaactaggcgggtcgcggttgatatgaaacataatgctcacattgtgaacgctcacgtaatcatctctgcaatccccagccgcaccatcacgccgttgtgtgccctgacttttcatcaatcgccacacaagacccactcgtccacatcccaccatttgagacagcccacagcctggccccaagaatgaaaccaaccgcttgattccatcgcgacacaccgatgagcacacatccgcaaagttgtgtatagtattcacctgttgtgcgaattcagcttgctgaatacgacactatggtggccatagctcagttggtagagcatctgattgtggttcagaaggtcgcgcgttcgagccgcgttggccaccccagtaaaacccttccgttcgcggaagggttttgtttttctccatgaattccccgctcctgccgggaaccgccacgttgtacactcgggcatatccaattcatctaacacaaggacaaaaggtccgtcatgctgtcttttgagaacgattactcccgcgccgcccatcccgcagtgcttgaagccgtggctgaagccaacaaccatctgtattcgggctacgggtccgacgaactgagcgatcaggccaaggccaagatccgcgaggcctgcggccagccggacgcggatgtgtggttcctcgtcggcggcacgcagaccaaccaggtcgtcatcgacaccatcaccccggcgtatgcaggcgtggtcgcggtcgcctccggccatccgaacgtgcacgaggccggcgccatcgagttctccggccacaaggtgcttacgattccccaacacaacggcaaaatggatccaaccgaactggacgagttctgcaagaccttctatgcggacggcaactacgagcacatggtgttcccgggctccgtgtacgtctcgcaaagcaccgaatatggcaccatctactccaaagccgaactgcaggccatcgccgatgtggtgcataagtacgatatgccgctgttcgtggatggcgcgcgactcggctacgcgctgaccgccaccggttccgacatgacgctcacggatctggcgaccatcgccgacgtgttctacatcggcggtaccaaggtgggtgcgctgttcggcgaggccgtggtgtttaccaagcacaacacgccgaagcacttcctgacccgcatcaagcagcacggcgccttgctggccaagggcttcgtgctgggcgcgcagtttgacgccttattcaccgacaatctgtacttcaagatcgcccgcaacgccaatgaggcggccgatcgtattcgcgaggccctgcgcgccaagggctacatgctcactttcgaagcgcccaccaaccagattttcgtgacgatggatcagccgaccatcgaccgtctggagcgcgaggtcaagctcggcttcaccgagaaggccgacgacacgcataccgtgatgcgcatctgcaccagctgggccaccacgcatgaagagatcgatcagcttattgaggtgttgtaaaacccttcgctaatctctctctccgtcatcgcttcgcgatgccacctccctcaccagagggaggttttttcgtagctcccgccgatgagggagctggccgccgcaggcggactgagggaaaacctctccgcaaacgagaaggctcctactcccctatcgccttgcgttccatatccacgaacttgtggaccgaggcttccacggaataatgcgccttggtgtattcggcgtatttctcgccccattcggcgcgctcggcctgatgtgcgatccaccaatcgatgcgtcgggccagcagggccgcgtcccgcacggggaacaacgactcgtcgatcagcgcgaactggccggccgccgacaattcggacgcggcgatcaccggcaccaatccgcacgccatcgcctcgatcacgctcaccgattcgatgtcggcaatcgaacaatgcacgaacaaatcgcccgaacgcaacaaatcgggcatatcggcgtgcttgtggaatccgatatcggccttgcgcgccagcaaacgcccggcgcggaacttgagatactgcttgagcggcccagtaccggcgatcaccagctgaatatcgccggcgtggcgggacatcgacaccgccttgatcagcgtaatctgatctttctcgctggccagtcggccggaagcgacgacacggaacggcacgggagccgaggcatccggatcggccggcttcttcggcgaatacaccggtgaataaccattggaaatcacgtgcaacttggctttatacccgtgcgcgcgcaacaggctcgcggtcatttcggtgggcacatggatgtggtcaatgcgcttgtacagccagtgcttgaacagccagtacaggaagctggaaataccgggaatgcgacgtagcgggccggccgaatacagcacgttctccggctgcaggtggaatccggcagtcacgggaatgcccatttggtgggcgactttagcggcacgacggccgaatttgaacggcatatagatatgcaccacatccacgccttggaaagcggtgcggaacaacgtgtcgctgggttcggcgaattgcatgagctgcttggcggccacccacgagacgagcggcaccttattcacgcgcgccggatattcgggcgcccctataccgacaagcctcacatgatggccttgccgctccaattccgcagcccattgcaaggccgaattggaggtgccgttgccctgattgcccaccgtatcgaccacaagagcgatagtcagcggacgatcaatgctctcttcaatcccgttttcgcgcattgcctcatcctaaaccaccgcgaggcaatggcgtcggccgcgctgcttggataggccggaaatggtatgggctgccgcattttgcctaatattgaatcacgcgcttcgcagcgcacgatcgacgcgggccacgacctggaacaactcggcggtgtgcttgagcagactgatgcgcacccagccttcgcccgcctgaccgaagcagacccccggcatcagcgccacgccggccgtgttgagcagccaatccacgaatgcggcggaatcgccatgccaccgcgccagccggccaccatatacattttggacagcgagccaagttccagcgccacgtccagcgcgcccggagtctccagcaggctcagcgagcgcacgtcgccgaattcgagccccgcataggcgaaatcgttaagtacttcgactattgccagcgtgccggcttgtagcctgaaacgccggaaccggcacgccgctattcgctatatgtcgcatccaaaaatgttggcccgaccgccccatacttcatcggccggtaattgctaaggtacgacggctctgttacacacgcaatggcgtgtctatacgcagtatttatggcgggttacgggcatctgaatcttcatggggcggtaacctgcccatggggcggtatttaccccatggggcggtgaaattcccatggggcggtaaggcaaaacggcttaattccgcggtttcacaaaaccaacaaaccgccccatgaagccggatattccgcccgtaattttgccgcgcgaggcactccgctcacgcgacataccgaaatcatcgcgtcatggcagaatgtgggtatgactgagaacgccgtgaatactgccgtgacttccgcctcttcccccgcaacctccgctgagacttccgccgtctcccccgcaactcgcgcagccaaccacccgctgggcacaccgctgggcaagcaccccacccgtgtgctgtttttgggcgctggcgagctgggcaaggaggtcacacttgaactcatgcgactgggcgcatgggtgtgtgctgctgactcctatgccggcgctccggcccagcaggtggcgcatgaataccgcgcgttggatatggcgaatgccgccgaattgcaggcattgttcgatgaaatcaagccggacatcatcgtgcccgaggtagaggccatcgccaccgatgtgctggccggtgctgcggccgcgggcgcccaggtggtgccgagcgccgaaatcgccgcgatctgcatggaccgcgagcgcctgcgcgtactggcccacgaagaattgggcttgccgactacaccgtatcgttttgccggctcgctggaagagctgcgcgccggagcttcggaagtcggctatccgtgcgtggtcaagccggtgatgagctcgtctggtcacggccagtcggtggtgcgttccgccgacgccatcgatgccgcttggaccgaagcgcaggagggccgccgcgccgccgatgagggcgatgtgtcgcgcgtgatcgttgaggcgcttgccccgctggagcgtgagctgacggtactgaccgtttcttcgtccgccggcattgtgacgtgcgcgccgatcggccaacgtcaggagtccggcgattaccgcgagtcctggcagccggctaccgtgcccgatggtgaggccgagcgggcgcgcgacatcgcacgtaccgccgttgaaggcttggtggccaaggctcaggcgaccggcgaaaccggttggggcgtattcggcgtggagctgttcgtgctcaccgacggctcgattctgttcaacgaggtctccccccgtccgcacgataccggtatggtgacgatgacctcccagcgtctgagcgagttcgcgctgcacgcccgcgcgattctcggcctgccgatcacccccgagcatgtggcgctcacgattccggccggctcggtggcggcaagccatgcgattgtggtggccggcgacggtgaggccgagttcaccgatgtggccgctgctctggccgaacccggcacggacctgcgcatttttgccaagcccgaagtgcatggccaccgtcgtatggccgtggcactggccgtcggcgagtccgaagccgacgcccgtgccaaggccggccgtgtggccgatgcgttgacgattaccgtggagtagtccacggcctgatcagctcagcatggcctcaatattgttgccgtccgggtcgtggatgaacgcggcgtaatacgtggggccatagttcgggcgcgggcccggagcgccgttgtcggtaccgccagaggtgagaccggcctcatggaacgccttgacggcggcctcatccttggcgcggaacgccacatgagacggcaccaccgggttgccgtccttcggagactccagccaaacgctgtcgccatcctcgtcattggcaaagcacacggcggtcgggtacgccactttcttgacgtagcccagcggggccagcagcttctcgtagaaatccgcgtactgtgcggcgtcggaaacaaacaaaccaatatgatcaatcatgacgaacctccttgcaccatttcgtcactcccattatcgtgcgtgcgcggccgtacactcacgttttgtctattgacgaacatctgagtgtccgcgtgcttgcgtagatactgttactccgaacgactatgcgaccggcaatgagtcgattgtcggaccaataccgtccgcctccgccatcccaacagcgtatggccgttcgatgcagcgacgtatgatgcgctggccgcatcgtagcgtcatgccgagtgttgttgtagccctcgattggtacccttttaccgttagttcacccagaaattccactcctgaaaggtgagtcatggagaagctggaaaagctctacgagggcaaggccaagcaactgtacgcaaccgacgatcccgaggttctgtgggtcgaatacaagaacaccgccaccgctggcgatggtgaaaagaaggaagacttcaccggcaagggccgcctgaacaacctcatcaccaccatcatcttcgacctgctcaagaagcgcggcatcgacagccatctcatcaagcgagtgaacgacaccggccagctggtacgcaaggtgaacatgttcccgttggagatcgtgctgcgcaacgtggccgccggccacttctgctcccgtctgggcgtggaggaaggcctgccgctcaaggagccggtgcttgagtacttcctgaagaacgacgatctgcacgatccgttcgtcaacgacgatgacctggtggccctcgacgtatgcactcgcgaggatctcgccgagatcgccccgctggcccgcaagatcaacgaggccctgatcgagatcttcgccaagatcgacgtcaagctggtcgacttcaagatcgaaatgggccgcgccaccgacggcacgctgctgttggccgacgagatcaccccggattcctgccgtctgtgggaccagaaggaccactccggcaaggtcgagcaccttgacaaggacctgttccgccgtggtctcggcagcatcatcccggcctacgaagagatcgaggagcgcctcgccgaactcgccaagtccgaaggcatcgaagtcgccgagtaagtcgtttaggtgcaggtagcagaaacatacagctggctcctctctccgaggggagctgtcgccgataggcgactgaggggaggtcaagacgttcaccgccatgacaactcccctcagtcagctccgctgacagc

SEQ ID NO: 2504 - DNA, 2851 bp, Unknown
  R50_10m  MAG No. k141_22498
catggcgttgcagtacacgttccagttcttcttcggcggtgacattaagggtatcgtcaaatccgtgccgaacagcttccaaatcggcccaatcaccacggacatgccgacgctgctgtccgcgctcatcgccatctgcgtgatcgtgggcgtcacactgttcctctacaagacgcggctcggccgcgccacgcgagccgtttccgacaacgcggcactggccgcagcgtccggcatcaacgtggatcaggtggtccgcgtggtatggattctctcgtgcgccatggccgccctatccggcgtgctcctcggcgtatacctcaacggcatctcttggaacaccggcgcgaccctgatcctgctgatgttcgccgcggtgacgcttggcggcctcggcaccgccaacggcgctcttatcggctcgttggtcatcggcatcgtggcggatatgagctcgctcgtcatccccaacgacatgcgttacgccagtgcgctggcaatcctcatcatcgttctgctggtgcgcccgcagggcatcttcggcaagcagcaaagggtgggctgattcatggatatcatgacaatcatctccaacgcggcgggcgagctgatcgcccccaccacggcggcatatgtactggccgccatcggtttgaacattcacttcggcatgaccggcctgatgaacatgggccaggcgggcttcatgctcctcggcgcctacggattcgccatcacgcagtcgatgggctgcaacctgttcgcctcggtctgtgcggcgctcgcgctcgccgtcatctacgcgctgctgctcggcattccgacgctgaagcttgggcccgactatctggccatggtcacgttggcggccgcggaaatcatccgcatcgtcggccgttccacagccatgacgaacttcaccggcggttccgcgggcatctcgccgcaggatttcactgaaaagttcgaagcgctttccccactgcccgacggctcgaccacgttcctgctgtggacgtacagcaacaacatcgcgaattcctggtggctgcgtatcgtggcttggattttggttgcgatcgctgcgttcctgtgctggcgatggttccactcgccgtggggccgtatgcttaagggcattcgtgaggatgagaatgcgattcgttcgcttggcaagccggttacgaaatacaagatggaatcgttgattttgggcggattgttcggtgcgatggccggcatcatcttcgtcctgccgcgctccgtacagcccgattcgctcggccgtacagttacgttctacgtgtggacgattctgctgctgggcggcgcggccacgattctcggtcctgtgctcggctcctgcgtgctgtgggtgctgctcaccttcgtcaaggaggttatgcgcaacaccgttcccgaaaccctgatctcctccaatcagatcgaagccctcggctgggtgatcgtcggcgtggcgctgatgtgcctggtgatattcagaccccaaggcctgttgggcgaccgaaaggagttggctttccatgcctgatacaacgaataccccgaccgccggcgcgcagcagctatctggcgtgcagccgggagtgccgttccatgacctgaccaaatgggccaccaaagcgccggaaggcgagaccctcatttccacggcctaccgtgacaaagtcaccgaggatttgaaatttgtggagaacaagccgggtgtgcacaagcccgatccgattctgatcgccgatgacgtgacccgcaagttcggcggcatgaccgccgtggacgtgagccatttcgaaatcgaaaggcatggcatcactgcgttgatcggaccgaacggcgccggcaaaaccacgttcttcaatctgatgactggtttcgatatgccgaacaccggcacttggcagttcgacggcaaggacatggcccacgtgcagcctgaaaaagtggcgcggatgggcatggtccgcaccttccagttgaccaaggtgatgagccgtctgactgtgcttgacaacatgctgctcggcgctcccgtgcagcctggcgagggcatgttccgcgcgctgttccccggcatgtggaagaagcaggagaaagcgaatattgagaaggcggaagcattgctggaacgttttctgctgatcaaaaagaaggatgattatgcgggtgcgctttctggtggtcagcgcaagttattggaaatggcgcgtgcgttgatgtccgacccgcagctggtcatgctggacgagccgatggctggcgtgaaccccgcgttgaagcagtcgctgctcgaccacatcatggcgttgcgagaggaaggcaccaccgtgctgttcgtggaacacgacatcaacatggttcgacacatcgccgactgggtcaccgtgatggctgaaggcaagatcgtggccgaaggccagccgaagagcgtgatgaacgatccggccgtgatcgacgcgtatctgggagcccatgcgaatatcgacttgggtgacgactccgtgctggaagatttgaaggaggcctgaaatgagcgacaacgcaagtgtggcaagtgcggctggagtgtctggtgcggtctcggtaccccatgtgtccgattctggtgaatcggacatccaaggtggcggagacaagccgctgacccgcgcgcagattcatgtgggtgagccggaaggtgagccactgcttgacgcggtggaccttgtggccggatacattcccggcgtgaacatcctcaatggcgcttccctgaccctccatgaaggtgagatcgttggcatcatcggcccgaatggtgccggaaagtccacgctgctgaagtcgctgttcg

SEQ ID NO: 2505 - DNA, 2916 bp, Unknown
  R50_10m  MAG No. k141_22706
agtaaaccatatcgacggcaacatccaaggcgccgacggctaccggaagaactgagagggaccaaccatgaccactgcaacatcaaccgcaaccactcgcggtacgtccggtaccggagtcggtgccgacaaaaccggcacccccggaaccagcgccggcaaaaccggcaccgtcgccacgcgccggaagtccaccgccgaacagcgccacgagaacgccgtcggctgggcgatgcttctgcccgcatccatcctactgctgctgttcatcggcattccggtgattctggccttcggactggcattcaccaacgcgcgcacaatcagcccgaaccctacccggttcatcggcatcgacaatttcacccgactgttctccgacccgacgttctggtacgcgctgcgtaacgtggccgtgttcgcggtcgtcgtggtgcccgtccaagccgggctcggcctgctgctcgccgtgctgatcaacaagcaggtgcgctcctccgtgttcttccgcacggtctacttcctgcccgtcgtcacctcgatggtggtcgtctccctgctgtggatgttcatctaccagaacgacggcatgctcaaccaggtcatggccaaactcaccttcgggcactggcaggcagtcgactggctgaacgacccgcgcaccgcaatgggcgcgatcatcgtcatgtccatctggcaagcggtgggccagcacatgctgatctggctgtccggcctgcagaccatccccggcgaactgtacgaggccgccgaactggacggctgcaacgcctgggagcagttcaagaacgtgacctggccgtgcctgcgctccacgcgcaacatgatcctcatcaccatcaccatcgccgcgatgagcctgttcactcagatcaacgtgatgacgcaaggcggcccgcgcgacgccaccaccaccgtggtgttcgaggctgtgcgctccggcttccagcagcaggagatgggctacgcctccgcgatcacacttgtgttcttctgcatcatcatggtgatcaccggcatccagcgttatctgactcgagagaagtaaggaaagggactgacgatgagcaacgcaacaactatggccgcatccccgcaggccgaccaaaccgcgcacgacaagcgcacgtcgaaagaagccaagaaagtcgcctacaagcacaaccggctgtccgtgggcgggtggatcgtacgcatcctgttcgcctgcctgttcgctttcccactgatcttcatggttgtcagctcgttcaaaccggacgatgagattatggcggacctcggctcgttcaaggcgttcctgccggtggggcacatttcgctcgacaactacgcgcaggtattcacccgcgtgccggcctccaccttcctcatgaactcggtgatcatcacgctggtgaccgtggtgcttggcgtaatcgtcaactcgatggccgccttcgccatccaacgtctgcaggtgcgcggcaagaagatcatcttcacgttcattctggccacattgatggtgccgttcgagacctacgcgattccgctgctgtggtgggtcaaccagctgccgcgcccggtggtggaccagttcggcctgtacttcacgcgcggatggatcgacacgctgcccgtgcagatcgtgccgttcatcgccaacgccttctccgtgtacctgtacatgcagtatttcgagacgattcctaaggatctcgacgaggccgcccgcgtggacggtgccggctggttccgcatctactcgcgtatcgtgatgccgctgtcgggcccggccaccgccaccgtggtgattttgagcttcctgcccatgtggaaccagtacgtctggccgctgatggtagtgcagtccgagagcctgaggcccgtgatgatcggcgtgcagtacttccagcagatgaccacgtcgtggggtcagatcatggcatacagttcactgatcaccgtgccgatcatcatcgtgttcgtgatctttcaaaagcaattcgtcagctcaatcgcctcttcgggagtaaagggctgacgcgttaagcaaacagtcctgtggactgtttgtagcgtcagcctgagcgaggcgaaagccaagcgaaggcaacactgagcctcgctgaaagcgaacccacaattgcagggccgaaggcgaatcaatacgtgctgggtgggatttccctttttgcccatccggcgcctttatatccagcaattcccggtatcgaaaactcaaggagtcctcttatgaccatcatcaatgccgatgactacaccgcgttcgaggcgtttgccgaatattccggaggtgccaatgctgccccggcaaccctgcgcttgaccccggcaaatccgaacacaccaccgatcgaagcccacctgactgccgccgaccgtcgcatgcgactcaccctgccaatcaagcccggcgagcaatacgcactacgttgcgaaggcctgacgctgggctttgcgtacctgactggaggcgcgaatctgctggatcgaggcatccgcatcatcaccccggatacgcgcgccaccgcgcaccggccgagcgcacatttcgaaccggcccagcactggatgaacgacccgaatggactgtgccgtttccaagggcgctaccacatgttctatcagttcaacccgtacggctggcagtgggacagtatgcattggggccacgcggtcagccgcgatttggtgcactggacagatctgccgatcacgctgctcccgcaagaagatctgagccgtgacggctcgctgagcggcggggcattctccggttcggccgtaaccgtggacgagaccgggcatatcgtgcccggcgatgaggcgagcgccattcgcatcttcctgacccgtcactgggagtgccgcggcgaccccggctctgtg

SEQ ID NO: 2506 - DNA, 5333 bp, Unknown
  R50_10m  MAG No. k141_22721
caggcggagttcgccaggcagggcgtgacctgggccgcgatctggggtcaggcgatcctcctgccgagcatggtgttcatgccggtgcttgtggccgcgttcgccgcgcaggtcgaagccaacgagcatcgaggccgcaactggcagcggctgaacgccgccggcaccgtgaacgcggcgatcgccggcaagatgctgcacgggctcgcggcttcggcgctgaccgtcctcgtgttcgaggcagagttcatcctcgtcggacgcttcgccgccggattcgacctcgcgcagctcggcccgttcctgctgcgcggcatcccgctgaccctgtcggtgtgggcgatcatgacgctcacgcaggccgtgagcgcgaaggccgaatcgttcgcgggcacgatgagcgtgatgatggtcctgaccatcggcggctgcgccctgagcctggccgcgcccgtcgtcgccgggccgtatccgctcgccctgatcaccagcgcctccgccgcccgcgacctcgcgaacatcgccagcccggcatccatgctcgcctccacgaccgccgccgccatctgggtcgccatcagcggcctgatcttccaccggctcgccaaacaagccgtctgagcaaccgtccacgggctcccctcacctgcgggagcccgccacccaacaccatggaaaggcttcatcatgcacaccaccagccaacacaacgaacgacacgacgaacaacacaacgcgccacacaacagcgaacagtccatacgcctgccgcgccgcgtcatcgccgtgctgatcgccgccctcgccgcgatcatcctcaccggctgctcgaccggcatcggcgtggccggagacaggaacctccaaggcatacgcacccaagacggcgactcctacacgggcggctacaaggccgactacagcaagttcaccggcgaggaggccgtattcggcggcaccggcaagaaggccagcatccacctgaacggcaccatcacaggcacatccggcaccggcagaatcctcgtgaccaacggcagcgacacgaaacgacccgtgcccgccacgaacggcaaaatcgaccagacctacaacgtcacaggcaccagcttctacatctacgtcaccggcgaccaattcaccggcaccgtgaacctcacatccaaggagcaatgaccatggcaaacacatcccaatacccaaaccagcaaccggcatatacgccggcaccgccggacggcgggcggacatggggcggctgcgccagcctcgcattggccgtccttccccttctgtgcacgctcgtgccccagctgctcggcatccacctctacacgacgggctgggtcaggaacatcctcgtcatcatcgacttcgtatgcctcatcgcttcgctcgtcatcgcgatcgtcacctatcccgaacaggcgggaggacacagaatcgtcagtacaatcgcgatactcctatccgcaggcctgactgccgccggcggcatgctcatcttcctcatgttcatcaaccagtaggaatccgactgacaacggaaaacttctttggaagttcatctaaccgcatacacgccatacagcacaggccacatgcgatacgcttcaacacggatggggcagcacccagggaaggagaatcgcatgaccgcaaaaaccggaaacgacaagcgccacgcggttaccggcctgatcggccacgtggccgcgttctggcggtccagcccggtcgcgcgcatggtcgcgccgatactgtgcctatgctacgacgtgatgatgctcaccagaatcgtattcacccatggcgggggcgattcggcagccatgaaactgttggagcatcaatggggaatccccgtactcgccatcctatgtgtcttatctgttgtggcgctgttgttccgtatcagaatgccgttcgctattttgtgtgccatatgcggattgtatctatgcgcttgcttgcttcaagcggagccatatctgatgttgcctctcttgtttgccgtctacacgtctacagccttggccgcgaccactgaacgtgccattgcgggaatggttttgtcgggattgtcaatcgtttgcggcctctggattgcgaccttccccgccttgcagactgatatacttctgcccgagtccctccttgcgtcgatgaccgctattttagctctttggtcgcgcaacatcagtcagcggaggaagggagcggccttggtggaagctcaacagcaacgaagcctggaattggaacaggaacgcgatgaagaacgtcggcgggcggacgtcgcagccgaactgcatgacagcgtgggccataatctcaccgctatcattgcacttactgaaggcttggagggattgacacaggagccggtggaaggcgctataaagagtatcaataacttagctcggcaaagtctaggtgatacacgcgaggcggtacggaaactttcatctccggtgacgttacggaaaacaaaaacaggaacggtggaactgtgcagctggaatgatataaacccgattcttcaacatgctcgtgatattggaatcgccgccattctgaccgagacaggaaggcgtccagacgatctagcccaagctgatttatgcttccgagtgagtcgtgaggctgtcacaaacacaatgcgccatgggaaaaatataacgcgaattgtggtttcatgggatcatctggataatggggaactccatataacagtgcgtgatgatggtaagccaacgctgaacaaagataaccgcgctaaggggaccggtttcgggcttgctggcctagtgactgaagttacgcgggtcggcgggcaccttcactatggctcatcatcagggcaggggtggactgtttcagccattattccacagcaaaaacgtccatatattcctgtgcaggagggaaacgatgattaacgtaatgatcgtggacgatcagcagccgaccagaatgggtttttcgctcatggtcatgaaagatcctgcgcttcgcatgacgttgcaggcggggaatggacaggatgcccttgatattcttgcggcactgcaattacatgggcagagcctccctgacgtcattcttatggatgttcgcatgcctgttatggatgggctcgatgccacggcaagaatcaaacagttatatccttcaatacgtatcctgattttaaccacatacgatcaggatagctatgcgtttgggggattgagcgccggagcttcgggattcttgcttaaggacgttaagactaaagacctgtgtcgggccattcactcggtgtacgatggagacgccatactcacaccacggattacaaaggaagtgattcgccgaggggttcccaacgtcagcatcaatgctgacactctggccatcagaagtaaattcgattcattgggacctcgcgaattcgaagtctcagcactggtcagcgaaggaatgactaacgctgaaattgctcagcgtctcggaatgcaactggaggcagtcaaaaaggcggttagtaggtctcttgccaagctcgatgtcaaagaacgtgttggtatcgcggtgctctggtataaggccggaatgccgaatctgcagaagtgacagattccgtagaataatgtagggtttctgaatcgtgaagggctcgtagcgggcgaacccgtgacggtccatgactgtcctcgtttgaatggcgatcggcgcgcatcgtggtaccgccgaccggtattttctcacgtgaatgaagcagcttcagggaatgagtaacagaaaagccaccggcgacacgccgatggcttcaggtgagctcctgcgactgggcttgaaccagtgaccgtccgattaacagtcggatgctctgccaactgagctacgcaggaatgtctgctgtgtttgagatttctctcgcgcacaagtcacacatcttacatgcctgccacgaaaaagcaaattacatgcgtgtagggcatgtcgcgccgaattccgcagaatcggactcatcgaatacccactcatacaacatgatgacgatgcggcgatactgtcacgcgaaatttcattgtggataacttcggaagttggaaccacataggtcgttctggctggacatcctgtttcggacccctcaaggtgggtatcaccggcaaagaagccggaatcgcatcacactcacactatggggaggaatctcatgaatgcaccactgttgtttgattggcgtcgcgacgaagcccgacgtgccagcaggcgacgtcagcaggcgcgtcagcgggctcaggaacggcaacggcgtatggatgccataatcgcgttggccgccgttatcggcctgctgcttgccttgggagtgggactggcatccacgcctcagcatgttgcgcatgcggatactgcggtgaccggagatgcggcatacacggtggaggatttcaccgatatgtctgatctggcgtggcgcaatggcaatcagtgcgaatcccggttcgactggccggtcgacgatccacaggtcgaacaacagttcgagcggccgatcaacccgtgggcaccaggtcatcgtggcgtggatcttgctgcggagcaaggtaccgtgattctgtcaccacaggcagggaccgtgagttttgctggcaaagtagctggcaaagatgtggtgagtgtacggcatcgtggaggtgtcacgtcgacattcgaaccggctgttaccgagctctcggtgggggatacgatctcccgcagacagcccgtaggcatcgttgagggcaactcggaccattgcgaagaccgttgcctgcattggggcctcaagcgaggaacggccgactatcttgacccacagcaatatgcggggagtcgaaaaatcgtactgaagccgtcatgattcagcaatgtttgtcggccggaacagggccgtacggaagaggcatcgcaggcggctagcggcgtgacgagtatgaatcacagaccggcatcggccaaggagatatatccgggggcgatcagcgcggacttgagattgctggcgctgacagccagcaacggttcgttgatggtcgggatcttcttcacgccgcctacctcggagttcctgattgaaggcatggaattcagcgcttcgttcttgttgagcctggcgcaggcctgagcgatatccgtggcgatggtctgtctgtcttccatgccggtcatccattgcttgccattgacgatggatgggatgttcgagacgtacgcgccgtatccggtcaccagaggccattgcgagtcacggtccttgtcggaagcggaggtgtccttatccgcatcgtcatcggaac

SEQ ID NO: 2507 - DNA, 10145 bp, Unknown
  R50_10m  MAG No. k141_22760
aaatccacccagccgccggtcatcgtggaacaggtcagcgtggccgcgcacgatgacggcagccccgctgcaagcgaagatgccgaccagctgaccctgcgccagctcaaacgcagcggcgccaagcccaagagcgtattgctctatgccggcgtactgccgttgctcgctgtgttcatcgtgttcaatatgagcttcacgtccttcgacgtgtccattaccgccaccatgaaatccatgggacttgagcccttcctcggtctgcaattggcgatgttcgcggtcggctcgtgcatcggcgcgctggtgttcggctcttgccgactcaaaggctcccattgggcgcatatggtgatgttcctatcgctgctgaccgtcggctacgtgttcttccggctgtcaatggacaatctcatcctgctgggcgtcttcgaaatcctcgccggcctgaccgtctcgccgacgttcgccaccggcaacctcatcgtcaaggatctggtgccggcggaatccctgaccgaaggactgagctgggtaaccaccgcaggcacggtcggcacatcgatcggctcgtccgtggccggcattgtgcttgacgcctccaaccctcatgtgggcatgatgctgccattcatcttcacgctggcgtccgtgccattggcgttggccggatgggccttggccaagcggcgtgggtgaaacggaatcgggctacgcctgatggatggttggcggcttcgccgggggtctctccctcagtccgcttcgcggccagctcgaacgcaattaaatgatggctttcagccaactgaattattgctcactgtcgttcgccctcacctaaaaacgcctccggcgttttcttcacggttcggctcatcagagggagctcgacttcacggttcggcttgtcagagggagctcgattctgtggacgggatattggcgtgagggcttggcggtgataggctgattgccgattggaaaacgttccgggtacattgccgggcaggtacgggtagacagggaagaagacatgatcaaggtttcggtggtcggagcaaagggccgcatgggctcgcacgtggtcgaagcggtgaacaacgccgaggatacgcagctggcgctcgcattggatgccggcgacgacctgacccaggtcaccaccgacaacaccgatgtggtcgtcgaattcaccgtgccgtccgtcagcctgaacaacgtgctgaccctgatcggccaaggcgtggacgtggtggtcggcaccaccggttggaccgacgagaaactcgcccaggtcaaatccgccatcgccaacggcccgaagcccgaaacccagaaggtcttcatcgcacctaatttcgcgatctccgccgtactggccgactactttgcaaccaaggccgcgaaatacttcgaatccgccgaagtcatcgaactgcaccaccccaccaaggtggacgccccctccggcaccgccattcacaccgcccacggcatcgccgaagcgcgcaaggccgcaggactcgcccccgtgccggacgccaccgaaaccgatggcggctcacgcggccaggtggtcgacggcatccacgtgcacgccgtgcgtctgcgcggcctcaacgcccacgaggaagtgctcttcggcaacgccggcgagcagctgaccattcgggccgacagcttcgaccgcaccagcttcatgcccggcgtcctgcttgccgtgcgcaagctcgccggcgacgctccggctggcctgaccatcggcctcgaccacttcctcgacctgtaatcgacccgcagtcgaccagtagtcgcccccgcatttcaggcagggaagcgcgccgggacgcgcatcacggcattgccaccggctccggccataatgccacgcattcagcaacaatcaaggtacgtagtataagagtccacaatgggaagtacggtgaacactatgagcgagcatgacatgcaccttcttgagccagcacctttcggccgcattctgccggctatggtcaccccgatgaaatccgacggcagcgtcgatttcgccgccgcgcagaagctcgccaaatacctcgtcgccgatggcgcggatggtctggtggtcaatggcaccaccggtgaatcgcccgtcacccatatggatgagaaggtcgagctggtcagggccgtcaaggaggtcgtcgacgttccggtgatttccggcgccggctccaacgacaccgcacacaccgtgcgtatggtcgaacagactcaggaagcgggcgccgacgcggtgctcgtcgtcatgccttactattcccgcccctcgcaggacggtatcgtcggccactacaaggccgtcgacgaatccgccgaaaagccgatcatcgtctacgatgttcccggccgtaccggcttgaaggtcaaggtcgaaacctacgaccgactggccgaacttgaacacgtcaaggctgtcaaggacgccaccggcgatcttgcagccgcagtggagaagcagcagcgcaccggcctcgcctggtattccggcgatgacggcctgttcctgccgttcctctccatcggcgccgtcggcatcatttcggtgattgcccacgtcgcctccaaccccatgcagcagcttgtccaggcattcgatcgcggcgatatcaccaccgcccgtcgcctcgccaaccagctcgccccccttgtccacgcgttgaatggcgacggctatcaggccgtcatggccaaggctgcgctcaaggtcaagggcgttatcccctccaccaccatgcgtctgccgaacatcggtcccgacgccactcagcttgacaaggctgaagagggcatgcgcgctgccggactgctgtaagcccgaaacgctgcatacgggttgccagcccgccgcccctgcatgacagagcagaggcaccacaacagaaatcccaaaaaggttatggcacaagaacaaaagaaaacaagcaagaacacgaattctcgccgtcgcggttccgcgcgcggccgcaacgccaacggatccaacagccgtacgccgtcccgtaagatcaacgccacccggcaggccaccgcaccccagcaggatgccgtgctgatcgccccgccgaagtaccgcaagggctccatgcgcatcacgccgctcggcggcttgggcgaaatcggccgcaacatgaacgtgatcgaatacaacggtcacctgctgctcatcgactgcggcgtgctcttccccgaggaggagcagccgggcgtggatctcatcctgcccgatttcagctacatcaagaaccgtctcgacaaggtcgacgccctggtgctcacccacggccacgaggaccacatcggcggcgtgccctacctgctcaagctgcgtccggacatcccgctgatcggctccaagctgaccctcgccttcgtggacgccaagtgcaaggaacaccaccagaaccccaccaaggttgaggttgccggccgtgagaagctcaaggtgggccccttcgacctcgaattcgtcaacgtcacccactccatcccggacgccttggccgtctacgtcaagaccccggccggctccctgatcgacacgggcgatatcaagctcgaccagctgccgctcgaccaccgcatcaccgacctcgtcgaattcggcaagatcggcgaaaagggcgtggacctgctgatgatggactccaccaacgccgaggtgcccggcttcgtcaagcccgagacctccatcggcccggcccttgaccaagcgttcgcccaggccacccgcaagatcatcgtcgccagcttctcctcccacgtgcaccgtgtgcagcaggtggtggacgccgcccacaagtacggccgcaaggtcgtgttcgtcggccgttcgatggtgcgcaacatgtccatcgccgccgacctcggctacctgcacatccccgaaggcaccgtcgtggacctgaagcaggccaacgacattcaggacgacaagctcgtcttcatgtgcaccggttcccagggcgaaccgatggccgcactcggccgcatcgccgacggcaaccaccgcgacatccacatcaacgagttcgacaccgtgattcttgccagctccctgattccaggcaatgagcacggcgtctacaaggtgatcaacaagctcgtgcagctcggcgccaaggtcgtcaaccgcgacaacgccgccgtgcatgtgtccggccactgcaacgagggcgagctgctgtacatgtacaacatcgtcaagcccaagtgcgccatgccgatccacggcgagaaccgtcacctggtggccaacggcctgatcgccgtcaagaccggcgtggacccgcagaacgtggtcttggccgaagacggcgacgtggtcgacctgtatcacggcaaggccgcggtcgtcggctccgtgccgtgcggttacgtgtacgtcgatggcgattccgtcggcgagctgaccgatgacgagctggaaaagcgccgcattctcggcaccgagggcttcgtatccgcgttcgtggtggtcgacaccgacaaccacgaggtcgtcaccggcccgaagatctacctgaacgccgtggccgaggacgaaagcgagttcgacaaggtgcgtcaccagatcgtcgaacagctcaacgaccagatgatgcagggcacgcgtgacacctacaagctgcagcagaccatgcgccgcacgctcggcagctgggttgcgcgccagctgcaccgcaagccgatgatcgtgcccgtcgtggccgacatcgcccaggacgtcgaaaccgtagaaaccaagtagtccggattatccagggacgaccgtaaggagtaattgaagtcatgcccggttctaatctcactcgtattgaagccgaagaacgtaaggccgttatcgaagcgccgattcattatcacgtcgaccttgacctgacggtcggcgcgaagaacttcggttccaagtcgctcatctgcttcaacgcgaagcctggttcgtcgaccttcctcgacctgattgccgacgaagtgacatccatcgacctcaacggcaagtccctggacccagccgtggccttccaggacaaccgcatcgaactgaccgacctcaaggagaagaacgaggtcaccgtcgaagccaagtgccgttactccaacaccggcgagggcctgcaccgctcggtcgacccgtccgatggcaacatctacctgtactcccagttcgaggtgccggacgcgcgccgcgtctacgccgtgttcgaccagcctgacctgaaggccaccttcgatttcaaggtgctcgctcccgccagctggatcgtcacctccaacatgccggttgccaccatcgaggacgatccgcgcgaaaccctcgacggcaccctcggcgacaagccgaacgaaagcacccgtctgtgggacttcgagccgaccccggtgatgagctcctacctgaccgccatctgcgccggcccgtacgccgaatggcacaccgaatacctgaacgaagacggtcgcaccgtgccgatggcccagtactgccgacagtcgttggccaaggccttcgcgaaggacgtcgactacctgttcgacatcaccaagaagggcttcgcgttctacgccaagacctggggcgtgccctacccgtacgccaagttcgaccagatctacgttcccgaatacaacgcgggcgctatggagaacatcggcatggtcaccatccgtgactcctacgtgttcgagtccaaggtgaccgacgcgctggccgagcgccgcgtggtgaccgtgctgcacgagctggcccacatgtggttcggcgactatgtgaccatgaggtggtggaacgacctgtggctcaacgagtccttcgccgaattcacctccacgctggccactgccgaagccaccgaatggcatgacgcctgggccaccttctgctccggtgagaagagctgggcgttgcgccaggatcagctgcccaccacgcacccgatcgtcgccccgatcaacgacctcaacgacacctacgtcaacttcgacggcatcacctacgccaagggcgcctccgtgctgaagcagctggcattctacgtgggccgcacgcagttcttcgaaggtatccacaactacctgaaccgccacgcctactccaacgccaccctggccgacctgctgagcgaactggagaagacctccggccgcgatctcaaggcctggagcgccaagtggctggaggaatccggcatcaacacgatcgccaccggcctgaccgtaaacgcggacggcaccatcgccgaattgaagctcacccagagcgcgccggccgaacacccggtgctgcgtccgcatcgcctggccgtcggcttctacaacgaagacgccgaaaccggcaagatcgtgcgcaccgagcagttcgaactcgacgtggatggcgaaaccaccatcgtcgaggccgcggcaggcaagccgcgcccggcattcgtgctggtcaacgacgatgacctgacctacaccaagattcgtttcgacgccgaatcccaggcattcgccgaagccaacctgcatcgtttcgacgatgccctggcccgcgccgtgacctggctcgccttctgggatatgacccgtgacggcgaattcccggccgaacgcttcgtggacatgaccctgcgtcttctggccacggaaaccgaatccaccaccttccgttacgcgctggcctgcatgagcaccaccgcccaccactacgtggcgccagcccgccgcgacgatgtgctgcgccacgtggccgccgagctgtggaccctggccaacgccgccgaagccggctcggacacccagttccagctcgccaccgcctacctgggctatggcgaggagggcgatgccgcattcgccgccaacgcacacggtctgctggacggcaccgtgcgtcttgaaggcctcgaaatcgacaacaacttcacgtggaccatcgtccaagcgctcacctccgtcaacgagatgaccaacgacgacgtggacgcgcagctcgccaagaaggagaccacggaaaaccgcgagttcgcctacggcgcccgcgccttcatggccacgacgcaagccaaggaatgggcttgggatcaggcactccacaacgacgagctgaccaactcccagctcgaagccgtggcccgtggcttctccgccaccccgcgccccgatctggccgagccgttcgccgccaagtacttcgagactgtggactgggtctgggccaacaagacctatcacatggccgaggctttgctcaacggcctgtacccgggttacgccgatcccgccacgctggtcaagctcggtgacgcctggctggacgagcacattgccgccgacaacgccctgaagcgtctgatcgtcgaaaacgtggcatcctcccaccgcaccctcaaggttcgcgaatacaacgaagcgctctgatttccttctggctcccctcgggtgcgaggggagttgtcgcctcaggcgactgagggaatcgcttccgcgaggagctacgtccacattccaacataaaacccgcaaccaatcctcaacagcgtattctcgctcaaggccggcaatgtgccggtcgatgagcgacaaggatacggggaatgattgcgggcttttccataacttcattactactgattctgttggccggaatcggcgcaggattcgtgggctatgcggtaggcgcatcgtcactggtctcatacccggccttgctcgcgttcggcattccgcctgtattggcaaacgcttctaacaccgttggcgtggtcggcacgggcatcggtggcgtgatgggcgcgcgcaaagaactcaaaggccaagcggtacgctccattacgtatgtggtcattggcgcgttcggcggggtggtcggtgcgtttctgttgctcaaactcgacccgagtgtctttgaattcgccgcaccagtgctgattttgctgagctcgctgatcatcgccatcaatccgcgcggccgcatgcaggccaagcaggccgccgcggatgccaccgcgcaactcaagcacatcgaagccactgaagccaccgatgccactgatgccgccaagcgcgcaaccacccctaccgcacctcaccgcccgccggaacaactcgtgcagcccatgagccaggattcctggtgggtatggctgggcgtggtggcagtcgccatctactccggctacttcggcgcgggcgccggcaccctggctctcgccatgcttgatgccgccaaaatcggcccattccacaagatcaatgcattgaaaaccctgatcggcacaggcgcgaacatcagcgcctcagtggtattcatcatccaaggcgcggtcgattggccggccgccatcatgctgtgcatcggctgcttcatcggcgggtacatcgccccgcccatcacccgcaagattcccgcaaacatcatgcgcgccgccgccgtaatcgccggcatcattctcaccatcgatctggggctcaaaacctattgattcatgccttacactgatgcagtgaagcatacagcatggccgccaaccgcagcgtggccgcagaccccgataaggtggccaatgtctggcatttggcgactgcggaacctgagcgcctagaaaccaacgcggtaggcaaagaggtgagtgacttcctcgatccgccagacacgtcgcagattcacggcgttgcgtgccatgctgattggtggttcgcggcgcgagcaggtgctgttcgccggcgttatgaaggagctactcgcgcccatcaacaatccgcgatatgtcatcatcggcaaggaatggggcgtgcgcacgtacggtgtaagcttcccattcccgtccatatttgcccgccgccagcaggacgccgaaatactgcgccggcagttggaccgctgcctgacgcattgcaccatggtatacacccgcactgaggaaggccggcgtacgctacttcgttgccaaacgcgttctttcctcaaccgtgacgaacaactgccgcgcatactgaccacaacatcggagtgatagatcgttgcatgcatagccgagaccactccggtagaggagatgccgttgggcatgttcaccgcatggctcagcgtgttcctcgccgtcgtgttgtatacgatcacgtttgccggcccattcgtgctggtacgccgtcttcgttcccgcgccagagcccatcgacctgcccggcatgcccgttaaccgatacttctcattgttcgtctatcgagcaaggtggcacgtacgatacttggtataggggagagtttctcgctgtctgtggtggaaaatccgagttttattatctgagtcagtgctttgggtttgcgttttgggctcgatttactattggacggcgatatccggggcgggcggctagctgttggggttcttgtcgcggctgtagatgtgtgttcggtctatcggtgatgcttgtcctgttcgtggaccgggcgaagtgcgggacgacgcgcggatttcgcggtttttcgtctgccgtcccgcagagagcccgggggatgattatggtccgtaacggggattggcgtgattgcgcggttctggcggttgatagtgtggaacgccacgaacgtcaaacgattgatttctctaccatcccacgttcctgcgggacgccgcgcggaaaccggccaaatccgcgtgccgtcccacaggcatgaggctgtattcggccggccactgtccatggcggacggacgaacagaccccactggctatcgtctgcgcttctgcagcgctcaccccggccttccacggaaatcatgacagcatgaaggtgacgaatggcctggcttgcctgtggacgccgatcaatgtgtgcgacaatgattcgcggtacatggcccctggcgctggagtcgcagatgctgcttgtgtggcacaggagctgtgctggtacgtgtgatagccggcttgttgtccgtactgctgactgtatggttgccttacgaagcggtttttgatgagagaaggttgatgatgtgggatcgtgtggatgctgttgccggtgcggttgttcgtcggcagttggattggccgtggtacatgctagaggccgtggtgttcgtcggcgtgctgtagctgctgaatgctgataaa

SEQ ID NO: 2508 - DNA, 4974 bp, Unknown
  R50_10m  MAG No. k141_23153
actggttcgtccactgaccggttggttcggccgatatatgcggttgaagggttcctcttgaagaggaacccttttcgtattcgaggccggtccgtgatatcgtcggatgttgcgttgctacccacgagttgctactcacgagttattgcccacgaaaggaggagacatgcccaaggaaaccggtgagaaactcatcgtccagaacaagaaggcccggcatgactatgccatcgaagacaagtacgaggcagggctggccctgaccggcaccgaggtcaagtcgttgcgcgaaggccgcgcatcgctgtccgaggcgttcatctccatcgaccgccgcggcgaaatgtggctggagggcgcgaacatccccgaatacctgaacggcacatggaacaaccatgcgcccaagcgcaagcgcaagttgctgctgcaccgactgcagatcaccaagctcgcccgcggcatcgaggccaagggatacacgattgtgccgctgagcctgtacttcaaggacggtcgcgtcaaggcggagatcgcgctggcccgaggcaagaaggaattcgacaagcgccaggccctgcgcgaagagcaggacaagcgcgaagccctacgcgccatgcgctacgccaacatgcgccactagtcccgtcccttggctcccctccggaggggagccaagggtaggatgtccgcgttgtgggtcatttcgcccacgattaacgcttccgtagcattgcactcctacgctctggaaccatctgggaaacatacccgcccagctgactatccggagagaggaaatccaatgtctctaagcaagggaatacaatccgctgcggccgccgccctgagcgcggccatgctgatcgccgtggcggcctgtggcacgactgacagcaccgacaccgcatccaagagcggcgattcatccaaggactcgtccagcacttcgattcaaggcttcgacaccagcagcatccagaaggacgacgagattgccgcactgctgcccgattccgtggccggcgacggcacgctgaccgtcggcgccgatacttcctatgccccggccgagttcctggccgaggacggcaagaccccggtcggctttgatgtcgacctgtccaaggcgctggccgcagtgttcggactgaaggaaaacaccgtctcctccacgttcgattcgattatcccgtccgtcggctccaagtacgacatcggcatctcctccttcaccgtgaccaaggaacgcatggaggctgtggacttcgtgacctacttcaaggccggttccacgttcgtggtgcagaagggcaacccgaacaaggtcgactcctcgaacctgtgcggcgtgaaggtggctgtgcagaccggtaccacccaggaagaggaagtcaacaaggataacgagcagtgcaaggcggacggtaaggatgccatcgacatccagtcctccaagctgcagaccgatgtgactaccgccgtggcttccggtaaggctgatatcttctacgccgatacgccggttgccggctacgccatcaagcagaccggtgatacgctcgaggccctcggcgaggacgttggtgtgacccctgaggccgtggccgtcaagaagggcgattccaagaccgccgaggccgtacagaaggccatccagaagctgatggatgatggcacgtacaagaagatcctcgacacgtggggcgtctcttccggcgccgtcgacaaggccgagatcaacccgtccgtcgagtagtttcggttactatgaagactcccgttgccctgcggcgggagtctttttgtatatgtatgcactgtagtgtataaatatgcttaaccgttgatcgttgccgttgaagcggcgtaagagagaagaagaaacgattatgcagtccaccaaactgaagtccattatggccattgcactgagctcggccatgctgttcgccaccgccgcttgcggcacctccgacaaggccgatgccggtacggattccaccaagggctccgatgccgccaccatcaccagctacgatgtcagctccgtggagaaggatgacaccatcgccgcactgctgcctgaatccgtgaccaaggacggcaagctcaccatcggcaccaacccctcctacgccccggccgaattcctcgacgccgacggcaagacccagatcggctacgacatggatctcgcccgcgccatgggcaacatcttcggtctcgagaccgaaatcgtctcctccaacttcgatacgatcattccggccatcggctccaagtacgatctgggcatcgccgccttcaccatcaccaaggagcgcatggaatccgtcgacttcgtctcctacttcaccgcaggcatgggctatgcagtggccacaggcaaccccaagaacgtcgatgagaacgacctgtgcggtctgaacgttgccgtcgagaccggcaccgtcgaggaagaggccatcaacaagaccgccaagcagtgcaaggcggacggcaagaaagacatcaccatccagtcctccaagcagcagaccgacgccaccaccgctgtggtgaccggcaaggccgacgtcttcttcgccgattccccggttgtcggctacgccatcgcccagaccgatggtcagctggaacagctcggcaaggacttcgatgaagtgccgaacgccatcgccatcaagaagggcgattcccagaccgccgaagccgtgcagaaggccatgcaaaagctcatggacgacggcacctacactaagattctccagcactggggcgtcgaatccggcgcactggacaaggccgaaatcaacccggccgtcgaatagtcgacaagctgtcgcgaaaattcgaatggggcgcactgtttgtaacacagtcgccccattcgtgcactaaggttcaacgctagttgcaacttgcagttcaggctgcctaacacatccaaggaaccagattatggcgaagaaagaagtcgacggtgagggactgaacatccccaaccgcatcaaggcgttgccggtcaagcgccccggcccgattgtggccgcagtgatcgtggtactgctcgccgcgatgctcattcaaggcttgattaccaatccgcgactggattggcccaccgtctggaagtacctgttcgacgagaacgtgcttgaaggcattcgctataccttggagcttaccgtgatctccatggtcgtggcgatcatcctgtcggtgattctcgccatcatgcgcaaatccatcaatccggtgctgcgcggcgtcagctggttcttcatctggttcttccgcggcacgcctgtgtacacgcagctcattttctggggtctgttcgccgtgctgattcccaagatcagcctcggcattccgttcacctcggtggagttctggagcatcgactccaacgtggtggtcaccgcattcaacgccgcatggattggtctggccctgaacgaggccgcctacctgtccgaaatcgtgcgtgccggccttgaagccgtggaccccggccagaccgaggcggccaaggcgctgggcatgaaccgcacgctcatcatgcgccgcatcgtgctgccgcaggccatgcgcatcatcatcccgcccaccggcaacgagaccatcggcatgctgaagaccacctcgctggtcaccgccgtgccgttcaccctcgaactgcagttcgccaccaacgccatcgccaaccgtatctacaagccgattccgctgcttctcgtggcctgcttctggtacctgctgatcacctccattctgatggttgtgcagtcccgccttgaggcgcacttcggcaagggcttcgatgcccgaccggtgggcaccaagggcaagcagacgccattgccgggtaagaccgacggtgaaccgaaggatgacgtggacaagctcaaccagaccacatttgtcggattgaatgcataaggcgggagcgcgattatgactacgaatgacatcaccagtgttgccccggtcgtgcgcaaggcggctgacggttccgtgattcctgctgtcaaggccgtgcaggtgcacaaggcgtttgggccgctgcatgtgctcaagggcatcgatctaaccgttatgcccggtactgtgaccgtgattctggggccctccggttccggcaagtccacgttcctgcgtctgatcaaccagctggaaaccctgaccggcggttccatcgaggtggacggcgaactcatcggctacaagcacgtgaccaaaaacggccaggacatgctgcagaccctggacgataaggagatcgccgcacagcgctctcgcctcggcatggtgttccagcgcttcaacctgttcccacacatgaccgcgctggagaacgtgatggaagccccgatccacgtgcagcaccagtccaagaaagccgcccgtgacctggccgtggccgagcttcagcgcgtcggtctgggcgatcgcatggactattacccctcccagctgtcgggtggtcagcagcagcgcgtggccattgcccgtgctctggccatgaagccggagatcatgctcttcgatgagccgacctccgcccttgaccccgaactggtgggcgaagtgctcaacgtcatgcgttccttggccaaggaaggcatgaccatggtgtgcgtgacccacgaaatcggcttcgcccgcgaagtcgccgaccagatcgtgttcatggacggcggcgtagtcgtagaaaagggcggccccgacatcatcgaccaccccaccgagcctaggtttaaggacttcctacagcatgtgctgtaggaaggctgttatattacctcagcactgtcgtgcttcggcgtcgcctacggggagcccactgggctccccgctttacggctccgcctacagcacgtgctgtaggaaggctgttatattacctcagcactgtcgtgcttcggcgtcgcctacggggagtccactgggctccccgctttacgg

SEQ ID NO: 2509 - DNA, 18794 bp, Unknown
  R50_10m  MAG No. k141_23414
atcgtcgccatcgacgaccaccatgttcttgacgtattcgggcatcggggtttccatcttccaacggtctccgaccgcctcggcctacgtcttgccggcgctgtgcgcggaagcggcaagcgtgaccacttcgaaccacgggtggttttccagcagcgtgataaaacgctgaccgaccataccggtggcgccgagaatgccgactttcaacttttcggacataacaaccttctgggtttgacggattgatttcacgttcgggcagccgtagcgaaatggccacacgtatccatcaatcttacgaatcgggcggaacaagaagaaccgggtgcccgtatgctgggccggatcgccggtgcgacgggacgccggaaccggctggaacgtcacggcaccgccccgccgcgatgctctacactgggagtcatgtcgaaggcgtcggtagaagcgcagcgccagttggaccgcatcgtggcattggggtacccggacgtggcggatgtgagcgccgcggcgttccgctccctggcccgtccgctgatcgaggcgctggagcataccgattttgacgagcgcatcctgctggcgcccacgcgcgagctggtgtcgcccgaatcgctgatttcccgtacgtcgatcaaccgcatggccggtttcgccacgatgccgccgcgcgacatcgcgagctttttgccgcaggacggcttcgagccgcccgagggaccgttctacatcgtcgtggaaccgcgcaccggtaccaagtacacacaaaccgcgagcccgacgtggcccgcaagctcattgactccgacgagcgcattccgttcacgctcgaggagggattggccatcgccacgcagcatccgggctggcttcaggagaaaaacgggttcaacctgctgggctcgcgcagcgccgacggccgcgtgcccagcatctggctgagccagaacgccccgaggctcggtgcggtgtggccgaattccaagcacacgtggcttggcaacgcattctgcatggcccgcaggggcgtctcgctgttccgttagtgagcggattgcgcggcttgtcggggccgtgccgcttgcccgctgacttgttgcccccgttgtctatttgaaagtgcgacaccctttagattggagattgtccagataaccagtgaaggggtgtcgcgccttgggtcaagtgtattcgcacctgtcggaagaggaacggcggatcatccggatagagatcggcaacgggacgagcatacggcggatcgccggcctgatcggcagacacgcctccacggtcagccgcggaatcaaacgcaacacatggttcccgtccaacgagaacgaatcctaccggccgtaccggccggagcgtctcaagacggggccgtggaccggccggagccacatctccggccccgcgcaccggaaggccggacgccgccgcgccaggaccggcgtcacgcacgacaacggcaccgagttcgcccgccacgcggaactgcgcgaacggctcggcatggccgcctacttcaccgccccgtacccgtcgtgccggcgcggcggcaacgagaaccgcaacggcgcgatccgccgctacctgcccaagcgcacgcgcgtcgacccgtccatggccgacgagatacaggccatcgtggacgagaccgacaaccgtcccatgcgcgtgctcggctaccgcaccccggccgaggcattcgccgacgaactgctatcattaaccgaacaacaaggatgttgcacttctaaatagacaacgcgagcgacgaattctcgcgtaacgtgtgctacgatggaaggctcccttcggggagccttcgttgtgcttgcgttgttcttcggtccaacttttcgacatgcgtatacgttgttgatagcgacaattgcggaaaacgcttacagtatgatgtgcacacggacaacaagccgatgattgcaaggagcggtgacgacgatgacatccacagaacacaatacgcgagccgacatgttggcccacatgggcagccttcagcaggccgcctacgtgcgcccgatcgagtaccaggagggccgtgcccacggcctcaaggccatcgaggtgaagaacggcccgctacgcttcgtatccatggccgaccgcgccctcgacgtctgccagttcgaataccgcggcgagaacctcaccttcctgtccaagccgggcctgaacggccgcaaccagttcgacaccaacgggctggaggcgcagcgctccatcatgggcggcctgttcttcacctgcggcttcgagaacatctgcgcgccgtacgtcacgcctgagggcggcaagtacccggccggcagcttcccgatgcacggccgcatccgcaccacgccggccgagcatgtgggctccgacgcccactggaccgccgaaggcgactacgtgctcgaggtctccggcgaaatgcgcgaggccgaactgttcggcgagaatctggtgatgcgccgcaagatcaccagcgtgtacggccagccgtcgatcacggtcgaggatgaggtgaccaacgaatccttccgcgacgagccgctgatgtggatgtaccactgcaacttcggctggccgttgctcgccgaaggcgccgaagtcgtgatccccagccgcaaggccaccccgcgtgacgagaccaccgcagccgacaccacgccgtggaacgaaatccaagcacccgaggcgaaccgccccgaaagcgtgtacctgcacgagctcgccgccgacgagaacggccgcagcttcgccgccgtggtcaaccgcaagctcggacttggagtcgtcatcgacttcgacgccagcctcttcccatacttcatggaatggaagtcgatgggtgcgggcgactacgtggtcggcctcgaaccctcgaactccagcgtccacggccgcggctggcacgagcagcgcggcgacctgcacaccatcgccccgcagaccagcgaacgtaagtccctgaccttcaccgtcatcgaaggcgaggccgcgattgacgggctcatcgcccgccgcgacgccctgcttggctgaattgtgagataatatcggccgatatgtgaacggctgattagcgtggggagcatggttacccgggattcggaacagtatctgcgattcaaacgggagcacacgctgccctcgcatgaggcgattatggactggtatcgcggcaccggcatgcgtccgtatctgcaggcgcttgacgacgccggccgcaagaagttcgaggccgaagtgttctcccaagtccgcgaggaataccccacacagttggacggcagcatcatcttcccctttcccgcgtttcttcttcctcgcgactcggtagaagctcgccggattcgtgtactgggcggcgcgacctgtttcccgcgccgccagctgtgggttgacctcgctactgggcttgcggtgatgccgctggctgctgcgctgcttccgattgcgatggcatttgcatatgcggtgcgatgctggggagtgtgccgtcatgcatgcactgcttcaatatgaggtctcgctgggcgatgaggtcgtcttcgatctggtcacgcacgtcgcgcacggacgagaaatacaggtagaacgtggcgtgattgtagccggcgagttcggtgatctgacgcaccgagatcttctcgatcggcttggtttcatacagcttccagaacgcctccttaaggcgattgaccgtctgctgcgtaagttgcgggttcttcttgattgcgattcgcggtatggtgatttcgcataagacgcacaaccccatcgattcgtcggtcaaattcgtgaccttctcgatgcgatgctgtcgctggtggtcacgcaggacgtgctgttggaatcccagggaaccgcgcacgcggcgcaatcctcgggactgttcggcatcgggctcggcgtggtggccgtgatcatcggcctgtggatgttgctgagacgtaagtggacggcaacggaataggaatagtgacagcggaatagcgcgcgtgatattggtacgcgacgtatcgtaaaagcggctacaatgcttacggaaaaagtctttgcaacgagaaggaagacatgactgagcggcgtcgagcacggatgaggattcgtcgtcaacgaatttacgttgtacggcgcattgtggttgcggtatgcgcattgttgtgctgcgttcttgccgtcttctcgacgattgacgcccaacgggtgtggccccgcggtgagtcggtcgcacaggggcaggcagaggttcaggggcaggcgcagaaggtgagtcaatccgcgcaacagtcggcatcgcgagtgtctgcatcggcctcatccttggaccgccagcaggtaccggtctttaaccaggcgattcaggagcagcgtgacaaggaagcgcaacgtgcgcgatggacgaatcccaccggcaagcagcctgatttgtcgcaatactccgatctcagcgtgaaagtcagtatcgccaagcaggaagtgtatgtgcaatccggcggtgagaccatctacacgatgatcgccagcaccgggctcaacgatacgaccccgcgcggcaactatgttatcgggatgagaggcgatcacttctacaatcccgcagaaggcatgggtgctgattattgggtgcgattcaacggcccgttcctcttccactcggtgccgaccggggcgaactccggcgagtatatggaagaggaaggcaacaagctcggtcagccggcctcacatggttgcgtgcgactcactgtggccgatgccgaatggttctacaaccaaattccggaaggcacgccggtcaccatcgcctgaggcttggcctgagatcgatactgaggctatcgtgctttaggcgtctgatattggtcgtcggtagtgaagcaggtgcgatagaccatggccatgatcagaccgtcggccagcaaggtcagcgcggcgatggcgccgaagaccacgaactggtatttggcggcgttcagcggatctccgccggctatcacctggcccgccatcatgcccgggatggtcacgatgccgctggaggccagcgaagcggtggtgggcaacagtcccagccgaatcgacgagatgatggatgggcgggcggactcccatgccgtcgcccccaaggccagcatcatatccacctcgtcgcggcgttcctccatgctttcatagaatcggctcagcccgacagcgagcgcggaaacggtgttgcctagcagcatgccggtcaggggcaccaccagctggggcgcataccacgggtgtgggcgcacgatgagttcggtgaccaacgccagcatgagcagcatcgtgatgaccaggctcaggaagatcggtccggcaagacctttggggatgccgcgcgcgcgggatatcacgatctgcaccgccgcgaccagcatgaccgtcatcagagcgaacaccatccacacgctgttcgaacgaatcacgtagctgatgatgaatcccatggcgcacagctgcacgagggcgcggcatgccgaccacatcagggtcctgccgatgcccatgtgcatgagttcgctgacgatggccgccacggccaccatgcccaacgccagaacaagaccccaggtgtcgatgtcgtaggcgccgttcatgggcgcacctccttatcccgcgtcagatcggtgagccgtcccgcatcgagcatcagcgtgcgggtggcgcgtccgtccggcggacggtgtcggatgcggatgatcgccatgccgtgtgcggccgcgtccgccatgatcgcggccactttggacgcgttgtcgtcgtcgagtccggcatccacctcatcggccagcagcaccttcgggtcggtaagcagcgtgcgggccaacgccacgcgcgccgcctgaccgcccgacaggtcgtgcggggcgcgcgccaggtcgatgtcctcgcagcccatcgcgtccaacgtcgtgcggatgcgctcgtcgggcagcagctgctcggccttgccgcccttgccgcgaatcgcgagcgtccagggcaggcggatcgcctcggccacgtccttgccggtcagtatcggtttttgcggcaggtaggagacgtcccgccgccactgctgtgcgctgaattcgtcactgcccacgccgtcgaggacgaacgtgccgtgtgcgtgtgggttgagtcgggcgcatgcggtcagcagactcgatttgccggagccggacggacccaccagatcgatgatgtcgccgcgttccatgctgaaggacaggttgtcgaacaccgtgcgttcgtcgtctgccggcgattgcgcggggacgacgcaggatacggatatggcttcgaagaaggatcgcatattcatccagtctagtcgggggccacgtgggaaaccccagcgttcacttcctgtatacccggtgtggcataatagccaaggcaatttttgggctttgcctaagctagtttgaatttgaaataggtgaaaaacgtggcacagactactaacgacatcaagaacggatccgtcctgaacctggacggccagctgtggaccgtcatgaagttccagcacgtcaagccgggcaagggccccgccttcgtacgcaccaccatcaagaacgtgctctccggcaagatcgtcgacaagaccttcaacgcaggcatgaagatggaattcgagaccgtcgacaaccgcaccctccagtactcctacgaggacggcgacaacttcgtgttcatggacatgaccacctacgaccagatcatggtcccgaagaccctcgtgggcgacaaggccaagttcatgctcgaaggcaccgactgcctggtctccttccacgacggcaccccgctgagcgttgacctgccgggctccgtggtcctgaccatcacccacaccgagccgggcctgcagggcaaccgctccaacgccggcaccaagccggccaccgttgagaccggagccgagattcaggtcccgctgttcatcaatgagggcgaccgcgtcaagatcaacaccgaggatggttcctacaccggccgcgagaacaactgatctccgcatcctcaacagacgaccgaccgtataaaggactaggacagcagcagtatggcacgttccaccgcgcgcaaaagggctctgaacaccctgtacgaagccgacgaaaaaagtcaggatattctcgccctgcttgacgagcgcatcgcacatcccggtgcccagaccccgcttcccgactatgccattgaaatcgtcaagggcgtggccgagcaccgtcgtcagatcgacatgaccctggacgaacactccacgggttggaaggtccgccgtatgggcgtggtcgatcgcaacattctgcgtatcgccgcttgggagattctgttcaacgatgatgtgccggacaaggtcgccatcgacgaggctctggcattggccaagaccctgtgcgatgacgattcgcccgctttcatccatggcctgctgtctgcggtgtgcaccgccaagaacgcagcaccggcaccggagtccgtgacggaagaggccgatgaggaatcgtccgattccgatgccgccgcatccgagccgaccgatgagggcgatgtttccgattcgcccgattcgtccggtgcatccgacgagcccgctgccccgtccgctgagattcagccgacggtcgattagtcatttgttgttcagcctccccattcgggaggctttttcatgggcggacacttgtgtcgccacacattctcaagtcggcaccttgccgacagccccgccagcggggtgagactttgcgcccaacggcgtgtgagtctgcgctggccgttaaccttggtacgaatacccgaaaaacataagggggttttggtgagccagaacgagtccgggaccatcgcaattccgatgtatgacaaggacgatgcagtcctcgttttggaagacggacaggtatatgtgggggagccgtacggcgccctcggtgagacgaccggtgagatcgtcttcgccaccggtatgaccggataccaggagacgctcaccgatccgagctacgatcgccagatcgttgtgcagacgttcccgcacatcggcgataccggcgtcaacagcgaagaccctgagtcctcccgcatctgggttgccggatacattgtgcgtgatccctctccgaacgtgagcaactggcgtgccgaaggcagccttgatgacgacctcgccaagaacggcatcgtcggcctgagccacatcgacacccgcaagctggtgcgtcacctgcgttccgcaggcgtgatgcgcgccggcatcttctccggcgacgccctgaccgaccaggccaccggcgcgctcaagaccatcgagcagctgctcgaagacgtcaagaacacaccgcagatgcagggcctgagcctgtacgacgaagtgtccaccaagcaggcctacaccatcgagccatgcggcgagtacgaaggcaaggagccgctgtacaccgtggccgctgtggacctcggtatcaagggcatgaccccgcaccgcatggccgaacgcggctgccgcgtgcacgtggtgccctccaccatcaccttcgccgaaatcgagaacctgaacccggacggcgtcttcttctccaacggcccgggcgacccggaacaggccggccccgaaatcgagctgctgcgccaggtgctcgacgccggctacccgttcttcggcatctgctttggcaaccagctgctcggccgcgcactcggcttcggcacctacaagctcaagttcggccaccgcggcatcaaccagccggtcaaggatctgaccaccggcaaggtcgaggtcaccgcccacaaccacggcttcgcggtcgacgccccgatcggcaagcaggtcgacgcgccgtttgagaacggcaagtacggcaaggtgttcgtctcccacatcgatttgaacgacgacgtggtcgaaggcctgcagtgcgtggacatccccgcattctccgtgcagtaccacccggaggccgcagcaggcccgcatgatgcggcctacctgttcgaccgtttctgcgaacttatgaagaacaactccaaggaaggtaagtgatatgccgaagcgcaccgacatcaaatccgtgatggtcatcggctccggcccgatcgtgatcggtcaggctgcggagttcgattactcgggcacccaggcatgccgcgtccttcgtgaggaaggcatccgcgtcatcctcgtcaactccaacccggccaccatcatgaccgacccggagatggccgacgccacctacatcgagccgatcgccactccgatcctcgagcagatcatcgccaaggaacgccccgacgcgcttctgcccaccctgggcggccagaccgcactcaacgccgccatggcgctgggcgaggccggcgtcctgaagaagtacgacgtcgaactgatcggtgcctccctggaagccatcgaccgtggcgaggaccgtgaactgttcaagaaggtcgtcgacgaggccggcgccgaatccgcccgctccgatatcgcccacagcatcgaggaagtcgacaagatcgccgagaagttcggctacccgctggttgtgcgcccgagcttcaccatgggcggcctgggctccggcatcgcccacaacgaggaggagctgcaccgcatcgccggcgccggcatccattactcgcccaccgacgaagtcctgatcgaagagggcatcgagggctggaaggaattcgagctcgagctcatgcgcgaccgcaacgacaacgtcgtggtcgtctgcccgatcgagaacgtcgacccggtcggcgtgcacaccggtgactccatcaccgtggccccctgcttcaccctgaccgaccgcgaataccagaagctgcgtgacatcggcatcgccatcatccgcggcgtgggcgtggacaccggcggctgcaacatccagttcgccgttcatccgaagaccggccgcatcatcgtcatcgagatgaacccgcgcgtctcccgttcctccgcactggcctccaaggccaccggcttcccgatcgccaagatcgccaccaagctggccctcggctacacgctcgacgagattcgcaacgacatcacccagtccacgccagcctcattcgagccgaccatcgactatgtggtcaccaaggtgccgcgcttcgccttcgagaagttcccgggcgccgaccccaccctgaccacctccatgaagtccgtgggcgaggccatggccctggccggcaacttccaggagtccctcggcaaggccatgcgttccatcgacaagcgccacatgggcttcaactgggatggcgagaagccgtccgccgaggaagtggccgaactgcttgaggccatccacaccccgaccgaacaccgttacctgcagctcatgcgcgccatctggggcggcgccacgctggagcaggtgttcgcggccaccaagatcgacccgtggttcctgaagcagatcttcctcatcaacgagaccgccatgacggtgcgcgaggccgaaaccctcaccccgaagctgctcaagaaggccaagctcgccggtctgtccgacgtgcaggtggcccacctgcgtggcttgggcgatgaaggcgagaacaccatccgcgagctgcgctggacctacggcctgcgcccggtctacaagaccgtcgacacctgcgccgccgagttcgacgccgccacgccgtactactacagctgctacgccgacgaaaccgagctgcgcccgcgcgagcgcgaggccgtgatcatcctcggctccggcccgaatcgcatcggccagggcatcgagttcgactacacgtgcgtgcacgccgtgcaggagcttggcaaggactatgacaccatcatggtcaactgcaacccggagaccgtctccaccgattacgacatgtccgaccgcctctacttcgagccgctcaccttcgaagacgtgctcgagatctacgaggccgagaagaagatgggcccggtcaagggcgtcatcgtccagctcggcggccagaccccgctgtccttggccgcgcgtctgaaggccgccggcgtgccgattctcggcaccaccccggaatccatcgatctggccgagaaccgtgagctgttcggcgaggtgctcaagaaggcggagatgaacgccccgcgttacggcaccgccctgagcctcgaagaggccatggacgctgcccaccgcatcggatacccggtgctcgtgcgcccgagctacgtgcttggcggccgcggcatggaaatcgtctacgacgacaagcagctcggcaagtacgtggaccgcgcgcttgccgaggccaaggccgataccgtggtctccggccgcctgccctccccgctgctcatcgacaagttcctgcaggacgccatcgaaatcgacgtcgacgccctgttcgacggcgaggaactgtacatcggcggcattatggagcacgtcgaggaggccggcgtccactccggtgacgccgcctgcaccctgcccccgtccaccctgtcagacgaccagatccgccgcctgcgcgaaggcacctacgccatcgccaagggctgccacgtgcagggcctgatcaacgtgcagtacgccttcatggccaacacgctgtacgtgatcgaagccaacccgcgcgcctcccgtaccgtgccgttcgcctccaaggccaccggcgtggcgctggccaaggccgccgcccgcatcatggccggcgagaccatcgccgaccagcgcgccaacggtctgctgctgcccaagggcgacggcggcgacatccaccccggccagcaggtcgcggtcaaggaatccgtgctgccgttcaagcgcttccgcaccccggtgggcaagaccgtcgacatcctgctcggacctgagatgcgctccaccggcgaggtcatgggcttcgaccgcgacttcccgcacgccttcgccaagagccagctcgccgcctacgatggtggcctgccgacccacggcaacgtgttcatttccgtgaacgacaccgacaagcgtcagctgccgctgctcgccgtgcgcctcgaagagcttggattcaagctctgggccaccgagggcaccgcctccgtgcttcgccgttacggcatcgagtcgaacatcgtggacaagatcagcacccgcgtggacaccgatccggaagccccggtcgaggtgcatcacgccgccggctccgtgggcaagaacgtggttcagctcattgaggaaggcaagatcgacatgatcctcaacacgccgaactcgcgcggctcccgttccgacggctactccatccgtgccgccgccattgccgccgatctgccgcagttcaccaccatcaccgagttccaggccgcactgctggctatcgaggccgtgaagcataatgattatcagatcatgagcattcaggagcattcgaagcagctgttcgaattggagcgacgggagttctgatgactacacccagcagtgaggaattgcaggcacaacgttcggatttcggtctgcgactgagcaattcaatggccaaatacggaccgctgtgtgtgggcattgacccacatcgcaagctcctcaccgactggggatacaacgtcgacgccgaaggcgccgaactcttctccatgcgtatgctgcaggccgccaacgggcgcgccgcagcagtcaaattccagacgtcgatgttcgagcgctacggagccaaaggtttcgaagcgctcgagcgcgtgctctacgcggcacgacaaatgggcgtcatcaccatcgtggactgcctgcacggcggcctgtccaccacgatttccgccatcgcagacgcctatttcaagcccggtgcaccgttgctggccgacgccatcacgctgctgccgtactatggcgcgcgctcgttgaacggcttgattaccgaagcgttggaaaacggacgcggcgtgttcatcgcctccctgacttccaatccggaaggcatgagtctgcagaccgcgttgcgccagagcggcgattacaagggacgtaccgtggcctacggcatcgcctccaccgcgcagaagcataacgtggatatcgaaggcatgggctcggtgggtctgatcatcggtgccaccatcggccaatggatgcaggattccggcgtggacccctccaagttcaccggtccgattctttcccccggttacggttggcagggtgccgaggccaaggatctgaaaaccgtgttccgcggtacgcgcggcaacgtgctggttaccgtgtcccgctttatcgcctcgcatgggccggatatcgccgcactgagccaagctaccgagtcgattgcgcttgacgtacgtcagtcgctgatggaagccactgccgaaggcgcagaaaaccagtaatcagaacggaatcagatgtcgcggcatgcgtacgtatctatctcattgcatacgtcgcatcacgattcatattcttccctgttcgtcggggctgtaacagttaccggtcatctcgccggtgagccgttaccacattggattcataatcgctgcacaccacatcatctccggaggaacccatgactgaaaacacccatgccggccgtctaatcgtcctgactggccctaccgcagtaggtaagggcaccgtggaagccaagctgcgcgccgaccaccccgaagtgtgggtgtccgtctccgccaccacgcgtgccccgcgccccggcgaggttgatggcgtcaactactggttcctcaccgaagacgagttcctgacccgcgaagcggcgggggagttcctggaaaccgccgtggtgcacggcatggcccactacggtacattgctcaagcctgttgaggagcatctggctgccggcatgccaacgattctggaaatcgatttgcagggtgctcgccgcgtcaagcagcgcgccgccgaactcgacttggaagtggtgtacgtgttcatcgcgccgccgagcttcgaagagctcaagcgccgtctgatcggccgcggcaccgaaaccgccgaacagcaggcccgacgcttggaaaccgccaaagtggagctcgccgccgaaagcgaattcgacgtcaccatcgtcaacgaaaccgtcgatcaggccgccgccgacctctggtccgtcatcgccaaagaatacgggctgtaacgtgtgcgaataggttctgttcgtactgagatgtccatgcttggcatggcgtgctcatgtgattatgcgtgttcagtccctgccagtcggccctcacaatagggggagagcctgacggcagggactgattcataccgatacaaaggggcatgcgccaccattgttgcgtcaatcgtttgatgcgaaaatggtggcagaggcggcgattgccgtgttgggggatgaaatctcaggattggcggaattccgaggattctgagttgtggttgtgtgtccccatttgtgcgtcaaccgtttgatatgcaaatgggggcacatgcatgtgtgcgccatcttccaaaaacgtcgaattatgcaaatggggggcacgaataggtgtcggcgtgatgtggtgtggtgcgatgctgcaggtgcggtgtgacatggtgtgggatgccagcggatttcgggtgtttttcctctggcgtcccacagaacctgatgtacggtgtcgtcaccggtttgtgggattggcagaattccaatggttctgtggaatggggtgtgggatgccagccgtgtgcatcgtttgacgtgcgtggcgtcccgcacggttgcgggacgccggccccaaattggccgctaaccgtgtggtatcccgcatttctccgatatgcgagaggaatccgtccactataaggtctctagcccagcgactaatagttttcctctatgtgcgaataatacgggctgtaactaccgctttaccactagctgctggtggagaatttcggtgctgtttctggccggcgcctgcttccaacggattgcttcggattcgtgatgctcggtgacataatgccgcatccattcgaagcactgctgggtctggatggcatcgcttaatgcgcggtgttcctcattgtccgcgatgccgaagcgcacgatcaggtcagccagacggtgatgccgctgcgcggggaacagggcgcggctgatctgcatcgtgtcataatccgcgcaggcaaagccgcagccggcgatatgccgggtgttataatccaggaatcgcagatcgaagctgacgttatgaccgacaatcggctcaacggtgggaccggcagccggggtagcgagccatgcgatgaatcggggaagcacctcgtcaatcggatcgaggtcggccaccatcgcatcggtgatgccggtcagcgtggtgatctgacgcggaatcggccgcaagggattcaccagctgctggaattgatcgacgatatgcccctcccgcacgcgcacggcaccgatttccgtgatggcgcaactgttcgggtaaaagccggtggtctccagatccagcgccacataatcggtgggaaagagggcatcgtccatggcgattcgcccgccggcaccatgattgggctgggatggttggccgaaaacggtaatgccggaagtggtcacggaggctcctcatatcagtcggtgttcggtgacttattgtaccggcagcccggtctgacggtaaaatttttccctcccggattttctcggatatattggttaggcggccggcaacatgcggcgcatcgggaagggagcacagctgatgaaacagatagtggcaggcatcgtggcgcatgtggacgcgggcaagaccacgctgtccgaggcgctgctctaccgtaccggtgagatccgcaaattggggcgagtggatcacggcgatgcgtttctggacaccaattccttggagaaggcgcgaggcatcacgattttcgcgcaccaggcattggtggaacacggcgacctgcgcctgaccttgctggatacgccggggcacgtggacttcgcagccgaaaccgaacgtgtgctgcgtgtgcttgactacgcgattcttgtggtctccggcacggatggcgtgcaaggccataccgagacactatggcgtctgctggccagatacggtgtgccgacgttcatcttcgtcaacaagtgcgacgccgccggatttgcccgcgaggccgtgttggctcagttgcgcaggcgtctgagcgatgcgatatatccgttgccggcaatggaacagtccactgagggcagcgcgctaccgttggacgcgttcgccgaagacatcgccaccctggacgaggaggcgatgaacgactatttggaacatggcgcgctgtccgtgggcagattgcgatcgatgatcgccgtacgcgagctgttccccgtatatttcggctcggcattgaaactcgaaggggtcaaggagttcctggacgggctggagacgttcacccgcgaacgtgaatggccggccgccttcgccgcacgcgtgttcaaaatcgcccacgacggccagcacaaccgtatgacgtggctgcgcgtcaccggcggtgcgctcaaagccaaggagatcgtctcctcatcctcgtgcgccgcggcgtcgacaccgtcgccagcgcaggaggatgatgacatggcgtggtccgagaaagtcgatcaggtgcgcatctacaatggcgccaaattcgagacggtcaccgaagtgccggccggctcggtatgcgcggtgaccggactgacgcggaccttccccggcgaagggctgggaacggaaccggacgccgaatcgccgtcgttgcaacccgtgttgacctacacggtgttgcccgtcggagcggaatccgatacggccggcacctcgggagcggccaaacgtgggggagccggccatgacagcgtgaatcgggacgatgccgagcatgatgccgccaagtcgggaaccggccgcaatgaggagaacgacaccgccggccagaccgcggcggacaatagctcgccggcccgtccccagttcgatgatctgaccttgcacaaggtcatcaccgcattgcgtgagctggaagacgaagacccgttgttgcatgtggtgtgggtggaacggctggccgagattcatgtgcaattgatgggcgcggtccagctggaaatcatccagcagaccctgcacgaccggttcggtctggatgtgtcctttggccccggctccatcctgtaccgtgagaccatcactgcgccgatcgaaggcgcaggtcatttcgagccgctccgtcattatgccgaagcacatatcctgctggaaccaggggagccgggcagcggagtcactgtggcctcggccctgtccgaaaatgatttggaccgcaattggcaacggctgattctgacccacctgaccgagcgtgagcatctcggtgtgctcgttggcgcaccgctcaccgatatcaagatgactttggtggccggccgcgcgcatctgaagcacaccgaaggcggcgacttccgtcaagccacgtaccgggcgattcgccaagggctgatggaagccagggcaggagtcagtggccggcccgagacgccggtcgagagccggccggacaccacaggggagggcaactgccgactgctggaaccgtggtaccggttccggctcgaagtgcccgcagacatgatcggccgtgccatgagcgacatccagcgcatggccggcagcttcgaatccccggtcaccgatgacgaatacgccgtgatcgaaggcgaggcgccggtgtccgaaatgcgcgactatgcgatggacgtgaaccagtacacgcacggccatggccgtttctccgccaccttcggcggctacaagccatgccatgacgccgaacaggtcatcgcagccgccgcctacgatcccgaagctgatctggacaacacccccgactcggtcttctgcgcccacggtgccggctaccccgtcaaatggtacaaagtccccgaattcgcccacgtagactacgtcatgtgaggtggtgactaccaaatctgcgaccgaatgaatccgttggcctccaagaaccgttgaatatcgcgcatttccggcatattgatcgaatgggccatgcccggatacacttgttcggtcaacgtgccgtgctcgcgccagaactcacccatcgccgtcacatcggctttcgggaagatgtcgtccgcagcaccatgcccgtagaacacgggcggcttcaacgaagccaattcggcatcgcccgcaacggaccccggtgccagccatccagagcaggagacggctgcggcatatcgcttcggattgaaacgcagcagatgcgcggccaagaggccgccctgcgagaatcccatggcaaccaccggccgagtggcgggaatatgctccgcgacccatgaatcaatggcttgggcggcctcagccgcctgcttgtccaacgattcgccctccggcacaccttcatgcgcccacgcaccgaaccatgtatatcccatgccataggcgatgggtgcctgcaaactggcataatcagccgaaccggcaccgcaatagttcagcagatcgggcaaatcgtattcattggaaccccagccgtgcaacagcacgaacaccggggtggtttcaggaccggtcaaacgggtcaaggccttggcaatcttcatggctcccagtgtagccacgtgaccgccgcgaccgcatttgaacggtccataagcaacccatatagcaacgccgttccattcaagtgtccgatacgttatcgtcgtagacgtgccgcacggggaac

SEQ ID NO: 2510 - DNA, 4994 bp, Unknown
  R50_10m  MAG No. k141_23732
gaacgggctcggttttgatcgcggctataccacagttgcaattggaatccgtcgttggatgacaattgatgctccaatgttgttttcagtgtttgggattgccgccatttgaagttcgtaacgttcaaactggcagagctgagagcgagaacgatgattgccatgatgcagccggaagccatgagaaaacgtaaagggcgctttccttggattaatttgagtgcgttcggcaccagaacccttactagagcaatcgacaatgacaatgcaaccaatgccatgcactttgtggcgatgatgatggagaggaatacctgaccggcgaatcctaagggagaagcgaaaggccagaagatcgcaccaatggaaatccaagtcatccatccgatgcagacgcagatgatgaaaaagaacgcatgccgcaggaattgcctcataataatgccggttgttctcatgccatgcaaggcttgtatcgcgcaaacgcgtgaagctgtcgacacggaaagcgcgccggacacaaatactacagcaagtccggcgaatatgacttgggcgatggaattggagaagaattgtttggtgatttgtgtgatgccgatgggggttgctctgttaagttcgaatccttggcgccgtatggatttggctactgaagcggtatcccgtggtgatccatagagaagccatcttcccaatgggtcggtgaatctgtctccgcgttgcacacgtgtgcgcggcccgaacccataatccgggtatggcgaattcgcatgcatgccgttgccgtctaatgcgccgaaaatagaaattacgcgtctgttggtaccgtgaccgtccggctcataggagactctcgcgagtccgacatgatgggtcgctgcgagaccggtcaatgtcgatagagtctgcccgtgcgcgtcggaaattccaatatcgtagctagggccggagggataggtttcttcgttattctgcgcatagaatcctgctgcgagagtgatgagagccacggccaatatactggcgattttataagtccagtgcatgatacaccttattcccggtaacaatgtgtttgtgcggcggacgataggaagttcgctcgccgcacattattgcgcggctgttttgccgcatataacacggtaagacgccaatgaggagcgaacgaagtctgtgtgacgggaatcgtcacagtgttacgatttcgtttgacggaggcgatttggggagggggtacttatgaagaacgggcgcctgattcggcttgccttggtggacaacgatcgttgctctgcggagatgatggctttgcttattggcaggacgattcccgaggcgcatatgctatgggttacggataatcccagtcttgccttggaacgttgtctgttcgatccgcggaagccggacatccttatttgcgatctcatgatggacgggctgaacggagtgcggctgacggaacgtattcgacagcggaacgtgcaggttggcgtcatcgtagtcacttcgtatgacctggcaacctatggtgaggatatcgcgtgttgcggagcccaagcgttgatttcgaaaagagatttcgcagcgaccatacgcgaggcggtcaaatcggtgtttgacgggggaacataccctcatggttggggtttgcatagccttgaagagacattgcatacggtggatgccgcacagccggaagcggatggtgccaggctcttctccgatcgagagctggcggtgttgcgtctctatgcacatcgtgtaccgaccgttgaaattgcgcgccgcttgggaatcggtgtcgaaactgtgtacagctatgtgaaacgagccatgcgcaaggtcggggtgacgaggcgcggcgaactccttgattactgtgagcgataccatgttctgtgacggcagccgttttcttagacgtcgcttccgcgatttcgggaagtcttggcatggcgagaagatcgcggcgctagcctgcgccttgtgcatagccgctgatacggtcatcgaatcgtgtatcaatccggtttgggatgcgtgggccctgtgggtgggtctgttgttcgtcatcctgtcgttgctctgcgtggcattcccgttcggcggcaatatcgcgttggcgatctcatggtgcgtggtgttccccttgccggtggatctgtccatgtcggtgagcgtggtgatagccgagccattaatcgtcctctcctatcaacgcatatggtgcggcgtggtgttggcggtggctgtgaccgtatctcgcgtggcgcagctgatatggcagtatgggttgccgatgggttgggatgccggggcgttggtgtccgttgtgccttggaccgtcatgccggcgttggcgtgcgttggaatcggtctgctgctgaattggcatcatcgtgagggggagagggagtcggaagcgcgtggcagggccgaatcgttggatttggcggcaaggttgcatgatgcgacgaccaatgatctctcatatctcatcatgagcatcgacaggatcatgtcggaacacccttcgcaaggagagtcgatggacttgccactgttgcgcgaagtggctcaacgggcgctcgatcagacgcatgatgtcatagcggttctcgcaaagcacaatgtcggtactgcgcgaatcccgcgatgccatgcgcgtcgctccggagaagccattgttccgatcggtgcaggtcgattcgaggccgagatcgaacggcgccggcgggaactcgcaacgcttggtttccgaggcgaggtggttgtgtccgatcccttcgatctcctgagtcggtttgacgagaagactatccagttgacgcggtcgttgctggaagagacgtttgccaatatcgccaagcacgcggatcgcgaacaagggtatgtactcgccatacaagtgcggcaagacggactgtacgtatcggtggctgacgttcccgccaagatggcggatggagcattggcggaatctccgagaacattgggcatgggatttggaatgtctcatctgtgtcaatcaattacgcggagcggtggttggctgcgcgtccaagaggaagacgggtattggagttgcctagcgtatattccgatatatcatcgggatacagcgtgaatcggaaggaaacagcgcatgggattcaacatcgaacgtgtggacaagccgtttgtggtcaaatcgccgtaccgaccatccggagaccagccgaaggccatcgaggaactggccacgcgcatcgagaacggcgagaacgacgtggtgctcatgggcgccaccggcaccggcaaaaccgccaccaccgcatggctgatcgaacggctgcaacgtcccacgctcatcatcgagccgaacaagacgctcgccgcgcagctgtgcgccgaattccgcgagctcatgcccgacaacgcggtgagctatttcgtttcctactacgactactatcagccggaggcctacataccgcagaccgacacctatatcgagaaagactccaacatcaacgatgatgtggagcgtttgcgccatcaggccacggccaacctgctgaccagacgcgactgcgtggtcgtggccaccgtctcctgcatctacggcctgggcactcctgaggaatacgccgggcgtatgctgtttctcaaggaaggccagcagatcaatcgcgacgacctgctgcgccggttcgtggctatgcagtacaagcgcaacgacatcgccttcacccgcggcacgttccgcgtgcggggcgatacggtcgaaatcatccccgtatacgaggaactggccatccgcatcgaattcttcggcgacgagatcgaccgcatctccaccctgcatccgctgaccggcgatgtgatcgcccatgaaccgcaggtccatatcttcccggcttcccactatgtggccgggccggagcgtatggaacgcgcgctcaaaaccatccgcgaggagcttgacggacggttgtccgaactgcgcaaacagggcaaggaacttgaggcgcagcgtctcgacatgcgcaccacctatgacctggagatgctcacccaggtgggcgtgtgctcgggcgtcgaaaactattcgcgccacttcgacggccgcgccgccggcaccccaccgcacacgctgctcgacttcttccccgatgacttcctgctggtcattgacgaatcacacgtcaccgtgccgcagatcggcgcgatgtacgagggcgatgcctcccgcaagcgcacgctggtcgaacacggcttccgtctgccctccgcgatggacaatcgaccactcaaatggccggaattcctgcagcgcgtcggccagaccgtgtacctgtccgccacgcccggcgactatgagttgggcttgtccgacggggtggtcgagcagatcatccgcccgaccggcctgctggacccgaagatcgacgtgcgcccggtcaaggggcagatcgacgatctgctcgccgagatcaaggcccgtgtggccaggaacgagcgtgcgctggtgaccaccctgaccaagaagatggccgaggatttgaccgactatctgctggaacgcggcatcaaggtcgaatacctgcattccgatgtggatacgctgcgccgcgtcgaactgctgcgcatgttgcgcgaaggcaagatcgatgtgattgtcggtatcaacctgctgcgtgagggcctcgatttgccggaagtatcgctggtggcgatcctcgacgccgacaaggaaggattcctgcgctcctaccgttcgctcatccagaccatcggccgtgccgcgcgaaacgtgtccggcgtggtgatcatgtacgccgacgagaccaccgaggccatgaggcaggcgatcgacgagaccgaccgccgccgcgccaagcagattgcctacaaccgggaacacggcatcgatcccaagcccctgatcaagaagatcagcgatgtcaacgatatgctcgccaaggaggatgtggacacccaga

SEQ ID NO: 2511 - DNA, 3049 bp, Unknown
  R50_10m  MAG No. k141_23954
cggttgcttcgccgccgcccagcagcacacgttcttcggcattgaccatctggggcgtgcctgcgcagtcgagacccttggcaacccggactgccatgtggtgttgcgcggctcgattcacggcccgaactacgatgccgagtccgtggccaaagccatggaagacgtacgcgccgaaatgcccgccgaatccgcagcctcgcacggtctgattgttgattgctcgcacggtaactccggcaaggacgagcatcgtcaggccgaagtcgtgcgcaatattgccagcagaattgcagctggcgaacagggtattaccggcatcatgatggaaagctttattgaagggggcaatcagaaggccgcgccgcttgatcagctggtctatggcaagtcgattaccgacaagtgcatcagctgggaagaaaccgaggccttgctgcgcgagcttgcggaagccgtggccacgcggcgttggcactgagttgcgtcatcggctctctcgggggggggcaatgtgacgaaacgtctgactacccctcagcccgccattcggcggccacctcccctgacatgggagtcgaaagcgttgtgaaaggaacttacatatgggtatgaaaactgtagctattattggcgcattggatgaagaagtggcactgatcgccaaatcgctcacgcatgtgacgcacaccgccaagggcagccttgacatcgtgtccggcacggtcgactccttcggttctgacgtcatcaaggttgccgcaacggtaggcggcatgggactggtcaatgcggccgccaccacgcagctgctgattgacgagttcgccccggacgtcgtgattttcagcggcatcgccggcaacctcaacacccacctgcacatcaacgacgtggtgctcggcggcaccctgcgctacctcgacactgacatgcggctcgtaggccagtggaagcccggcactgcggacgctccggtggaggaattccactctgatgaccgtctgctggaagttgccgacgaggcgcttgccaatgcgggcattacccacatcaccggcatcatcgcctctggcaactacttcgtggacacgccccaaaaggtcgaggaggtcatccgactcaccggggctgacgccgtggagatggaaggcgccgccgtggcacaggtcgccgcccgcaatgacgtgccggcactggtgattcgtgccctttccgacaacgccgacaccgattacgaggtattcaaggagttcgacatctccgagtacgccgataccgccgcccgtctggctgtcgacatcgtcaagcgcctgtagtcggcgggctggcccatctcaccatccacgttttgggtatgatgaccacaatatgagcgttttcaaactattgcttataacctgagccatactcggtgttcggcacagcgatgtgcggggttcatcgctggggccacaagccgtaccagttcttctcccgcatgccggtcgctgtgctcaattcgttaagcgacgacaacaccgtcgcgaagcattgaatacacaatgcgcacgctgcactggggtttatctgcagcatgaggagagaaaaaatgactgcaagcgcaaccgcggctgtgaccaaaccggtgaagaaggattcggttcctgagatcatcgccgcttccatggtcggtacggccatcgaattctacgacaactactgctattccattgccgctgctagctacttcggcatgatcttcttcacggacgtcgccaagtccaaccagaccctcgccacgctgatggccttcgtgaccttcgccgtttcgttcctcgcccgtccgttcggctccatgctgttcggccacttcggtgacaagctcggccgtaagaagacgctggttatcgccctgatgaccatgggtatcgccaccttcctggtcggctgcctgcccggttatgagcagattggcgcatggtccgtcgtgattctgtgcatctgccgtgcctgccagggcgtgggcctcgccggcgaatggtccggtgccgcgctggtcgccactgaaaacgctccggccgacaagcgcgccctgtacggttccttcccgaaccttggcgccccgattggcttcttctgcgcttacggcctgaacctgctactcgaatccaacctgagcaaggaacagatgattgccttcggctggcgtatcccgttcctgtgctccgccgtgctggtgatcattggcctgtacgtgcgtgcccgcatgtctgagaccccagtgttccagaaggccactgaagagaagcgcacctccaagcacccgctgcgcgacctgctgccgtactggaaggaagtcgtgctcggcaccgtagccatgggtatcacctataccctgttctacgtactcggcacttggtcgctggcctacggcgtcaagggcttgggcttccagcagggcgagtacctgctcatgcagatgtgctccgtggtgttcttcgccatcttcatcgtggtctcctgcgtgtacgccgacaaggtgggccgcaagaaggtcatgattgccgtgaccgccgccgccttggtgttcagcttcttcgtgccgatgctgctcgtgcactccgccgcccatatcatgatcttcctgtgcgtcggcttcatgatcatgggtggtttgttcggcccctgcggcgcctacctgcctgagctgttcccggtgcacgtgcgttactccggcgccggcctgagctacaacctcgccgccatcttcggtggcgcattcgctccgaccatcgcccaggccctggtcgcctccaagttcggcgttgccggtgtgggctggtacatggccatcatggccgccctcgctctgctcgctctgttcctgattaaggaaagcaaggacaaggactacgagctgtaactcgagctccccatattatgctcccgctggcgggagctgtccacgaaagcggactgagggtggccaatgggatttcggttctttgaccaccctcagtctcactgcgttcgacagctcccgccagcgggagcattttgttatgtc

SEQ ID NO: 2512 - DNA, 8904 bp, Unknown
  R50_10m  MAG No. k141_24000
atccccgcgcgtgcggggcaaaccctgcggtgatggtgatggaggtgtcgccctccggatcatccccgcgcgtgcggggcaaacctttccgcacaatacccggacgagctggtgttcggatcatccccgcgcgtgcggggcaaacgttacggcgaggccaatggcaccgtcacgatgcggatcatccccgcgcgtgcggggcaaacttggtgcctttttcacttcgcctttggtggttcggatcatccccgcgcgtgcggggcaaacttgacgatgtccgcctcgatgatgccgcgaatcggatcatccccgcgcgtgcggggcaaacgtattcaatacccccgccaatgcggagcatccatcagcagaagaactttcattcctccctatcaacggatcatccccgcgtatgcagggcaaactcagtcatgcaataataaaggtcggaaggccggtgccctccaccctttaaaccttttgctctggtggaaggttcccggcctttcgccagagcatccccacaggttcagagcacggcaccatcagatgacttgtgctcgcagaaatcttggccaacccaaaatctccgcgagcactaaatgcatcaaagcctcacgccttaacaacctccacgcccagctcggcgccctccttcacctcgaaggaggtggccagcgtctcgtgggcgatcagatccttgaactgctcgaccttggccacatcgacagccggcacggtcagcaccagcgagatacggtccgcgatgtccagatcggcagccttacgtgcgtcctgcacagaacgaatcacgtcgcgggcgtagccttcggccagcagatcggcatccagcgcggtgtcgaggatcacgaagccaccggtcggcagagcggcggagaccgaagcggcggcctcggtggcgttctcctcctccacgcggttgatcagctcgtactcgccttcgaccagcgcaaggtcgccggacggcgtggagaccaccggcgcaccggacgcagcatcgacatgccagtcgccggacttggaggccttgatggcgaactgcacctgcttgccgaggcgcggacccgccgcacgggcattcacacgcagctcgtgaacaatcttcagaccgtgggcggaggcgtcctccagagtcgagaactcaatattcttgatattaagttcggacttcagcagatcgtcgtacgccttgacggcgtccacgttctcggccaccacggtgagcttggaaagcggctggcgcacgcggatcttggcggccttgcgcagggacagggtgccggagacgacctcacgcaccttctccatcgcgtccaccaaggccggatcgtcgaccagcacacggccgagttcggtgtcttcaccggtcttctcgtccaccacgaacggccaatcggccaggtgcacggactcgccaccggtcagaccacgccacacggactcggcttccatcggggccagcggcgcaagcacgcgcatgaacgcctcaagcacggtgtacagcgtgttgaacgcggaagcgtcctcattccagaaacggtcacgggtgttgcggatataccagttggtgagcacgtcgatgaagtcggagaccgcatcgcaggcgtcggagattgcgaactcgttcagcgacttctcggcggccagcaccagacgacgggtacgggccagcaggtagcggtccatctccggcagatcggcgacctcgtccgcgcgcagctggcgagcgtcgaagccagccccaccgttggccgcattggcgtacagggtgaagaagtagtaggagctccacaccggcagcatgacctggcgcacggtgtcgcgaatgccttcggcggtgacgatcaggttgccgccacgcaggatcggcgaagacatgaggaaccagcgcatggcgtcggaaccgtacttgtcgaacacgccgttcacgtccgggtagttgcgcaggtgcttggacatcttctggccgtcggagccgagcacgatgccgtggcagatcacgttcttgaacgccgggcgatcgaacagggcggtcgccatcacgtgcagcaggtagaaccagccgcgggtctggccgatgtattccacgatgtagtcggccgggaagtgctgttcgaacttctccttgttctcgaacgggtagtggaactgcgcgaacgacatggaaccggactcgaaccagcagtcgagcacatcggaaatacggtgcatgtgcgacttgccggtcgggtcgtccgggttgacgcggaccaggttgtcgatccacggacggtgcatgttgatgttgccgtccttgtcgcgcggatagtcgccgaagtcggccttgagctcttcgagcgaaccgtagacgtccacacgcgggtacttcggatcgtcgctcacccacaccgggatcggggaaccccagaagcggttgcgggagatggaccagtcgcgcgcgttggcgagccacttgccgaactgaccgtccttgacattgcccgggatccagttgatctgctggttcaattccagtagacgcggcttgatcttggtcacggacacgaaccaggaggacaccggcttgtagatcaacggggtggcgcaacgccagcagtgcgggtaggagtgcacgtagctcttctcctggaagaggatcgcgcggcgctcttccggaatctcggcgagcgggccgtcgccggcgcgcaggttgcgcaggatcggcaggttggcgtcgaacacgaaatcgccctcgtagtcagggcactgcgcggtgaagcggcagccatcgtcgagcacgtcggtgctcttgatgtcgtgcgcgttcagcgtattcatatcgtcctcaccgtagggagcctggtgaaccaggccggtaccttcgacggtgtcgacgtagtcggcggtgaagatcgtgtagccgttcgggccgggcacgtggccttcggattcggcctcgtcacccgcgaagtacgggaagaccgggtagtagcgtcggcctgccagctcgttgcccttgagttcgcgcacgacctcgtaattctcgccgagttccttctcatagtgcggcagcaaatccttgccgaggtagaacttcttgccagcgaacttgccttcggtcgggcggacctcgacgtagtcgatgtcggcgccgaccacgatggcgaagttggtgggcacggtccacggggtggtggtccagaagacggcgtaggcgtcgtcctcatcgcgcatcttgacggccacggatacggtggtgtcctggcggtcctggtacacgtcggcgtccatgcgcagctcgtgcgcactcaacggcgtgcggtccttcgggcagtacggcagcacgcggtagccctggtaggccaggcccttgtcgtagagctgcttgaaggcccacatcacggattccatgtacgggatgttcagggtcttgtagccgtgctcgaagtccacccaacgggcctgacgatgcacgtagttctgccattcgttggtgtacttcagcacagaagcgcggcaggcgtcgttgaacttgtcgatgcccatcttctcgatctggtcgaccgagtcgatgccgagctccttctgcgcctcaagctcggcgggcaggccgtgggtgtcccagccgaacacgcggttgaccttgcggcccttcatggtctggtagcgcggtatcacgtccttggcgtagccggtcagcaggtggccgtagtgcggcaggccattggcgaacggcgggccatcgaagaacacgaattcgttctggctgtggtcgccggaagggttgcgttcaacggactgctggaaggtgtcgtccttgtcccagtagtcgagaacggtctcctccatgtcggggaagctggggttcggcgcgacgtgcgcggtctcgccgccctcgctcgccttgggatatacgttttcgctcaccgtaaatctcctgttagtactgtgcactggtcctacaggagcgtcattgatggcgattgccgggcgccgacgtgtgccggctggtttcacgaatgtcacgtaccgaaccgtgggccgattagtcaatcgcctcgcagccggaaccgactgtgttccgcccggaacagccatgtctgccgttcctgcctacgaggacgatgacgagcgctggtatgcgctccgcaccgcggtaccacctcgcttatcgcaccggttgcgccgctccgaactgttgcactcggagccgcgagcctgcgcgaccgcttgtgttcggctgtctcgggccgatcccgtcggttctactgggcgattgccgccgttcttccgaagactccccgctgataacggatcactgcctcacaacggtgcatatcctaacacgccacgcggtcaaatcgccgcccacggccacggcaccgtcaggagcccgatttagattgggaccggccaccacggaccgagaaaggattgtcggacaatgacgtatgatttcacgtccatcatgaacaggcatggcatggattcgatcgcggtcgacgggctgggcaccgacccgggattcgcgccggacccgccacgcgagggtttcgacgtcatccccatgtgggtggcggacatgaacttcccgaccgtgcccacgatcccgcaggccatcatcgaacgggcgaagcatcccgcctacgggtacttctcccccaccgacgactattacagctccatcatcgactggcagtccacgcgcaacggggtcaccggattgacccgggaggcgatcggctacgagaacggggtcctgggcggtgtgatcagtgcgctgaccgcgttcgccgcccccggcgacggagtgttgctgcatagcccgacctatatcgggttcacccggagcatcgaaaacaacggctaccgcatcgtccacagtccgctcacgctggacgagcgcggcgtatggcgcatggattacgaggatatggacaggaagctcaaggagcatcacatccacgtggccgtgttctgcagccctcacaatccttgcgggcgcgtgtgggaacgttgggaaatcgagaaggccatggaagtgtacaaggccaacgattgcgtggtcatttccgacgagatttggtccgatttgactctggggaaccaccagcacatccccacccaatcggtcagcgaggacgcacgcaacaggaccgtggcgttctacgcgcccagcaagaccttcaatctcgccggactggtgggaagctaccacatcatctacaatcccacactccgggaccgcatcgtggccaaaagctcgaaatgccactacaacgacatgaacgtgctttccatgcacgcgctgatcggcgcctaccggcccgaaggccatgagtggctcgacgaactgaaggcggtgctcaccggcaacgtcgattacgcctacgactacatcaccaagcatttccaaggagtgagtttggccaaaccggaaggcacctacatgctgctgctcgactgcgagcagtggtgcgaacgccacggcctgagcctgcccgagttggagaaacgcggctgggatgtgggcgtcgcatggcaggacggcagcatgttccaggctccctacagcatccgcgtcaatctcgcattgcccttgagccgcgtcaaggaggccatgcgccgccttgaccaatacgtattcaacgcgtaaacggcatgcatccgcgattgcggtgtcctggaaagacgaatgccgtcaacgaggttggtgcccgttggcggcattcgtcatacgttggccgaaccgggcgaaacccaagttgccgtgcgctatgaggtggatgccgccagcggacgtgtacatctgaccgcccgatatgccggtgccaccgatgcgccgacgctgccggcattcggattggaatggacacttcccaagcagtacgagaacctgcgcttctacggccttggccccgaggaaacctatcacgaccgtctgcacggtggcaagctcggcattttcgagcgcaccgcggccgaagacaatgcaccgtatctggtgccgcaggagaccggcaaccatgaagactggcgttgggccgaagtgcttgacgcccaaggacacggcatgcgtatcagccaggccggcagcgaacatttcgcggcgagcctgttgccgtacagctcgctcatgctggaagaggcgacccaccagaacgagttgccgccggtccgtcacacgttcctgcgcctgttggccgcgcaaatgggcgtgggcggagacgattcatggggcgcgcccgtccatgagcagtaccagctgcccgccgatcgcgcctacacgctcgacgtgaatctggaactgttctaacagcgataaagaagctccctctgacgagggagcttctttatcgcacagagggagcttctttatcgtgctggtacgaaactgtcacgcaccactagggtggtggagatgaaggtatggtggtgcagcgtgcgccgactggagatggcctcggcaagcatcgtaatcgcagtatcggccagctcattctggtcgatatcgtaactggtcaatgtcggcgaagtgtactgggcgatggcctggttattgatactgatcacactggtatcgcgaggcaccagcactcccgcagcggtaaacgcctgcagtacgccgactgcaatcgagtccgcagccacgatgaacgcatccggcatgtcatctcgatgatcgttaaccgcttcctcccctagagtgcgcccggtgtccacagtgaacgcgccttgcgcgtaaatcaggccttccgcatccagccccaaacgctcggtccaattgcggaatgcggttaatcggccatcttccggatattcgtgcaaacccatcgtgaagccagtaccgccgatatagccgatgcgtcgtttgcccgaggacaccaacatatccaatgcgtccaaaatggtttggcttaaatccggttgtaccgaatcgaacaggctgggcgcaggattggtgtcgatgaatacgccatagggcaataccagatggagcttcaacagtctatccgaagagagtacggacggtccgatggagatgaagccgtcgaaatcaccggcgtcggcaatcagatcgtcgatatgggaaaacgacgtgagttccatgtgctgggctctggcattgtcgccgagcacggaccgtagttcatcgaaataggcgtccgccagttcttcctcgcggatggcgttgtcgagtacggccacacggcgtggcaatgcgatacggcgtgatccggtagcgtagccaagctgctcgctgacctcgatgatgcgacgtcgcgtctcctctttgacagacaatgtcgggtccccattgagcagccgggataccgtggcctgcgagaagcctgatttctgtgcgatttccttcatcgtgaccatagttgagccttccacgcctcagtacgtaacaatacgcagtatttcagtaaataactttactacatagtgtaactcacgtcatgcgggtatgacgccgtatggttgcagcatcgtcgacccgcagcgctgatgagaacgtgcatgtttcaggccctccgataattatcgggcaggcgggaatccccagaccgtggagtcaatgcgctggattttcccggacttgtcaaagacaacggtgatgtccggcgcagtaaaactgccggtcgaatccccgaatcggtacggatcactccagtcgataacggcatgcatcgtcacggtccgagttttcgcgtcataggactcattcgagtactcgatactgttatgcgtggccgtagtcccgcccagaccgccgccattgccttgatgcatttgctgacaatacttcgtaaaatccgcgccgagaacattcgacactgcatagcgcctaaatgaacgtgttaggtctgcaccaattcacggctggcaatactccacacttctcagtaatcaattcgcaccaaaccgctcacgaatccgagcagcagtaccataagaggcttgcgcaccgatcccagtcgcggcgtacgcggaaacgtatgaggccaactgcgcactgtccgccaacgcatgacccgaggcaagtccggccagaaccgtgcccataaaggcatctccgcacccggtagtgtcgatggcctcaaccgcaactggcgcaatacgatagatatcatcaccatcgatgactaccgacccatccccgccaagcgtaattaccgcctgattaaagccgaagccatgcatctgccgcgccacatcagaccagtccagtccatcccaatcgtcatcgtcaggctcggcgatgtccagcagctgtgccatttcatgttcattgaccagcagaatgtccgaagcctcgataagttcagcgggtagttcagcaacgaatggcgaatcgttgagcaataccttgagcccggcatcatgacagaggcgagcacatgcggtgaccgtttccatcggactctccaaacacagtcccagcacatcagctgaggtcagattatcccgcatcgattgaatatactcaacactgacgtaagcgttagagccgggagaataaacaatcgtgttctctcctgccgcgtctacggtgatgaccgtggtcccgctggccccatccacgtgccgaatataactggtgtccacaccggtatcgttcaatgcttcaagcaaaaaatccgcattagcgtcggaaccgagcacaccaaacaatcggactttggctccaagacgagcggccgaaacagcctgattccccgacttgccaccaggaagcacccgcaacggccctcctagcactgtctcccccggtttgggcagacgctcggtggtgacggtataatcggcattcatcgagccaacgacggacacggccccatgaatgcaatcaagagaaacaagcgtttcatccatagcaggcatgatattccctttctg

SEQ ID NO: 2513 - DNA, 9594 bp, Unknown
  R50_10m  MAG No. k141_24120
gcatcggcaccaccgtggccggcatcgcccgcgccttcggcatggaggtcgccgcatggaattcgcatgtgccgcccgagcatttcgaacgctccggcgccactccggtcgacgatctcaacgagctcatcgaaaccagcgacgtcatctccgtccatctgccgctcaacaacgccactcgcggcatcgtcaccgccgagaaccttgcgcatgtgaagcccggcaccctgttcatcaacaccgcccgctccgaagtcatcgaatccggtgcgctgcttgcccgactgcaaaagggcgatgttcccgccgcactcgacgtgttcgaccacgagccgctgaccgccgacgacgccatctgccatgtgcccggcatcgtcctgaccccgcacgtcggctggcgtaccgacggcgcgttcaaggagctcacccgccagatgatcgcctgcctgaccgcctacttcgccggcgaggactataacgtcgtcgtctccgaacactgatagtcctgtctagcctcgcgctcaatcgaacacccagtcagccgaccaccggaacacgcttatgcagacgattctcaacacgcccgacgatcccgcccacgattcgctcgtcgaaaaaaagtccgaattcatcggcgacgccgcccatgtcgatacgctcgacgaggcgctcgcgttcgtggccgcgatccgcgagcagcatccgaaagcccgacacgtggcgtatgccgccgtgtgcggaggcgcggatgggcgactgtccgaacgcatgagcgatgacggcgagccgtccggtaccgccggcaagccgattctcgacgtactcaagcagtccggcaccaccgattgcgtggttgccgtcaccagatatttcggtggtattctgctgggctccggtggtctggtccgcgcgtactcatccgccgcatcattggcgatgaaagccgcccgcgccgcccgcatcatgaccgccaagcgataccgggtccgtctcgaatacccgcagctggcacgattccagcagattctggcgcagctcggtggcagtcaggaggatgaatcgtatgcggtgaacgtcgaactgaccgcggtggtgccgcaggatgattgcgcgcgattcgaggagtgtgtgcgggaagcgttcaatgccgcggtggtgccggatccgattgacgtggtcaacattccggttccgctcgcgtgacgcctgtatgactaagctgggcatcatgaccgacgagaacaccaccagccagcagacccagcccaccgaggccgcaaccgagactgcaatcgacacgggcgcccagcagcgggaccaaggcgcgcaggacgcagccgagtccgccgctccggtggatttcgaaccgctgaccgctacatacgagcgtctgcgtcattccaccgacccggccgaactgtccgaattcgcccgtcggccgttgcctgaccgtgccgatcaggcggcgttctcccgcgccaccgcacttttggaggctgtggccggcaacccgcacaccccggtggccgatcgcgtgttcctcgccgacaccatgccgttcccgaacgtattggtcaaactctccgaagaccccgaaccgtccgtgcgccaagccgtggccgccaacggggatgacaagaattggctggtcggccgcctgaccaaggacccggtacctgcggtccgggatacggcgttgaaaaacaagcgcaccagctggaagatgcggcttgagggtgcgcaggaccccactgcggatgcggagacattggatttcttgggcgtacttggcaccgaatccgaagagggagcaccggcagtgctttcctcgatggtccgccgtgccgtggcgctgaaccccaatacgtccgaagcgatgcttgccaaattggccaacgacccctcggccgaggtgcggcacgccgtggaaagccgccgctaagcacactattgctgtgttttgccgtgcaaatttggccggcaatcaccctctatccaccattgtgagcgctcacatctcactatgtgagggtaaaaagtacataatttggcggaatcacggcattttgcttacggtgtggcgcaatcaaacggcgttagactggggctatgagtgagattaccgagagtgaagagcgtctggcccgtccgttgattcgactggccaagttggtcggtgtcggcacgagttatgtgggcatgagccatgactaccacgagatagacgatgacgtcctgatcgaggtgctggcagcgctgggcatcgacgcctccagcgagaacgcccaactcatcgccatccgacgcattctgaacgagcgttactcccgattggtggcacccaccgtgctgcatatcgccggtagcgaggaccgggtgctggtgaacaccggcattctggacgtgccttcggcgagcatcacgctggagaacggcgagccatatcagggcaccgttgaagttggtcctggagatggatcccaggcctacgacttggatggcacgttcatttcgaatgcggctgtggtcattcccgccgatctgccgattggctaccatacgctgcacgtcaaggtcgccgaccgtgtgcaagacgccactttgatcagtgcacctgatcgcgtcgatctgcttgacccgatgaagggcggcagtctgtggggctggatggcccagctgtactcgattcgctcctccaactcctggggcgtgggcgattacgaggatctgaagaccatgctggtggacgccaagcagaagaccggtgccgacttcgtgctcatcaatccggtacatgccgccgagccggtgtccccgctcaccccgtcgccgtatctgccggtaagccgtcgcctgatcaacttcacgtacatccgccccgaggcgatcgccgaatatgccacgctcagcgcgggcgacaagaacgccgtcgacggactgcatgccgacaccgaaccgctgaacggtgattcccagctcatcgaccgtgacgccatgtggcgcagcaagatgcacgccctgtggattatcttcaaggccggccgtaccgccgaacgccaaagcgcgttcgaccaattcaaggcggactgcggttccgacttggaggcgtatgccacgtggtgcctgtgctacgacaagtggggagcacccaacggcgaggagagcaactgggagcgcaagttcaaccgcaactccccggaaatcgccaatctgcgcaagcagtacccggacactttggacttctaccgctggctggaatggattgccgccgagcagctgtcctccgcccagcaggcagccaaggacgccggcatgcatatcggcatcatgtccgatatggccgtcggcgtgcacccctccggcgctgacgtgtggtggaatcccgagcgcttcgccaagggagccacggtcggtgcaccgccggacatgttcaaccagcaaggccagaactggagccagccgccgctgagcccgatcaatctggaggccaccggctacgagacctaccgcaatatggtgcatggcatgttcgcccgtgccggtgcggtgcgcatcgaccacattctcggcctgttccgcctgtggtggattcccgagaaccggtcggctatggatggcgcttatgtgtactacgactcagacatcatgctgggcgttctggccatcgaggcctctcgcgccggcggcgtggtcgtaggtgaggacctcggcgtggtgccggaccatgtggccgattccctgtcgagccacggtattctcggttgcgccgttgaatggttcgagcagtgcgacggcgtgttccgcgccccctcccagtggcgtccgtacgcattggcttccgtgaatacgcacgatttgccgccgaccgccggttacctggaatacgagcacgtcaagattcgtgagcgtctgggcttgctgaccggcccggctgaggaattcgaagcctccgcaaaggccgagcaggatgcgatgctggccatgctggtcgagcagggctatcttgatgccgacttcgccgaacatcgtgaggatcacgaggcggatatcatcgacgcgctgtaccgcgcactgaagggttcgccgtgcaagctgctcgccgcctcgatcaccgacgcggtgggggagaagcgcgcgcagaaccagccgggcaccaacaacgaatacccgaactggcgcatcccgctggccgacgccaagggcaacgtggtaccgctcgaaaccctcttcgacacccccggcgtccaacgcttcgcccaaatcttcaattcctgacccactttacctccctctgacgagccgagtcgttaagcggacagtccagtggactgtccgtagacgaggcctgaacgaagcgatagctgagagaaggcagggaattgcctcaccgtaggcgagtcggttagccgaagtgggtggaagagaaaccataaataggggaagagaagccataaacccaatggagtgtccccagttgccctatgtcaagcccggcgatatactagtggattgttgtgtttccctaaggggtccttcaaagcgctatcccactcgccatcgaggactttcagggagcccacggataatgaggttcgatgcctcttggatgcggccctgaccaagccacgccaagcagctgagacccggaacacaatatagaaaaggtaatccagtgaaaactttcactccgaagccagctgatctgactcatgactggtatgtcatcgacgccaccgacgtggtgctcggccgtctcgccacccaggctgcaatcctgctgcgcggcaagaacaagccgacctacgctccgcacgccgattccggcaaccacgtgatcatcatcaatgccgacaagattgctctgactggcaacaagatgggcaaggaactctactcgcactccggtcgtcccggtggtctgcgtcgtgactcctacgccgagctgctcgagaagaaccccgagcgcatcatcaagaacgctgtcaagggcatgctgccgaagaaccgtctggccaaggtgcagctcgaccgtctgcgtgtcttccgcggcgccgagcacccgcacaccccgcagaagccccaggtcttcgagatcgcccaggtctcgcagcaggccaagtgaaacctgagaggagataagaatcatggctgaaaacaccaacgactcccaggttgtcgagaccgaagaggagctcaccaactacaccaccgagaccaacgctggcgctggcaccggcacctccgcgatcgagccgggctacggcaccggtcgccgcaaggaggctgtcgcccgtgtccgtctggttccgggtgacggcaagtggaccatcaacggccgcaccctggaggagtacttcccctccaagttgctgcagcgtgaggtcaactctccgattgttctgctcaagctcgaaggcaagttcgacgctatcgtcctcgttgacggcggcggcaccaccggccaggccggcgctatccgcctcggcgttgcccgcgctctgaacgccatcgatcgtgatgccaaccgcgccgccctgaagaaggctggcttcctgacccgcgacgctcgcgtcgtggagcgcaagaaggctggtctgcacaaggcacgtcgcgccccgcagttctccaagcgttaatttcgcttgtcctgtaccgagcatacaaaggctctccgtggaattccgcggagagcctttgtgtttgtgtcgtgctgttttgagtgtgactcacacctgtttcatcagcgtgatgctcagcgccggcatggtccagacattgtcgtcgacgggagtgtccggcgtatcatccacaggggcatcaggcatatcagctgatacctcatcccgaggcgcggacgaggtgccgtttgcggcgtgatccgttgctggcatcgcgaattcgatggtatccgcttcatcctcagtcgaggattccgtgcgctgcatggccacttcttcgaccagcgtgcgtaccgtctcgctggcgtccggtacatgctgcgtccgaacggtggtgtcatcgttcaaatcgcattcctcgacctgaatgccatgcccggctcggcggccgttgatttcggccgagcaccatttaggcgtccagtgagtgtctggcggcaggtggaatgtgcggtcgtcagcggtgccgttgaccacaatgcacacgtccacctcactgttggacagcaatcgcatggtgaagctacgtacgcccagatcgaaccagtcacgctccatcggcgtggtgccgtcgggcaggaaccactgcacgcggcttgagggtttgagtaggccgagttgggtcagtcgggtgaagaagtcctcgtggtgatacaggtccagtgatttacgtagcgccaccagtcgagacacggttttcaggcgacgcatttcgcgtgtcttgttggtggaatacatccaatcccacttcagccacgtgatgtcgttgtcttggcagtaggcgttgttgttgccgtcctgtgtgttgcggaattcgtcgccggcgagcatcatcggcgtacccagcgagagcagcagcatgccgatcatgttcatggccgcctgttcgcgtgccgtgatgacgtctggatcatcggtgacgccttcgacgccgaaattggcggaatggttcaccgacgagccatcattattgttctcgccgttggcttcattgtgcttggagcggtatctggtgaggtccgtcagcgtgaaaccgtcgtggcaggacacgaaattgatggaggccggagcgccgcgcccgggttcggtggcgaacagatcggccgagccgcagagtcgcgtggccatctcctgcaaactgatacgaccgaaatcggagccgccgtccacatcctcaagccagaaggtgcgggccgtgtcgcggaagcggtcattccattcggcgaacggcacggagaattggccggtgcgccagccgaggttgcccagatcccacggctccataatgagcttcaggttgcccagcagcagatcggaacgcagggcgtagaggaacgggtgatgatgggtgaattcgccttccaggcgggccagcgtgacgccaaggtcgaaacggaaaccgtctatgccgatacgcttggcccagtatcgtaatgagtcgatggcaaaggtgaccacatgcgtgttggtgaagtccagcgtattgccgcaaccggtggtgtcttcgagtcgaccggtattggatttttgatggcgatagtaggccaggtcgtcgaggccgcgccagcagaccgtcgggccttcgacgccgccttcgcatgtgtggttgtagaccacgtccatgatgacttcgaagccggcctcgtgcagcgcgcgcaccatgtctatgacttcttggcgcacggcggccgcgcccttctcttgggctgctttggtggcataggagggttcgggggcgaagtagctgagggtggagtagccccagtagttcttgtggccgtgttcttgcaggaagagctcgtcctgcttggccataatcggcagcagttcgatggaggtgatgcccaatccctgcagataggcgagcgttgtggggtgggcgagtccggcgtaggtgccacgcaacgcttcgggcagccacggcgcgttggcggtgaagcctttgacatgcatctcgtagatgacggttttgcgccacggcacatgcgggtgctgcgggtcgccctcatgcttatggatatcgcgatcgtcgatggccacggataccggcacatggccgagcgagtctacggtgctcatggcaccgtatgccgagccggttaccttgtggtccacgacatcgcattcataggagaaggcggcgggggtgagctccatggagccgtcgatgcccttgccatacgggtcaagcaggaatttgtatggattgaagcgcacgccgtgtttcgggtcccatgcgccgtccacgcggtagccataacgcatgccgtcccatgctttgggcaggtgcacgtaccacaggccgtagttcggtccggtcatgcggaacagggtctcgcgcagatacaaatgttcgataatgcgcgtgcacaccggaaactcatggatctgctggatgaacgaggcgttcgggtcttcgaacaggcggatggcgtcttggaagaaggcgccgggctcgtcaatgggctccagcacacacagccaaacctgatcggcagtttcggaacgaacaacgacgtcagccccaccgtcgtcagtgaagtacagccctgggcgagtggcgtaacgatgcaacggtgggtttttcatacctccattgtagacgtgttgtcacttctggtggaagcccttgatttcctgccgcgttccgcagcaccacagatatcgtcgagataattctcggcgaatcgcaatgcggcaccgatgatgttctggtcttcggcgcagtagctcttgcgcagattgaaatggtcggtgccgaacggactgcgtgcgatgacgcgcgccttcagatcctcgatgtcactgtcttcaagatgctgggctgcttcaccgccgacaatcacgtcgcccgcgatgatggatcgcgcgttgacgatggcctgcgccacgtaatccagccattcgtccatgcgctcgcgatgatgccgttcaccctgctcaagcacgctgaagaagccgggaatactttcgtaatcctcgggcaaggtctccggcgagcagtaggtgtccatgcaaccgcgctggccgcagtagcattcgcggccgcccggcaccagcgtcatgtgttcgatggcgccattgcacatattcggaccctgatacagcttgccgcccacgatcaccgcgccgcccgggcgtcgctccagatagacgcacaccgcatcggtgagcgtggagtcgaaccatagctcgaccatggcggaggcatcggaatcgtggatcatcatgcacgggtaatggaccgactggctgatggtttcgagcataagccccgtgttgcccataatggtgccgaaggtgatggtggtggcgtcgggggagaggatgccttggatggcgaacgagacgccgagcactttgccgtgcttcttttcgacgtcggaggcgaagttgttgatgatgccgccgatacgctggtagtaaacgttggtgttgcggtaaggcagggcatcgttgcgtttttcgatgacgttgccgtacaggttaatcgcgcacaggcgcagttcgttggaccgcatcactacgccgatggcagtgcgatgatcgggattgaactcataattttgcgccttgcgcccgccggtggaatcctgcagttcgcctttgcggatgagtccgtcatcttctagggcgcgcagattttgggtgatggtgggcaggctgaggccgagttcgcgttccagttcctgcttggtgacatggctatggccatacagatactgggtcatggcactgcggttgtgcgctttcactgcggtcgatggcattgccctcatatttacccctttgtacgatgagatatatgtaagtatactttatgaaagtggctttcatgtgcctcgacgcggagattatgaggcaacaatcgtatatttgtaggcgattttgggcacttttttaaaccaattttcta

SEQ ID NO: 2514 - DNA, 2789 bp, Unknown
  R50_10m  MAG No. k141_24436
ccaaatgtgcccatagcacccattatcagccattcaacacgtttacaacacatccagaataacgaggttcacacggaacgcggcatccacaaacgaaaaccctcggccaccccgcaagctgaactctgaaagtcaacaccaagtcaaacttttgaccaacggttggcacagcgtaaaatggtgatattccaaccgacactccgatacgtaaatcgattgacgtcaaacgtttgactttttaacgtggttaacataacgatccaatgaaggacatcgtcacaacaaccaaccacaaccagccaatgaagccagcaaggaggtagaaccgtggtcacaatgaagcaaatcgccaatcgcgccggcgtttccatctccaccgtctctctggtgctcaacaaccgcgatatcggccgcgtcagccccgatgtcgccgagcgagtccgcgccatcgccgccgaactcggttacctgaccaaccgtctggccagcgggctacgcaccagcagtagccgcaccatcggattcctcagcgacgaagtggccaccacgccgtttgccggccgcatgattgagggcgcgcaagacgccgcccgcacactcggatatctgctgctcaccgtgggcatcaacagcggagccaaaagctccgatcgcgaaattctcacgctgcggcagttcggcgtggacggcttcatctacgcacgcatgtttaatcagaagacgatgctgcctcaatcgttgcagggctgcaaagtggtgctcgccgattcgaccgatgccgccgaagtagcgcccagcatcgtgcccgacgagcacagcattggattcaaggccacaagccatctcatcgacgccggctgcacccgcatcgcctacgtgggcaccatgcacaatatggtcgctcagcccgggcgagtgtccggctacatcgacgccctctccgagcacggcatctcgttcgacccagaactcatgatcaacatggacaccggcagcgacgccgccgcccgcatgcccgcgttcttcgacaaacacccggatgtcgacggcttcttctgcttcaacgacacccgcgcttgggccatctacaccgaggccacccgtcgcgggctgattatcggcaaagatatcgcggtggttggcgtcgacaaccaccaggttgtggccgaagcgctggatccgccgctttccactgtggaactgccgcattacgagatgggctactgggcagtaggtaagctggcctcgctcatcgaaggcgaggcacccgatccctttcctcgtgccggatacccggtcgagaaggttcagccgccgccactgagcgagcagtcaccccagattgaatgccagctgcgcatcaagcaatcctgggtccggccccacccccagcgatagcctgcccaaaaatcacgcatctatcctacttgatccggtttcgactgtatgtcgaaccggttcgaccccattattcaaggaagaaagaaacaagagataaggaggagcatcatgccccataccatccgacgctcagccgtcaaagctctggccgcaacgcttgccatcgcaagccttgtgaccgtgggcggctgcggtgaggcggaacgcgcggcggcgaaagccaacgccaatgaaatcaccatctggacgcacacggcaggcagcgaagccgagcttgccggcgtgcagcagatcatcaatgactacaacgccagcccagacaagaaggccaccgtcaaactacagtccttcccgcaaagctcgtacaacgactcgatcatctccgcctcatccgccaacaacctgccctgtctgatcgacgtggaccagccgaacaccccgtactgggcgtgggccggcatcctcgccccgctcaccgacaaggacctgttgtcccgcgccgacgacctgatggaatcggccaagggcacgtggaacgacgacctgtacaccgtcggctatttcgatgccaccatcgccctgttcgcccgcaagtcggtgctggacaagctcggcgtccgcgtggctacggtcgacgagccgtggaccaaggccgaaatggatgacgcattggccaagctcaaggcaagcggcgaatggacctacccgtttgaaatcggcacggccgataacaaaagcgaatggtatgcctacgcttacgcaccgattttgcagtccttcggcggcgacctgatgaaccgcacggactaccagtcgtcggacggcgtgctcaacggcaaggaaggcaaggaattcgcccactggatgcgcgacctcgtggccaagggctacatctcgtccaagggcggctccgacaccgcgctcgacttcgtgaacaataagtccggactgctgtacggcggcatttggtcgatgagcactttccagaagtacgccaaggattacgacgacatcgtggttatgccgatgaccgacttcggccacggctcggtgaccggcggcggctcgtggacggtcggcatgacccaatcctgccccgcacctgaagccgcgcaggactacatccgattctccctgcaagacaagtacatcgccaacatagccaaggccggtatgaacatcccgaccaccgaaggcgcacagaagctcgtgcccgagttctccgacggcggcgacatgcagatcttcaccgagatttcgaagaagtacgtcaaaatgcgccccgaaaccccggcatacaatttcatctccaccgagttccgcaagaccatcggcgacatcatgaacggtgccgacgtggacacctggctcgacaaagcagtcaacca

SEQ ID NO: 2515 - DNA, 3300 bp, Unknown
  R50_10m  MAG No. k141_24630
cgattttggtgcagcggatgatccgcagcgtatcacggacttcccactggtatttatccgcggaccgtacgtggtgtcggtcggccctgaggccacggtcgaaaccgaagtcgatggccacgtggtgggcttgcgtcaaggcaatatcctggccaccgccttccacccggaactcacggacgatacccgcatccacgagctcttcctgtcgctgtagtcgattcgtctgccgctagactggtatccgactgacgaatcaaggagacgatctgccatgcagcttgagctgaatcgacgcagcaaggtgccgatgtaccggcagctggccgccgggctgcgtgaacagatcgtctccggcgcgatggccgagggctaccgcctgcctcccgaacgcgagctgtcctcgcgtctcgaagtcaatcgcaccacggtgttgcaggcgtatcagcagctcaaggacgaaggtcttatcgcctccaaagtcggcaaaggcacgttcgtgctgccggctgcctccgcaagccgaacaccgcacacgtcaaacagtgacttcgggaatgcaataacgcgaacaacacgatcgtcggcagaaatgggaacatcgcaagcctcctcttccggcgacgtagaacgtgctacctccactggtttcttgacgacggaccagggcagcagctctgcggcggtccatacgattcgtgaaagccgctcggttcagggcccggagccaaccgtcgtgcgtccgccatggtcggtgttgttctctgattattccaaccggtttacctaccatgacatcgcctcggccgagcgggcgcagcgcggcgacaccattattgacttcgccaccggttcgccgaacccggcggatatcccggacgatctgctgcgcaaggtgagcatcgaggcgttcgaatcgcgggaattcgacggccaaccggaatcacctatcgagggattcgaagagttgcgtgcgctgcttgccgaacatatgcgcgcacgaggcgtacaatgcggcgtccgcaacgtgatggtgctctccggctccgagcagggcatcgacctcatcgtgcgcgcgttcatcaaccccggcgactgcgtgctggtcgaacaatccacgttcttcccggcattgcagaccttccgctcggcggatgcgcgcatcatcggcgttccagtggacgagcacggtatgcgtacagacctgttggacggctattgcgcgcgattccggcccaagctcatttacaccgtcccgacgttccaaaaccccaccggtaccacgctgccgcccgaacgacgcagcgaactcatcgacgtggcgcggcgctatcagtgtctgatcgtggaagacgatgcttacggcgatttgtggtacggcgggggatcatccgacgcacatcgccccataccgcttaagggcatggagaatgcgggatacgtgatgtatttgtcgacgttctcgaaaaccgtcacttcgggcctgcgcacgggatgggttgtggccgacccgcatgtgattaaccggctggcggctctgcggcgcatggtcgaccagcatacgagcacgtcatcgcagcgcatctgcctggaactgcttaaagaaggccgcgtcgccgaacatttgcgcggtttgatcaagacttaccgcattcgacgagatgcagcaatcgcagcattggagcggtatgcgccggatgaagtgtattggaccgtgcctgcaggcggctactatatttgggtttccttaccggacggcgtgcgctctctggatgtattggaatcctgccgttcccaaggcgtcacgttcatgccgggcagcgtgttcgacgttgacgaaatggatgattcccatattcgtctcaactttgtgcgcccggatgctgctgacattgataccggcattcgaatcattggcgagacgatagcacagatgtagccaagtgactggctcattgcggttgtcgagttttttgatggctgcatacccacatcgatgggtgcattcgacgaataaataagcgaggaagccatcatcagttcgctgtggcatgtgcatagcgttgtcgggcgaacggggcagaccacgtggtcgttgcgtgatctggccgatcgagccggcatcgcattgcccctggcgtagtggcgaggtggcgcagtaacgagtcacgccatcgcgagccgatgatgcgaaatgcggaaccggtcgcggccatcaacggctatcatacatgcggaagcaacgatacgttggcgtcagcacatccatctgactccagaaagggacacgatatgaccacatcctccgtttcgccggtgaccactgaactagcgggcagcgaaaccggcatcacgcttatcattcacgccggagcgggcagtcgtggcaagcgcagcacgcctgaacgcatcgcccaggtcgaacttgatctgcagcgcgccctcgatgccggataccagttgttggaatccggagcgccggcgcatgaggctgtggtcgccgccatccacgtcatggaagacgctcccgaattcaacgccggccgtggtgccgccctgaccagcgatggcatcgcccagatggacgcctgcctgatgaccggcgatggcgaggtcggtgcggtcaccggcgtaagcaccgtgaagaacccgatcgatgcggcgcgcgccgtcaaagagcagaccaagcatgtgctgttcgcggacccgaccgatgccgagatcgccgattggggcgtcgcgaccgaaagcaacgagtacttcatcaccgaacagcgtcgtcagtccttggccgaggctcagtccggtggcgatgagtgggagaagcatggcaccatcggcgccgtggcgcgcgatgccgaaggcaatatcgccgccggcacgtccactggcggcatcaccaaccagatgcacggtcgtgtgggcgattcgccgctgcccggttgcggcacgttcgccaaccagtccacggtggcggtgtcctgcaccggcatcggcgaggcgttcatcaaggtggtcgccgcccatcaggtgtcggatcgtgtgcgtttcgccggcgagaacgtcgaggatgccgcgacggccactttggacgaagtcgccgcgcatcatggcgatggtggcatgatcgttctgccggcggtcggccgtggcgtggtcgcctacaacagcgagatgatgaacttcggataccgtagcgcgcaaggcggtaaggtgcagggctgattgccccctgtattgcggcatatatcataatggccggtgtgctgcggattcttggtaaggaatccgcagcacacc

SEQ ID NO: 2516 - DNA, 8501 bp, Unknown
  R50_10m  MAG No. k141_24867
gtggctgggtggatttcagcgagaagaatatggtgccgccgataccgcatgccacggtgggcacgaacagttgggataccggatgcacggaggtggccagccaagccgccagaatcggccccagaataaagacgatctcgtcaatggcggcttccatggcgtaggccgtgttgagcagctgttcaccatcttccacaccgcgcaacgcataggaccagcgtgttcggaccaatgcgccgaatgagaactgcgtcagacccatgatgatggccaagacgaacagcagcggaatcggcacgcgcaccaacgccgcgaaggcgaaggcgagcatggccacgatctgcacggcgagcgcaagccggcccacgcgggcttggccgaaacggtcgaaggcgcgggcgtagaacggggtgacgcagctcatggccagcacataggcggcgctcatggtgccggcgatggtccaattgtcgtagagatggttgagcgccagaacgatgccgagactcatcatggagatcggcaatcgtgccaccgcgccggacaggcagaacgccttggctccgggcagcatgaacaggcgctggtagggcgagtgggcagcggacgacttcgaaaccgcgcgagtcgtggacacaataactccttactggtgcgttgtccggcacgtgcgcccgcccacacgtgccatccgagggtagcggttcccgagcaacgtcacgcggtgcgtttcaaccgcggaccggtacgtggccagtcgtcttcatcgtcggagatgccttgcgatgcataaggtctctccaccggtgaaggccgtccgatgctgtacaggtcatgagcctttgggctcagtcgttgtcagattgttcgggaatgccggagctcaactcggtaaggatttcctgtttggttttcgcgcgggcgtgaagctcgcgcaagccctcgtcgggctcactgacatagtagagagtggcgtcgatactgtccaattccacaccttcgaccgctgccagcagcagtcggtacatgtcgagctgggcaagtttgcgggtgatgtcgtctggcttggtgggccgacgaccggttttccagtcgaccacggtaaagcgtgcggtggtgctggacgggtcaagtccaccgatgaataccgcatcgagtttgccattgaccaggcccacgcccggcacgtccacgacgatggcacgctccgtccacgccgggatgcgcttggcccacgatgattcggccagtctgcgctgccacgccaccagcttggactcggtggcattgtcgctacttatggaagtggcggaggcggcggatgcggcggatgcggattgttgagccgtggactgtgggacagcgggctgccgtgtggatggcttgcggcattgccgctcccgttcggccaaatcggccaacatggcttcccgggaaacgaatcccgcatcctgacctgtatgcggcatacttggttcggcttcatatgccagtaccgcttcatccggcttaccggcattgatgaattgctcggcccacgcatggaactgcgtgccggcctcggccgccggagacgatattcgtggaatcgggcggataatgctacgccagtagaggcgctcctcccgttcgctcatgccacctacgcgggcttgcaggcttgtcacgttctggcgtcctgcggccagaacgcgttgcgccttggctttgactgcctcatcaagcgactggccgctagcggcatcggccatcaaatcggcgtcgtccaccagcaattgtgcccgttgcagcagtgggccggcgtcttggtgctgctcaagtggcgaggaatctgcggctatgacatcgatgccacgtgacagctgttcatgcactgcgtcgctgagggtagccggccacggcaattcggcggcggcattcgtctgcgtaatcggcgtttgccacgcctcccccaccacggcgtcaccgtatgccgcggcatgctctccgataaagaacccttcgggagtggcaatcgcttcgccttgcgccgagatcagcatgggcttcccggcattggcggcttgcagccgttccacacagtcctgagccgatatcgcatgctcatgggtttggagcgcgtcatgcacttcaagccagaaattggatggctgagcggcgtgagagcctttgggcaccactgacgggtcccgcccggattcacccgtataggcgcaataggtcatcagggcatcttcccgtgcacgggtaagcgccacatacatcaatcgacgttcgtcggcatgcagccgacgcccatattcctccgcctgcgtcaaataccagccggatgcatccacttcttccacgccatcgccgaattcgcgcatggagccgaacacttcatcatcgataagctccacatcatccaaagccgccaacgatgcgatggggtcggcttccacatcggcatcatgggggaatcgcggcaaaatgccggcatcggcgcgcataggcacgggcacggcggtggggttggtgagccaggagtcggcggtctcatgatattcgggtgcggtccagtgaccttgctcggtgcctcccgtatggtgttcgtccagcacgatcttgagatggtcgccctgattgctggggaatccgccggcggtaagccccactaccgcaacggcatcccattccaaccctttggactggtgtacggtcatcagttccacatccaccggagcgtcggggagactggcggcttcatcctccaccgaagccagatgatccacccatgtgatgaacccatgcaacgagggagtttgctcagcggcaatctcttgcgtgtacgtatccaccaaatccacaatcgcatccataggcatatgcgccaaagcgggattggcgcggtgctgcggattatgcagcacaccggccaatacggtgtcgatgtcaagatccaacgcttctatgccggcgcgaatcacgtcgcccagtggccgcccgacggcatcatgcacctgacggagcatcaccgcggcccgggttatggcgttgcgcccgtgtgcgctcaaccgttcaagcagttttaccaggtcgccgcgtagcaatacgtctggcaggaataccgcattggccacctgatcgcggtactcacgcaccacagccgcccattcattcgctggtgtatccggttgggcaaggccggcctgcaccaatgcttggaagcgttgttccatgttctgttcttcagcaaaacgggccaacatggtcaaatccgctgcggacatggtgaatcgtggcgtggccagcaagcgcatcagcgatcccgtatcggtgtggtcggcggccacgtgcagcaacgccatcagatcgcggatttccggacgttccagcagcgcggaatagccgaccacgaatgtggtcaatccggcctgttccaatgccgcctgatatccgggcatatgtgatttggaccgaaacagcacggcgaccggcgctttctgttcgcccggcatctgttcctgttgttcggctgcggaacggtgccgtgcgatggccgtcttgcagaaacgcactacggcgtcgatctcctgcccggccgtggcgaagcccagtactcccaatgttccttcgggggcatcaggcatggggtcgagcgatgagacatcgacctcacgcatcaatgagctggagggacgcgacggattggagcgcaacggcagcgtgagattattggcggcttcgagcactatacggctgttgcgcctggtgacggacaacgggaatggcttgtatccggcaggcaggtggaaatcctgctggaacatacggaatgcaccagggctggcaccacgccatgcgtaaatcgactggaacggatcacccaccgcgttgacggcggacctccgtgacgcatccacatggaacagtgccgccagcagagcggcctgcgtggtggaggtgtcctgatattcgtcgagcagcacatggctgtacctgcggcgcgtgcgctctccgatggaggggaagcgctcgataagctgatacgcggcaatggtgaagtcggagaattcggccatattgcgttcccgcttggcttgggcataggcctccaccagctggagcagaatatcgcgtttgcgtgtggtctccagcagcgcaccgcaatgataggcgcagcgggcgtgcaaatgttcggcacggtcatcgagcttggcttgccagctggcgtcggtatctttcttcagtcgtttgatcttggggattttcggctcgtcctcgggcatgggttcgtctgcgacggcttgctgcaatcgattgatgaatgccgaatcccattgccgtacttgattgatcgcatcatcgaagctggtgcagccggcaccgatcatggcactgccaatggcatccgacaacgccagaacacggttcgccaaactggagaaggcgccaaaatcctcactgaacgccagatccatgtgactgtcgatgacttcggtggccagttgaagcgctccggctgcgctcaatggttgcgtgttctgatcgaatccgacaagcagtccatattggcgcacgatggtctggaagaaggcgtcatacgtgaaaatggccggcttgaggaatgcccgatcagacaccgtggcggtcgtagagcccgccatatcaccggccactgcggcggagacgcgttccagcagttcgcctgcggccttgcgtgtgaaggtcaggccaaggatgcgttcaggtgccacacctcgattgataagcgcgatgatgcgttgggtcatcgtaaaggttttgccggaaccggcaccggcaaccaccagtacgtcagcatcgactggcgcatcgatgatggcggcctgttccgcactgggagtgaacgtgctcatgcttgcctcgtttcgaaaatcgtgtcgatctggcccgcacaggcagggcagacgttcttcatacggcagaatccgatatgggtgtcttgcggatgggcctcgatgatggccgacctgctggccgccgcggcatagaatacgcgggcgatcatggtcagcgaccataacgtctgcgtaccggcgagcgcggcgaattgcgcccacgcttcggcactcacaccttcgggaggagtagccggatctatggcgggtatgtcgaagaaacggttggggtctttataccagtatcgtggcgtgaacggttcggcattcaacgaaccatcagtgaacagcggcggctggaaggcaccttccggggcgtagcttctggctggtgccgcattctgcccgacatggaacagcgcgctttggctgatatgcggcattgcggcaagtgccttggcaccgcgcggcccgtcttcggggaacacgaggccaagctgatagcacacgagctgcagatcattgaaaatctgtttgaccgtgggcgttctgcctgttttgtagtcaatgaggcgaatgcattcgccgccgtctgcgagtacgcgggtttccatacggtcgatgcgcccggacagtctcacggtcagatgctcgtccatgccttccggccaccctccgaccagtgctcccatcagacggaccagcgtgttccgaccgattgggtgcaggccgggcacggcattgtatgcgtcgagtatgtcacgcacatcgaatcgtgcggcaaactcccgttcgcattcggcaccggccaatgcgccaatgctgaagttgctggagttcttgccaagatacgtttccggatcggcgtcgctgcgcacaaagtaatcggcgatgttgcgcagggcatctgccgcggactcgtccttacgggtggcctcatagcggttccgggtgtcggctatggcattcggatcggggcgtttgctctgatagatggcattaagccgtgccgtgacagcctcgatgcggcgttccgtgccggccgtggagtccaagcccagtgtggccaacgtctgggcattgtgggaaagatggtccagcccttcctcgctgccttgctgtgcaaccgcatggatgagggttccgaagctggtggccacggagctggggcgaggaccggcgaaccggttctccagcatccagcacaccggacatgcccataggctgtcgaccgccgatggagacagggtgaccatgggtgcggcctgcgcatccgtcttgcctttccccgtttggataccgtcagactgtacaccgccagatgacgcaccgccagatgacgcgctatccgattgggccggcgattccacgaacgcccagctctgcggatttgcggcgcgcacaccatgctccgacaggagtgtcaacgcaaccgcggcgtcctttgcggcagcctgctgcggttgagcagtggccagaaccgcgcgggcggcgctgaccaacccacgtgggtcggcgtccaatccggccagatcatattcggcggatcctgtatgcgcccccactgtggtgaaaggcgcctgttgccggttgcgcggatagtattccggcagatacccgaaaagaaagtccgaggggctcatgctgtcgttccataccgcgctgatcatgattcgccgtgcacgggtcagcgcgaccaggaaacccttcttctcgcccgacagcacagccgcgaactgcggatcatgcccggttttgtcactttcttcaagcgctcccctcagcacgagctcggcaaggtcttcaccaccgaacatggtgttgcgcccggcgaggttcggccacacgtcttgctggaccaccggtatccacgcatatccccagtggcgtccggccgcgcctgccggcgtggtcaatgtcacagcgtcttccaccggccctatgtgggccaaggaatcggcctgcacttccatgccccgaacctgtgccatgaatgacgtgacgtctcggctggcggtggaatcatcggcgaactggaacaggcgcattgccgcgtccagccggtcattggccgtgcgcccctctgccgtgttgaataatgccgcacgctgccagaccggtgccagaccggtggcgttccaggcaacagacagtgcataacgcggctgtacgcgctggcttgccggcagccgctccaagccggaagcaacgctgcccaccagatgccacaggttcgcaaaagcgcgggcctgagggtcgttgccaagcaccgcatggatggatgcgagcgcagcctgcgccggcgcggcggcatcatcaatggcaagcatcacgtacagcgcgtcaacgccaaaggccaagtcatcgtcggagggttcaccgagtatttcgacagacactggcgatggaaccattgatgaggatgtgtcacgacctgtgtcacgccatgtttcatggtatgtttcacgcaatgtctcccatgccgtcgtcagagaggtcagcatggcatcatccgtggcgagatgcgccagcgactccaacgaccccatggccgattcgatcggcgcaagccttgcgggacgcccttgaccgggtctgcccccggcactcaccaacgggccgttcatcaacgtggccactctagtccttatatatgccgcgcaggaagccaacgtcatctggcattccgccattccctcggcacgcaatcgggcaagctccacaagcgcgaacaatccctgcacgaaagtctcgtccttcaaaggacgggtgaccgacgaataccgcaccggcacgccatctcggcgcagtcgttcgccgaacagccgcacggcggcattgtcgtgggtgatgaccgccatgtcgttccaccgaatatgccggtcaagatgcgtccgcttgatgcgccagaccacatcatccagctcctcacgtgaggatcggtacaggccggcggtcaccgtgccgtccgactgataattcgctgcatcgactccgcccagtatggcggtcagcttgccgggacgctcggccggaggcagcggctcgtcttccggcgagggaatcgacagcgaaatacgagacgcgatcacatcagccatcgtcatgtgcgactgatcagcgccggtactgccgccaaccagctgttcttccttggctttcagccacccttccacggcacggcgcatcagatattccggatacgatccacggaaggtctgcaccgattcatccgggttgccgaccagcaccaacttgacgccggcattccccaactcctccaagaagcgcatgccggccagcgtggtgtcttgaacatcatccacaaccagcagccggggcaagcccaacgcctccatacgcataggccggtcggaatcatccgcgtgatcggcggcgaatgcctcatgcaccacacgagctcctgccaccagcaaatacgaggcatccaaacggtattgccccggatatgccgcgctttgggctgcaatatattcacggcgcaacgcgaaagccaaacgccattgcaccgacaatcgcgcgtcctccatcacggcgtccaagagacgtggctcttcgtgaacgcctacaccgagctcgtccaatcgggccagcatatcgcgcaactggctgataaac

SEQ ID NO: 2517 - DNA, 9176 bp, Unknown
  R50_10m  MAG No. k141_25227
acctgcgaccacagctacgtgcagcatctcatcaacaccggccgcatcaccccatccgaagccaagaaccacccgcagcgcaacgtcgtgatgcgtgtgctcggcgacttcgacatcgacccgcacccggacatctccatacgccgcgcccatcccgccgaccgctggctgctgtgttcggacggcctgtgcggcgtgctggaggactccaccatcgcggagacgatgaccacgctgtccgatcagggcgaatgcgcgcagcgtctggtgcagatggcactgcgggcgggcagcaccgataatgtcacggccgttattgcggatgccacgttggcgttggatgccgatgcgttcgatctgccgcaccaaacgccgttggtcggcggtgccgccagccgtaatcttgagccgattgccgacatcgtcaacgagccggtggctaccgcgcccgcgctgcgtgaggatgattcccccgcccagcgcgccgcagcattgattcagcccgccagcgcgcacgaggcggagaccgcgcaaaccacggccaaaccgtcgtccacacgcgtggtgcagccgtccaccgtccgcgaggagaccggtgaacgagccaatcccgataccggtgagattccggtggtgcaaaagccggatgggcgcctgtccgccgaccccaacgacccggatgtggccaaagccatccgcgatgagcagatcgagcagaagaaggccacgcgcaccaagaagcgccgcaataagcttgcggtgattattgcctgcattcttgccgtgctggccttggccggcgctggctggggcgtgtacacgtggagccagacgcactactacgtgggagatagcaacggcaccgtggccatttatcgtggcgtgccgaccaatctctttggacttgagctttcgcacgaagtgcagaccaccaatatcgccaccgcggacctgcctcagacatggcgtgaccagctgagccaaggcatcacagtcggttcgttggacgaagcgcagtcgcatgtgggtatcatccgcaccgaaatgcgcaaactggccaagcagcaggaagccgacgccgccaagaaggccgaggcgtccaattccctggacagttccaaagacagttcccagagcgattccaaggacagcaccaaggattcgtccagccagtccggttcgtcaagctcatctgattcctcggataaatccggtatcggagcggccgacaacgcggccacgggggattctcaatgatcgctacccgtctacgtcagatttccttgttgctgattgccatggcgatcagcgcgttggcgttcatccagatgttccaacgcaccgccggcgaattccctatgcaatacgccggcatgctggcattggtcgtagtgctgtttctggtgctgtgggggctgattgtgcgcttccagccgtacgccagccagtcgattctgccttgcgtgctactgctgaccgccaccggcgtgaccatgatcgcccgcatcgaccagagcgaaggttgggcggtggcccaacgccagctggtgtggctgtgcatcgccatcgtgctttccgcgctgctcatcatcttcctgaaggactaccgcgtgctacgacgcttctcctatgtgtcgatggtggtgggcctggtgctgctgctcgccccgatgctgccgttcatcggcatggaggtgaacggcgcgcgcatctggatcaggattccgggattgggccagttccagccgggcgagttcgccaaactgttcctcgcgttcttcttcgctgcctacctgttcgatcatcgcgaccagctggccgtgggcggtaagaagatgctcggtctgcagctgccgcgtatcaaggatctcggcccgatcatcgtggtgtggatcgcctcgatgggcgtgctcgtcatgcagcatgatctgggcacctcgcttatgttcttcgccatgttcgtggccatgctgtacacggccaccggccgtaaaagctggatcatcatcggtctgatcgcgttcgccgcgggtgccgtgctggccgcaggcatgttcagccacgtgggtcagcgagtcgatgcctggctgcacccgttcagcaacgagcaatacaacaagacccccggcggctcctggcagctggtcaccggcattttcggcctggcatcaggcggcatgctcggcaccggtctcggccaaggccatccttcgctcgttacgttcgcgaactccgatttcatctacgcctctctgggcgaggaactcggtctgatgggcgtcctggccattttgatgctctacctgctcatcattgcctccggcttcatcaccgccatgaaaatcaaggatggcttcggcaagctgctcgcttccggactggtgttcaccatggccttccaagtgttcaccgtggtcggcggcatcacgctggtgattcctctgaccggtctgaccctgccctatatggcggccggcggctccagtctgatcgccaactatattctcgcgaccctgctcatcatcatctcgaactcggccaatgcgcccgagccggagctgacctcggatacgttccagtacgaggctttggccgtgctgcgcaacaaggaacttgaggcccgagcccgcgccactgagccgatcgttcagcctcgcagcgcgtcggctacggcgtcgcagtccgaggcggaatcgtttgacgaccccattgtggacatcaccaagcacgcgccagacacacttgaggcacccgaagtgcccgcaattgtgacctctgcgggctctgctgcggcccccatcgccgagcccattgtggatgccaccactccggcgtatgccggcgccgatgaaccgtacacgcctaccggtacgattcccccgcttcctcccgttaacggaggcactcgcgtatgaacaaatatcttcgtcagcttttcaccgccgtggtcgcgctgttcgtgattctcggcctgtcgtccaccatcatcatggcggtacgggccaacgcgctgaacaacgatccgcgcaacgcccgttcgctgtaccaccagctcggtgcctaccgcggtgccatcctggcctcggacggcacggtcatggccaaatccgagccggtcaacgacgcattcaaatacctgcgtacctattccaacggtccgctgtatgctccggtcaccggcttcttctccatcaaccagaccgccgatcgcggtctggaagcctcccgcagcatgctgctcaacggtgaggccgattcattgatctggcagcgggccaaggccatgctcaccggcactacgaatcagggcgcgtccatcgaaacctccatcgaccccaagctgcagcaggttgcctacgatcagctcggtacgcgcgatggtgcggcggtggccatcgaagtcagcaccggtcgtatcctcgccatggtgagcacgcccagttatgatccgaacaaactggcgacccatgacaccaaagccgcgtctcaggcctacaacgaactttctgcgggccaaaatagcccactaaatagcccgctaatcaaccgcgccacctcgcagctgtacccgccagggtccacgttcaagaccatcgtcgccttggctgcgctggaaaccggcgattatcagacggacacgaagattcctgcaggctccagctataccttgccgggaaccgccacacagctgccgaacgacgaggcacagggcgatggcgtcaacggacagatctccctgcaagaggccgtcgcatggtcgtccaacaccgctttcgcccagcttggcgtgaaactcggcgcgagcaaggtttcggacatggccaccaagctcgggttcggcagcaccatcaccattgacggcaccgaatccacgggcaccccgatgacggccaccgcgtccacattcccctctgatccgaccgacgacaagcttgcgctggcatccatcggccaaggcgacaccacggccacgccgttgcagatggcgatggtcgcgcaggcaatcgccaacaatggcaaactgatgcagcccacgctggtcgatcgtgtgcgcgccgccgatctcaccgtactttcgcagaccaaaccgcaaaccatggccaacgcgttcagcaaggatttcgcagacaagctcaccacgatgatggagagcgtgatgaccgaggccaatccgcagctggccatcgacggcatcaaggtggcgaccaaaaccggtaccgcacaaatcggtatcgacaactctgccatcgacggctgggcgatcggtttcgcgccggcggacaatccgcaaatcgccgtcgcggtgttggtgcataaaacagatgtacacggttcgctcgccgctggcccgatcatgcgcgcgatgatgcaggaggctttgcaacagtgaaacttatcgaaggacagcttattcaccgccgatatcgtcttgattcgcgtcttgcgcaaggcggtatgggcgaggtctggaaaggctacgatattcagctcggccgtgaagtggccatcaaggcgctgcgctcggacgtgaccaacgccgaggccaagctgcgccgcctgcgtgccgaagcccataattccgccaatctggcgcacccgaatatcgctgcgttgttcgaatactacgagcatgacggcatcggctttctgattatggaatacgtcccctcgaaatcgttggcggatctgttccatagcaagggcgcgatggatcccatcgaactgctgcccattctgattcagaccgcgcgaggcctattcgtggcccactcgcacggcgtgattcatcgtgacgtcaagccggccaacatcatggtctccgacaccggcgaagtgaagatcaccgatttcggcgtgagctactccaccggccaaggccagatcacccaggacggcatggtggtgggcaccgcacaatacatctcccccgagcaggcgcagggccagcaggccacgccgcaatcggacatctattcactgggcgtggtggcgtacgagggccttgccgggcagcgtccgttcaccggcaccactccggtcgatatcgccgcagcgcacgtgaacaatcccgtgcctccgctgccgaactcggtggacgtccagttacgcgaatttgtcatgtcgatgctggccaaggacccgttggaccgcccgaatgacgcgctggtggtgtcccgcacgctggcacgcatcgaacgccgtctgctggatcagcagaccgaaatggccgacaccgccatggccacgtccggcaatcgactgccgcgccgagtgaccagcacgccacgcattgttttggaggccccggcctcaagattgggagggaataagcaatgagcaccagtatgcccaccgcattggccggcggacgctaccagcttggccagctcatcggtcgtggcggcatggccgaggtccacgtggcccttgacacccgtctgggccgtaccgtggccgtgaaaatcatgcgcgccgatctggccaacgacgacatcttcctggcccgtttccgccgggaagcacacgccgtggcccagatgaacaacccgaacatcgtgaacatctacgattcgggcgaagaactggtttcttccgaaagcggcgataccgagcgtctgccgtacatcgtcatggaatacgtcaagggccaaaccctgcgcgacatcatcaaggtcaacggcgcactcagccagcgcgactgcgaacaggtgctgttgggcgtgctcaacgcgctcgactattcgcatcgcatgggcattatccaccgcgatatcaagcccggcaacatcatgatttccgagcagggcgtggtcaaggtcatggacttcggcatcgcccgcgctctggacgattccgcagccaccatgacccagtcgcagggcgtggtgggcaccgcacagtacctttctcccgagcaggcgcgcggcgagaccgtcgacatgcgttccgacctgtattccgctggctgcgtgctctacgagatgctcaccggccgcccgccgtttaccggcgattccgccgtggccatcgcctaccagcatgtttccgaagtcgccacgccgccatccgccgtggtgccagggctgccgaagatgtgggattcgatctgcgccaaggccatggccaaggaccgccagaatcgctatgccacggcctccgagttcaagaccgacatcctgacctacatgaacggcggcgtgccggtggcggccgcgttcaacccattgacggacctgtcgaatatgaaggcccgcaaggaagccgaacgtgatttgcccaccacgccggtggaaccgcagcagcagcccacccaggcattcaacccggtgaccggtcagttcgagcagattccaccggccactggtgcccactcagcggcgttgcagtcccgcgcgcagcagcgtgcggcggcggccaaggccaagaagcgcaagaagatcattatcggttcggtgatcgcggtgctcgccgtggcccttgtcggcgcgggcgtcgtgttcgccatgaacggcgcgcccaacaagtccgccgaagacaaggtcaccatacccgaggtgtgcaacgcttccacatccaaggacaacatcaagctcaagcttgagagattgggcttgaagatgaccgaaaagcaagacaccgactccaccgagccggaaggcacctgcaccaagatgagcccggatgccggctccaaggtggccaagggatctgccgtgaaggtgtggttctccgcaggcccgcagtccactcaggttccggatgtcaaggaacgcagccaggaagaggcgcgcagcattctggaaagcgccggattcaaggtgaatgccaccgtcagaaccgaagacagcgccgacatcgccaaggatatggtgacgaaaaccgatcctgccgccggccagtcggttcccaagggcaccaccatcaccatctatgtttcttccggcatgaccaccgtaccgagcaatttggtcggtcagtcgaaggacagcgtgctacagcagtatgagggcaggttcagcttcactgtggagcaggagagctccgatacggtggaggccggtctgattacccgtgtaagccctgattcgggctcttccatcgcgcagggcgggtccatcaccatctgggtgtccacgggcaaggaaaaggtcgctgtaccgaatatcgccgaaggcactaaatatgccaccgccgaactcatgctgaaggccgtcggcctcaaggcccaagccaacggtccggccgaccccaccgccgtggtggtcggcatcgatcccggtgccggcgcccaggtcgacgtgggctcgaccgtcaccatcaccacgaagcccgccgccacaggcgacaacaacggcaacggcaacccaggaggcaacggtgccaacaacggcaacggccccaccggcggcacgaacggcaagtagacggctgctacttcgtgaccttgggctgaaggccggccgacttggccacggcgttgccttggccgcacacgctcagccagttggccaatagacggtagccgtcctgggtcatcaccgactcgggatggaactggacggcatacatcggcttatccttgaccttgatgccctgaatggtgtggtcatcctgcgtccacgcggtgaccaccagcgtatccggcaccgaatcgggctcaacggccaatgaatggtagcgggtggcggtcatgggattggccacgccctcgaagatctcgtcatcggcatgctccaccgggctggtcttgccgtgcatgatggtgggcgcgtggcccaccgtgcagccgtacacctcggcgagcgcctgcaagcccaggcacacaccaaacatcggcatgccagtggccgcgcacaggcggatcatgtcctcgctggcaccggattcggccggggcgcccgggccgggggagatcagcacgccgtcataaccgtccagtacacccggcgcggccgggtcgatggcgtcgttacgcaccacatcaacagtggcgccaagggtttgcagatagcctacgatcgtgtagacgaaggaatcgtagttatccaccaccaaaatatgcgcggaatcggtcatagggctctccttgagggacgtgtactgcaagccatagtactaggctgccgtcagctcactgccacgaagttcgacatctgctgtaggaatgggatattggcggcggcccaagggaatccccactggaacagcgccgcggcggctgcgaacaacagcagagccagcagcagccatcgaatcggtgccacgccgggctgcagacgcaacagtccgccatagatgctggcatccgggcggcgacgctcacccgcgcgaatctcgcgcagcaccggccagcgccatgccaccgcagcggcgatgaacagaaccagccacactaccagcgcgccaaataccaccttgtccagcgagccaatgcgggaagcgatcgagggggtttcggtggtggagaacttcactgcaccggacgaatcagtagtagccagctctttgggcacgccatcagacactttggcccagtacgccaactcaccatagctgatccatcgatgggtgggggtggagtatttcggctcacaggtagtcagtgtgatcatgcgtttggtgggattggcagtggagtcttccggattgggggcgatcacatacatgtccgtgggcagcacaatctcgtaccgggtgtagtggtagacgtaccagtaatccttggtacgaacgatgatgggatcgccttcctgcaacttgtccacatcgcccaacggctgcccgtagccgttgcggtggccggcgacggcgaagttgccgacctgccccggcatctgggtggtgtcgtaatggcccagaccgtggcgattgagctgctcgagcgtggtgccttccacgatgttgcggtgccattgggagccgaagcgcggaatgtagatctgcgcaatcaagtcgccatatttcgcgtctttcggctgtaccggcgcatcgccctcctgggctttggcgatggtgaccgttcccccgttgttgctggggtcgctccagtcgacggactgggtggtttcgttctgggctcgctccgcctcgacaccggtccaccacatctgccagacgatgtacagggcgcaaatcacggcagcggtaatcagcagttcggcgcagatgccgagtgc

SEQ ID NO: 2518 - DNA, 2535 bp, Unknown
  R50_10m  MAG No. k141_25328
gaagtgtttgagcccgtggtaggtggtgcgcggctccaaggtgatgaaatcgagatcgatgacgccttctcctccgaaggtcagacgcaacgtgccctgcgtggacacgctcgcaccggctttgccatcttcttcgccgctttccggaacggtcagagatgcctggcatgtcgtccatgccgaggccgtgacggtgatggtggtttcgctgatgatgctgccgtcgtcgccgtgtagcgagaccgtcactggcatcgcgcttcctgatcgtacgcgcatccatgcggtgaaatcgtaggtttctccggcatggaataccatgccgtcccagccggtgttgtccagtgcggccggagcctgttcgatttccaccgtcgcgtaatgcgggttttcgacggcgaccgggtcgatgtcatggatgcagaacgcggcgaacgagccgtccggcacgattttgcgccagaaactgtagttgctccattctgcggaatcggcgcgattgtattcgaaggcgccgttctgcacgaggtcggcgttgagaccgccgtcgccggaatagctgatgtcttcgaagaagatgccccacaggtcggtgctgatggcgcgcacgcccgctttgtcgagcgttgcgatgagtttgtcggtcattgatgttcctttgtggatggttgttgttggatgtgccgccgttcgccagattggctcagtctggctcagtcgagcgcgaaccagaggcagccgtgcgcggggatgatgccgcggatgacgcggtcctcgccttcgccttcgatgcggatgtctggttggatgtcgtcgggcgcttgcgggacgtcggcccacaggtcggtgagtgtccagtccttgttgcgttggtcgatgccgacgaagctttgcagttggatgttgcctttgagctcgtatggctcgctgcctgtccagaagatcgcgccgtagtgtccgtgcttgtgcgccgatgtggtgccgtcggcccagtcggccgcgtcggcggtccatacggcaaggtcgccgagatagctgtcttcctcccaccagcgtccgaagatccgctcgtagacgatttcgcggttgttcaccgatcctgcggtcacttcgcgcagggccgggttggcgagcagtgcgatggtgtcggcgctgctggtgggcaggtcgccgccaaccatcagcggggaccggcccatgctccacagggtgagcagcgttttctgctcgtcgcgggtcagtttcgattggcggtcgtcgccgcgttcggcgcgcaggccgatgtgtccgagcggcagcatgtcggcgtcggcccagtggccggtgcgttgcatcggcgcccatcgagcgagccgggggaactgctggtagatgtcttcccaacggtcccagaggtcgtcggagatgcgccacatctgtgagacgccgcgtaggaaatcgacgtgggtgctggccacccagccgcccggggacagcgatagcgtaatcggccggccgtaggcggcttccgcacgttcgatggcgtggtggtatgcctcgatctcctccgggaagaacggcgtctgcatgtcgtcgaccttgaggaaatcgaggccccaggaggcgaacaggtcgacctgcgcgttataccaagcctgcgcgccggcgtcgccgcgcttgagaccgtagttgtcgtggttccatacgcaggtgtgctcggtgtcggccacgtccctcgcgtgcagcgtggtgcctttgaccggcaggttctcatgcacggcctgccgtgggatgccgcgcatcacgtgcacgccgagcttgaggccaagcctgtgcaccgcttcggcgagcgggccgaatcccttgccgtcggccgcgcttgggaagcgctgctcgtcgggaatctggcggccgtaggcgtcgatgcacagtggcgtgccgtcggagtagccgtgcgcgtgggcgttgggatcgaaccagccggcatcgatgaccaaggtgtcccagccggcgtctttgagatgcccggccataaagcgtgcgttggccaggacctcttcttcggtgatggtggtgccgtaggagtcccagctgttccagcccatcggcgggcgccaggctttgaccggcgcggacgtgtccattgggcggttgtcggttgagtcgacggaaacggtggtcgggatcgtcatcgaacctctcttcgttcagggccgctatggcgctgcctcagcaagagccgaacgccatcacgcggaccacatatatgtatcgttacatattctaacgcaaatccaaccggacgcaatcggcacaacatgtcggtgagtctctgtgttttcaacgattttccagaatcagaaagtatgatatcgttacatattaatcgtgtttttcaaggagcggcatatgaccagcagcacaccgacgctacgcaacgtggccgcggaagcgggcgtctcccccatgaccgcgtcgaacgcgctgcgcggcaagccgggcgtcagggaatcgacccgcgccaaagtgctcgccgcggctaagaaactcaattac

SEQ ID NO: 2519 - DNA, 4905 bp, Unknown
  R50_10m  MAG No. k141_25372
aaccctcccgggtacccaaccaccacgacaggcaatcaggcgaggaatgaactggcaatcattgactataaagaagtagtacaaacacgctcttgagttctcaaaccaccaccacaccagcaagacaggaaaccaaccagaagaaggaacccgccgcgctgagcggcaacaggtgaataacttacacgcatgtttggattcgcgcaaatcgaggcgcgcaaaagcctcaggaatcgttgcaatcacacggttccttcggcgtgtcgcaaacagcctatttgcgctgttctgataccagaataatccgttttgcattgccgatgcgtaacaaattcatgcgttcaccggcgtgttgcaagaattcgattgcgtgaccatccaggttcaccttctcgcaaccggtcatcgcatatgcaaaaagggacttccctttacgggaagtccctttcagtagctattgaagctcgctagcctcaggccagggtgttcgggtcaaccggaacgcccgggttcatcgtggaggtgatggtcgccttggtcaggtaacggcccttcacggtggacggcttcagacgcttgacttcgtcggccacagccttgaagttctcgtccagagcggactcatcgaagctcatcttaccgatgaggaagctcaggttgccgttcttgtcgacacggaactcgatcttgccgcccttgatgtccttgacagccttggtgacatccatggtcacggtgccggtcttggggttcggcatcaggccacgcggaccgagcacacggcccagacggccgaccttgcccatcatgtccggagtagcaaccacggcgtcgaagtcgaggaagccgccctgaacctttgcgatcaggtcgtcatcaccgacgatgtcggcgccagcctcggtggcctcggtggccttcgggccacgggcgaacacgaggaccttggcggtcttaccagtgccgtgaggcaggttgacggtaccgcgcacgagctggtcggccttacgcgggtcaacgctcagacggaacacggcctcgacggtctggtcgaagttgtaggcaggcatgctcttgagcagagcgatggcctcgttggcggtgtagaggttgttgcgatcgacgcgctcagcggcttcgcggtacttcttggaacgctttaccatctgtccttctccttatcagtccgtaaccgtgatgcccatcgagcgagcggtgccctcgatgatcttcatgccggcctcgatatcgcgagcagacagatcttccatcttggtctcagcgatttcgcgaacctgcgccttggtgacagagccgaccttgtgggtcagcgggttctcggtacccttctcaatgccagcagccttcttcagcagagcggcagccggcggggtcttgagaacgaaggtgaaggaacgatcttcgtaaacggtgatctcgacagggatgacctgacccattttgtcctgcgtctgggcattgtatgccttgcagaagtccatgatgttcacgccatgcgaacccagagccgggcccagcggcggggccgggttggccttgccagcctggatctggagcttgatcagcgccgagactttctttttgggagccatattatggttcttctttctataacgcggttcgaatggtcgccgtcctcaggttcggctgtctgctatcacgctcggtcttgactcgttatttatccgtgcatgctgtaggcaatcggcctgtggtcggtctcctcccgcaacttatattgctgtgctgtgctagcgggtcttccctccagacacaagctttcctattatgcaaatccacccggacaacacaaaaagcccgaccactatggtcgggctctgcaaagtttggggttaatccagcttctgaacctggtggaagccaagctccaccggcgtatcacggccgaagatggacacgagcacggtaagcttctgagtggtgggctccacgtcggaaacaacggcggccatggtggcgaaaggcccatcggtgacggtgacctgatcgccaacggcgtaggagacttcaaccttgcgcttcttggcggcggcaggcttgtcgccggcggccttgagtgcctcggaagcgatcatcggagccatcatcgccacgacttccttgcgggagagcggtgccggatccttggtcgggccaacgaagccggtcacgccttcggtctcacgaacgatacggcgggcgttctcatccggccacatacgaatcagcacatagccaggaacacgtacgcgggtgatgatcttcttacccttttcggtgtgcttctcgacttcttccatcggcacctcgacctggaagatctgatcttccatgccgaaggaggcgacgcgggactcgatgttggtcttcacgcgcttctcgtagccggagtaggtgtgcagcacgtaccacttgccatcaagggaacgcagggacttggagaattcgtcaacggcctgctgaccggcatcggtttcctcggcctgctcggattcgttgacttcttcctcgtcctcatccagagaaacggtctcggtctgagtggaagcaacgggagcggattcagtcgcggccggagcggcggactcaacatctgcattgtcgacggatgcgtcagattctgcggaaaggtcagcaaccggttcagccggggcagctgcctcatcggcagcagcttcggaagcctcgacaacaggctcctcagccggcacggcgtcgagattctcgagattcagttcatcactcatgcgttgttattcaccttaggttgtgcggatcagccgaacacccacagcacgagcttgcccagaccgaagtccatgcccgtgacgagggccatcagcagcagcacgaagataaacacagccagagaccagaagaacagttccttggcagtaggggttacgaccttgcgaagctcgtcgatgatctgcttgataaacagaccgatacgcatgaagacattcggcttgactaccttttcgctgttgttcgtcttagccattctgtacctcgcgtcagctgcttgattattgaaaacttggcagggaaggcgggactcgaacccacaacctacggttttggagaccgttgcgctaccaattgcgccacttccctaggtgaaaatccacctcggcgtgcattccgtagagaacgcttcgccacggcgaaaccgccaagttgttatagtaacggctccggtggattatcgcaaatcgcgtgtcgcgcgcgtggcatgtgcgcggcacacgactcttctcagttagctcagttagcccattccttgaatcgacgcatgccttcggctaggtcttcgtcggccagtgcgtaggagaaacgcaggtaaccgggagcaccgaaggcctcaccagggacggcggccacgtgggcctcatccaacagtgcggcggcaaaatcagcggacgtatcggacacagtgccgttgggccccagcggcttgccaagcaaagcggtgatgtccgcaaaagcgtagaacgcaccggtcggagtcgggcagttaacgccctcaatatcgttcagagcagccacgatcgcgcggcgacgtgcatcgaacgccttgcgcatctcatgcacctcgtccagcgggccagccacggcggccagagccgcacgctgggagatgttggccacattggaggtcatatgcccctgcagcttggtggcggccttggccacctcaagcggcgcgaccatccagcccacgcgccagccaggcatcgcataggtcttggccacgccgttcagcaccagcagctgcccgcggcattccggcacggcggcaccaatgtaggtggtgcgcgcgtcgtcgtagttcaggtgctcgtagatctcgtcggagataacccagatgtggtgctcgacggcccaacgaccgatcgcttccacggtttccggcttccagacggctccggtcgggttgttcggggagttgacgatgattgccttcgtacgctcggtacgggccgcttccagcgcctcaagcgagggctcgaagttcacgtcggcaccggcgaatacttcgaccggcacgccacccgccaatttgacggcttcaggatagctggtccagtacggagcggggatgatgacctcatcgccatcgttgagcaagatctggaaggattcatacacggcctgcttgccaccgttggtcaccacaacctggtcggcggacacctcgtagccggaatcgcgcagcaccttagccgcaatcgcttcgcgcagctcgggcaggcccggcgtaggcgtgtacttgtaattctttgggtcaaggcaggcatctgccgcagccttgaccacgtttgcgggggtcgggaaattcggttcacctgcgccgaagccgataacgtcaagtccggcggccttcatggccttggccttggaatcgacggcgagcgtagcgctcggtgccacagtgttgatacggtcggaaagagtctgccattgcgccatagtcatggcttccatgctaaacctacagcacgaaaaatcgccagagccgcactatggtgatgggatctgtcgtgtgacagatcccatcagtcacacaagtacaagattgtcgcgatgaaccagtgggtgggcgtactgggggccgaggaaacgcttgagttgggcggtgttacgcccgagcatctgcggaatttcttcggaatcgaagccggcgaggcctcgggccaggtgttcgccgctttcggcatcgatccagaccggatcgccggcggaaaaatcgccatgcacttcgagcgcgccggccgccagcagcgaggcacgcccgccgcgaatcgcctggccggcacccgcatcgaccacaatagtgccgcgcgggtcggcggcgaagccaatccacagacgacgcgacga

SEQ ID NO: 2520 - DNA, 6424 bp, Unknown
  R50_10m  MAG No. k141_25477
ctttatacccatgcacgatggtgcgggagtgctcgctttccaggaaccgcgcaagctgtgctcgcagggtatcggtgattggaaggggcactatggccgctgatgttgccgtggccacggcaatggtttgtgccgtggcacgccccggcctttcgtcgccccacgcggccacggtccaagcgcggccgaccgcgtcgccgcagacggcatgccgctgcgatccatcgccatagtcggaaaccgtgaaatcggcgatttcaccgggaactttgacctcggcgcgatgggccttgacccattcgtcgaactgctccggagcagtgatgctcgtgggttccggcaggttcagatcgagactgttatcctgctcgtcctgttcattattcgtagactcgccggctccgtatgtgttggaaaccttggcaccggtattgaaggttttcagtacacgactcctggtacgcggtccgaattcaagctccttgaacagggcgtcgatttgtgccacgtccacggtgccgaatgtcagatcctcaatatcgacgccaagatcgacgtctcgtaccagtgcgttgactttgcgattgagcttgacctggtcgatattggcccgcagcgattcgccttttttgccgccgatttcatcggcgtgctcgcaaatgccgtcgagggaaccgaattggttgatccacttggccgcaaagccatcgcctacaccgggcacaccgggaatattgtcggcggtttcgccgcggagcgccgccagatccggatattgtgcgggagtgactttgtatttgtcgatgatggactgcggcgtcatatgcttcaggtctttgaagtgatggcccgggtacaacacggtgacgttgtcatccaccagctggaaggcgtctcggtctccggacaataccagtgtgtggtagccggccttgtctcccatggtggcgagggtggcgatcacgtcgtcgccttcgaatcccggcttctcgatgtaggtgacgccgagggccgtgagcatgcgttgaatcaatggcagctgggtgagcagctcttcgggagccgcctcacgggtgcctttgtattgcggaagcatctcattgcggaatgtgccgcccttcacatcgaaggcgacgcccagatggtcggggttctccgcatcgatcacctgcgcgagcatggtggcaaaaccccagacggcgttggtggcctggccgctggaagtactgaagttgtcgaccggcagggcgaaaaatgcacggaaggccagcgagtggccgtccaccaccagcaatgtttcattggtgggtacggtcacgctggcctctcccatagtgtgtttgtgttgctttacgactcagtacggcgacgccgataatcagcgttcgcccgaatcagaaggcttcggatcgccgtacttggcgatgatggcctgagccaggcgcttcttggggatgcgctggtccatggaggtcttctgaatccaacggaaggcaccctgctcggagaagtcagccttgtccatcagcagacccttggcgcggtcgacgagcttgcgctcctcaagcgtgtcttcggccttcttgagcttctcttcggtttccttgagctggtcggtggtttccttgagcttgcgttcgctgcgctccacgttgtccagcagatcgttgatctcggcgaaacggcccatggccacctcgagggtcggcagcaacttggattcctcgtacggcttggtgacgtatgccatggcgccggcaccggtggccttcttcaccagatcggtctgggagaatgcggtgagcatgacgacaggggcgatgttctcatcgcagataatgccggcagcggcgatgccgtccatacgcggcatcttgacatccatgcacaccacatcagggcgatacttgcgggtcagttccacggcttcctcgccgttggcggcctgaccaacgacctcataaccgttgtcttccagcatggcgaccagatccatgcggttcacggcttcatcctcggccacgacgacggtacgcggaccatcctcggccacggccttgcgctcagcaggttcgctttcatcggctacggccttgagttcttcgtcggtcagcacctcatcgacgttgatactcggttcttcggacttcttccttgcagccatgccaacctctttcttgaattacccaacaatggggttcgtaataatttcagcgaactcctagctaaagtgccctcggtgggactcgaacccacactgcgcagattttgaggctgcttcctctaccaattgggatacgagggcgtgcctaagcactctgaagagagtagcataccgattcgactcctgcgacacaagacacgcgccagtcctccatttccccccggtaaaacaggcgaaacacgtcgatatcgtggacggcgtacccgtgtgttgcccgttcttctgcgtggtttcaccgcttacaatgggctgtagtttcgatgtatcgcttttgttaggagggcttatgagcaacgaaacttaccgtcagttcgatccctggcgcccctctccggtcaaggagatttcccgtagacagattgtggagacgcattatttcaatgtcgatcacgtctcctatgagtcgaatcagatcggttcgtttgaacgctactttgttcaggagaacaatggcgacactgtggctgtgctggccgtcaccgatgacggcatgattccgctggtcgagcagtatcgcatcgccaaccatcgttggacgttggagattccggcaggccacgccaacaacccgtccgaacgcccgaccgatgtggctaagcgcaagctggccgaagaggctggtttcgatgcctccaagcttacgcagttcacccgttttatgaacacgccgagctattccacccagcacaccgcaatcttcttcgccaccggacttaccccggcttcccgtcaggaaatcggcccggagactccgcgttccgacgtgcgtatggtgtcggtggacgatgcctatgagatggtggtcaatggcacgattgtggatgccaagaccatggtcgccattctgcgtctgaagagcggcacgctcgatcatctcaacgactagtcaccacgctcgatcatcgcggtgactacgtgccattgcaatcaccgcacaatcgcaacataacggataacgaaagccccccatccactttctggatggggggctttcgcgtgctatgtgctagctgtcagcagctaccagcggcctgaaatcagtcgcaagcgccaacggtgtgcacgtagatggagtcggtgcggcccggctggtgatcgccctgagcagagctcaggatgacgatcttgtcgccgtcagcaaccttgccggcatccttgaggaccttgtccgtgtagatcatcagatccttgcgggacttgtcgtggtagtcctccttgagcaggaaggcttcggtgccccaggacagagccagccagtggtaggtgtgctcgttgctggtcaggccgtagatcggggcggccggacgctcacgggagacgcggtgcacggtggcgccggtctgggtgtaagcaacgatggccttggcgttgagcttgtcggccaggtccacagcggcggaggagacagcgccggtggaggacatgtcgaggttcttgagctcggggatgcggtcgaagccgtggtcggtggcgtagccggagatgcgcgacatggtggccacggtcacatccgggtacttgccgacggcggtctcgttggaggtcatggtggcgtcggagccgtcgaggacggcgttggcgcagtcggaggcctctgcacgggtcgggaccggggagttcaccatggagccgaggacttcggtggccacgatgaccggcttggcatactggcgggccagctcgatgatgcgcttggtggccagcgggacctcttccagcgggcactcaacggccatgtcgccacgggcggccatgacaccgtcgaaggtcttgacgatctcttcgaggttctccagagcctgcggcttctcgatcttggcaacgatcgggatgcgacggccttcctcgtccatgatctcgtgggcgcggtcgatgtcggtggcgaaacgcacgaaggacatggcgatgatgtcggcgccggtgcggatggcccaacgcaggtcagcctcatccttctcggtcagagccggcagggagacggcgacgcccggcaggttgatgcccttgtgggaggacacaggaccggccacgacgaccttggtgtacacgttgttgccctcgaccttggtgacctcaagacggaccttgccgtcatcgatcaggatcgggtcgcccgggtggcaatcgcccggcaggcccttgaaggtggtggaggtgatgtgctcgtcgccctcgacgtcatcagtggtgatgacgaattcctggccgagctgcagctgaaccttgtcttcgccatcggcgttcttcttgaaccaaccgcagcgaatcttcgggccctgcaaatcaacaagcgcggcaacgttgcgaccagtggcttcgctggccttgcgcacgttgttgtagaccttgaggtgatcctcgggggtgccgtgggagcggttcagacgagcaacgtccataccggcttcaacgagcttcaggaggttgtcgtaatcctcggtggaaggaccgatggtgtctacgatcttggctttacgcatgaatgcctgcctattcttgttcaatttggttcgaggcacgattgccccatttgccgaaacccagtctactagcgcgagccgactcatgacaagttttcttcacggtgtgttgtgagcgctcacattgttgtgttgactgggtttaagggttgtattctctaacgatttcaggccttctcggcgctttccatgctcttcatcttgatcacggaagccacggatgcgccgccaattgcgaccacaatcacagccagcgacagccatgtgggcacttccggcacccaatggatgccttcgccgccgttgatgaacggcaaggtattgccgtgcagggcctccatgatgagcttgacgccgatgaagcccagcaccacggacaggccggcaggcaggtagacgagcttgtcgagcagagcacccagcaggaagtacagctgctgcaggccgagcagggcgaacacgttggaggtgaacaccaggaacggatccttggtcaggccgaagatcgcgggaatcgagtcgaaagcgaacatgacgtcggtggtgccgatggtcaggaacacgatgagcatcggggtccagtaacgcacgccgttcttggtggtgcgcagcttctcgccgtcgtagtcgtcggtgatcttgatgatcttgcgcagattacggatgatgccgttctcgtggtattcctcatcctcgtcgccgccgagcaccagtttgacggcggtgtagatcaggaaggcgccgaacaggaagaacacccatgtgaagcgggtgatcagggccgcgccgatcagaatgaaaatgccacggaagatcaaagcaatggtgatgccgatggacagcacatacttctgaatctgcttgggcaccgcgaagttcgacatgataatgacgaacacgaacagattgtcgatggacaacgagtattcggtgagccagccggaatagaactcgatggcgggcttggagccggcgaagaaccagatgcatccgccgaagatcagcgccatgaccacgaagaaggcgatatgctgcacgcattccttggtggagggcacatgcggtcggcgcccgatgacgaacaggtcgacgatgaagaacagcgcgagcaccacgaaggtgatgatttcaaatgcgagtggggtttctgccatgattccctacactaacccatgtatgtgacgggtcattgccccgcctcggtcatctgccggagctccttcttgagatcacggatctcgtcgcgcagacgggccgcgagttcgaactggagttgttcggcggcggtgtgcatctgttcggacagctggcgaatcaggtcggcgaggtcctgcgcgggcaggccggccttcaggatctcctcgtggcgtttgtctgcctcgttgggatcgagtaccggcacgcccaggtgtgtgttgccggccttgcccgcgttgcggtagccaccttcaagcaaggtctgggtgtccacatcctccttggcgagcatatcgttgacatcgctgatcttcttgatcaggggcttgggatcgatgccatgctcctggttgtaggcaatctgcttggcgcggcgacggtcagtctcgtcgatggcttgccgcatggcttcggtggtttcgtcggcgtacatgatcaccgtgccggacacgtttcgggccgcacggccgatggtctggatgagcgaacgataggagcgcaggaatccttccttgtcggcgtc

SEQ ID NO: 2521 - DNA, 2901 bp, Unknown
  R50_10m  MAG No. k141_25677
agatcgagcattgggacaagatggacaaaaccgtgcttgcgcaacgactgttgctgcggctcgcagcgttgcgttccggcggcgcgagcaatgtcgatgacgagaacaaggaggcctgacccatgctgatggcggtcgatatcggcaatacgaatatcgtgatcggttttctggagggcgaccgcatcgtcggctcctaccgcatcaccaccaaggcgacgcacacctcagacgaatacggtctgatgatcacgcagttcctggctttgagcgattacacggccgacgatgtggacgatgtgatcgtctgctcggtggtgccgaaggtgatgtattccttccgcgcctcgctgatcaaattcctcggattggaaccgatggtggtgggccctggcgtcaagaccggcatgaacattcgtctcgacgaccccaaaaccttgggctctgactgcatcgccgactgcgccggcgcctaccacacctatggcggcccggtgctggtggccgacttcggcaccgccaccacgttcaactatgtggacggttccggcacgattcgctccggcttcatcaccacgggcatccgcaccggggccgaggcgttgtgggggcagaccgcccagctgccggaagtggagatcacgcaaccgcagtcgattctggccaccaatacgcgcactgctatgcaggccggactgtattacacgttcctcggtggcattgagcgcacgattcagcagttccgcaaggaaatcgatgagccgttccaagtggtagccacgggagggctcagccgcattttcaagaacgacaccgacatgatcgacgtctacgattcagacctgatcttcaaaggcatggcatacatctactcgcgcaatgtgaagtaacgcggtgtgcaggcatcggccgcgcatagcgcagtcgattccgtccctccccgaaaaacctactcaaaaccctacttaatcgtaaagccctgattgaggccgtattctcggaggtctttctgccattgggccaggccgtcggagagactgactttcttgccgggcttctccaatggttcgagcgggttgccttcctcgtccttcatgcccatctcaatggcttcctgtcgctgctgataggcgtggaaactgccggaccactcgtatgcctggcccaccgtcgatttgaagtcactgcgcgcatacacttcgaatggcagatactggtatccgaccgacacatcctcggcggcctccgacagtacccggttgaacttctgcccgccgaaatacgggatttcaatgccacggtcattggtaatcgtggttttatccagaaaatcagcggaattcagggtggcgtaatcggccgggaaggcaccgccgtctacacgcgcgctaatgccttgggcgtcatgcgccacaaagtccacgaaacgataggccgcatccggcttacgggtcagttgcaacacggtcagcgccgagccgccattttcggcgttggcaggctgcccaccataggtgggcatgggagccacgcgccacagaccggccgcgcccggcacattggacagcagcaacgacggcatccaagccccagagaacacggaggcgatggtgccggtgcccactctgcttttccaccgatccgaccatgtggcggaggtagtgtcaacaagcccctcatcgatcattttctgccagaattcggtgaaccgttgggtgccggcatcctcatccaaatcgatggtcacggttttgccgtcggccgacgtgtggaacggctgaccaccggcgagccagaccatcgcgtcatagaaactgccgtcgcccgagtcggcggcgatatacgcgccgatctccttgagcttttcggcggcctcgtaatagtcatcccaagtcttgatcttggtggcgtccacgccggcttggcggaacacgtcttcgttgtagaagaagcccatcgggcccgaatccatgggcagtccataggtacggccggcgagctgcacggacgaccatgtgccgagggtaaagaagttggaataatccgagccgattttgtcggtcagatcaagcaattggccggagaccgcgtactgcaacagtgcatagtattcgatttgagccacgtccggcgtgccgtaaccgtcttgaatggcggtattaagattgccgtagccggagatattggtccatttcacgcggatgtccggattggctttttcgaaacggcggatgacctcccccatgctcggttcccagctccatacgctgatctccgtacggttgtcgtccgtggcctgcccgcacgaggccagggatacggaaaggatggcagtcactgctatggttgccattcttttgattcgctgtccgatcactcgcatggtgacgagtgtactaggcggggcttaaaacggtaaaagccccgtgacgggattcgtcacggggctttgtgtatcgaacggggtcgcgccggcggccccttcgcgattgcgaatcaccacgtgcggcgcgttgacgccgaacaaacgttcacccaacagtacgagcgggtaatcgccctccaaagctgcgatatcgtcaaccgtcatcatcagagggcttaagatgagcccatccgcgctgtgcgtgcccatcgatgcgatgctttccagctcgcgggcacgattgttagtggtggattccacgatgacgccgtagccatgttgccgggcctcggccagaatatcctcggcgagttcggagaagtacacctgccgcagatcgggaataaccagcttgagcaaccgggtacgcccggaacgcaggtttctggccgacgagttgactttgtatccgagcctgtcgatggcttccgcaatacgcgcggccatcgcctcgctcatatatggctgtttgttca

SEQ ID NO: 2522 - DNA, 3894 bp, Unknown
  R50_10m  MAG No. k141_25725
accccggggccacgccccacacgctaatgaaaggaagaaaaggagaaagaaagctttggcggacagtgccggctgctgtgaccttgccatcacagcagccgggctgatcccgcctattcagttatggtgtgtgtcgtattcggtgcggagaccgagcgggcaagcccgctattttttatctccgccgaccgccatcaccgcgcgctgaagcacaacgaagacgaggatcatgagaccgataacgatggtggtccattcggccggcacaccgaagtcagaggtgagcggatcgaggatggagcggaccagagagccgagcacggagccgagcacgtagccgaagccaccggtgatgatcgtaccgccgatgaccacggaggcaacggcgtcgagctcccagccaatacccacagtgttcttggcagagccgatgtttgcggtgtacacgatcgaggccagggcggcgagagtcgcagaggtcaagtagatgatgtactgcgtgcgcttgaccggcagacccataagttccgcggaggaacgggagccgccgatggcgtagatggtgcgtccggtgcgggtatggtgcaggaagacgtagccgaagaccacaaccaccagtgcgatgatcacgccgacgttgaaggacagatcgttggagatcttcggattgtcgatgatcttgatctcgttggagatgaacgagaagtcattgccctgcgggaaggtcagcgagtcggtggagatgatggaggcaagaccacgggccaggaacatcgtcgacagggtcgcgatgaacggctgcatgttgaattcctcgatcaaggtgccggccagcaggccgaacacagcgccgatgagcagcatgatgatcatgaccaggaaggcgggcacgccggcgttcgccagcttcaggccgacgactgcggtgatggccacgatagcaccgacagacaaatcgataccaccggtcagaatcggcagggtcatggccacagccagaataatcaggtaggcgtggtcaatgaacagggaggagatgaagcccagtcgaatgtaggtgccgaacaacgcctgacccatgatgatcatcaggatgaagatcaccacggccgcgagggtcgggatcatctgacgatcgagcttgaagcccttcttgggagccttcactttgtttgccgtagctgttgtcatgctgccaccgccttagcttgagccttgagcgcgcgcttgcgtttcatattcgcgctcaggttgtgaatcttcggagcctgcatcacgcagatcacaatcacaacgacggcgaagaaggccggagttgcctcggcgttgacgcccagggtgatgatggtcttgcggatcatggcgataattacagcaccgacagcagagccggcgagggagaacttaccacccagcagtgaagtaccgccgatgacgactgccagaatggcgtacatttcgaggtcctgaccggtcttaaccacgtcgacacgcatcacggatgcggtggcgaacagaccagcgatggccgcgaggaagccggaaatcgcgtagacgaggaagaggatcttcttcggcttgataccggtcatacgggaggcttcctggttgatgcccacggcctcaatcatcatgcccatagcggtcttgcggcacagcaggccaacgagaatcacaatgataacggcgatgacgaagttggcgggaatgcccagaatgaagccgttggcgaaccacttcagcggttcgttgccagcaactgcggaggcgtcggtgttctcaccggaggtgatgaccttggccataccacggccggcgagcatcataatcagggtggtgatgaacggctgtaggcccaggaaggaaaccagagcgccgttgacgcagccaatggccagaccaacagccaaggcgatgaggatggagagccacacgttcatgccattggacagggtctgcatggcggcggcacctgccactgccataacggaaccgaccgaaaggtcgataccggcggtggagataaccaaggtcataccggttgcaatcatcaggtatcgggcagattcctggagcatggtgatcagcgggccggccagaccaccggtgttgctgttccagctcagagccaggaagtcatgctggaagatggtgcagatgatgaccagaagaatgaatgcgacgatcgaccaggtcaggttgctgctcagcagcttcttgacaaagttgttgccctcggcttttgccttttcagccatctcatgcctcctttccggtgtttacgttggtgttagcgatggtttcgacgatggtcgcctgagagacggtgtcgtcgttttcgatttctgcgatcttgtggcggtccttgagaacctcgatgtcgtcggacagacgcacgacctcttcaagctcggaggagatgaagacaacgcccatgccctgagaagccaggtcaagcacgacctgctgaatttcagccttggcaccgatatcgataccacgggtcggctcgtccagaatcagcagctcggggtgcgtggccagccaacggccaatgagcaccttctgctggttgccgccggagagattcttgaccgggcgatccgggtcggcgggacgaacgttgagttccttcatgtacttgtcaacgatggcgtccgcttccttcttgggaatcggcttgaacataccgcgcgttgcctgcagggcgataaggatgttctggcggacggtcaggtcgccgatgatgccctcatcacgacggttttcggtggagtacgcgattttgttcttcaaagccgtgtacggatcggagatgttgaccttcttgccgttgagcgtgtaggtacccgaatccggcttgtcggcaccatacaggagtcgaccaagctcggtacgaccggagcccagcaggccagcgaagccaacgacctcacccttgtagatgtcaacatcaaccgggttgatggtgcccttcttgccgaggcccttgacatcgacgatcggcttctcgccaggggtgatttcacggcgagccttcttggcaccaatctgggacagctcggcggcggacttaccaatcatcatgccgatgagttcgtcgcgcggggtgtccttggtcatgacctccttgatgaactggccgttacgcagaatggtcagacgatcggtaatctcataaatctgatcgaggaagtgggagacgaagaggatggccacgcccgagtcacgcaccttgcgcatgatcgcgaacaggtccctgacctcgttggcatccagcgaagaggtcggctcatcgagaatcagcaccttggcgttgataaccatagcgcgggcgatggcgaccagctgctgcatagcgatggagatggagctcagcggagtgtgcgggtcaatggattcgaggcccatctgtgccaaatacttcttggcggcctcgtgagtcttcttccagtcgatgccgaaggggccgcgcttttcgtggcccagcatcacgttctcaccgacggaaaggttggtgcacaggttcacttcctgatacacggtggcgataccggcgttttgtgcgtcgagggtgccgttgaactgctgaggcttgccgtccaccataatggagccggcgttgatcttgtacacaccggtcagagccttaatcatggtggacttgcctgcaccgttctcacccatcagggcgtgaacttcacccgggtagagagtcaaatcaacaccatccaaggccttgacgcccgggaattcaatcgtaatgcctttcattacgacgatggggtttttatctgtcatgtctttgccttaaacgagaatgagatgttatcgttttgtgatatttgagccacacatgagtgatggtgtggaaggaacatccttctcacacca

SEQ ID NO: 2523 - DNA, 7975 bp, Unknown
  R50_10m  MAG No. k141_25780
acgtcgagactgtaggcgcgcaccgcgaacgcgggcttgtcttggatatgcaggcagggaatggcacgcgaggtctgcccgatgatctgccgcagcgtctgcagaccgtaccgcagcccgctttcgccgccgccacgcacggcgatggtatctgaggcgaacacatccagcgtgtattcgtcatgcgccaatcgtgaatccaggcccagggatatgacggtgccgttcatcgctgccggcgcacccgcacgcgcatctcgcgcatcttcggcggcattggcgctggcgtcgtcttcacctgtggctgcacggacacggcgcgtacggacggtgacgccgcagtaacgctcgagctcgctggacagctgctcaatcggcagcgtttcccaagtctcatcggcaccttcggtggcggcatattcgggaattcgtttctcgatcgtcaccagggacccgatcatagccgtgccatgcgtgtattccaatgtcaccggagcgggaatcagggtgagacacagcgttgcggcatcgactgtatattcgaatgtgggcacagctgttcctttcatactgtttttattatcgttcgtccgctaatggcaggcgacacgtggtcgcgccgccatcagcggacgaatcgttggtgaggtacggcggcatacgctatttcacggcaccggtcgtcacgcccttcatgatgttacgctggatgagcatgaagaacaccaccaccggcagcgagaagatcaccgaagcggccatctgcccgccgaaatcggtgcccatggtgggtgtcgagaaggacgacagccataccggcagcgtgtacttcgactggtccttcatgaacgtataggcaatcatgtagtcgttccaggcgttgatgaacgcgaacaccgaggtcgagacgatgccgggcgcggccagcgggaaggtgatcttccacaggatctgccagtcgttcgcgccttccacggccgcggattcgaagatgtccttcgggatgttcaggaagaacccacgcatgttccagatcgcgaacggcagcaccatggcgatgtacgccaagatcagaccgctgtatttgttgagcagcccgagctggttgtagatgatgaactgcgggatgatgccgccggaggtcatctggatggccagtacgaacaccatgatcggcttgcggccgcggaagcggtacagggtcagggccgcgcacgcgaagaacgcgacgatgatcgacaggacgatcgagatggcggtcacgaccacgctgttcttgaggttggtcaggaacgaggtctgggtcacggcaacgatgaagttgtcgaacgagaggtgcgtgggccagaacacgggggtcgtggtcatgatctcatcgcgaggctttacggcggtgataatcatccagtagaccgggaagaaccatacgacgcagaacagcagggcgaggatagtggtgccggcgcggcgcgcgatcttgccggggttggttcggcggcggggcgctgcggcctgcgatacggcctgtgcaggacttgcactcattgacgtactcataggtcctctcctgacttgagcaggtaacggatgtacacggaggtcagcgcgagcagcacgatggtcacgagcacggaggcggccgaaccggtgccgatttcgaagctgacgaacgccttcttataggtgaagatgccgatggtggcggtcgtgtcctgtgggccgccctgcgagatgagccagatctggttgaacacgttgaagtcccagataatcgagagcatggtgatgaccatgatgctcggggagatcagcggcacgacgatctgccagtagcagcgcagcttgctgcagccatccagctgggcggcctcgatgcaggactggtcgacctgggtggtggccgcgtacagcgtgatggcgatgtatggcacggcctgccagaccacgagcagccagatctccagaaatgcgagccaggtgttgtcgatccaggaggtgttggtcatgtcgccgaagacgtgcagctgggtgagcagccagttgatgacgccgtaaccgggctggaacagccacttccagaccaccgaggatgcgacgttcggcatggcccacgcgaagatgagcacgaagatgaccaggtagcgcatcacaccgccgagtttggtcatcagctgggcgactcccatgccggccagcacgctgccggccacgagggctgcggtgaagccgaaggtgcgtagcagggccgcatagaaggccgggtcggtgagtacggattggtattgcttgaggccgacgaagtcgaattcgccggtgaacagcgtgcgctggctgaaatccgtgaaggacgtgaagatcatgaatcccagcgggatgaccaccagtgcgatgatgacgatgccggcgggcgtcagcagaaacgccggggcgcgattgccgcgtttcttagccggccgtgaggccggggcctcgccgtgcgcgagttgcgttgagcttgtcatggtccaacccatcacttggcatacagctcgttggcatgttcgtcgaacttcttggcggaggcctcggccttgctggtgtcggtggcgatgtccttgaacagggtcagcgagccgtcgctttcgatggtggtcccctgcggggaggcgggcgtggccttggtgcgcttggcggcctcgaagaagccggtcagggcggtcgggaagtcgtcggaggccatggccttgtccagtccttcgacgttgttgggcaggtagccgtccttggcgaacacgtagtcgttctggatgtcagggctggaggcgatcttgatccacttcagggccagatcctgcttggagctcttctgggccacgccccacacggagccggccatcatcgacggctggttctggccgctcaggccgggcatcgggaaggagccgagttcgtcggcggtgatgtctttgttgtattcctgaatcacgcggatggaggcgctgttgccgattacggcgccgatcttgccttcggccatgagctggctggtgtcggggctatcggtgtcgagcgggcgggaggcttcggatgaccacttgtgctggaattcacgccactgctcaaggccggacaccgattccttggtggacagggagctgacccatttgccgtccttctgcacggcgtagtcgccaccggcgtcccacacccactggatggcggtcttccaatcggcacccggcacatagaacggggtgaagtcctcgccttggtgcgcgtccttgagaatctgcaggtcggcttcaagctcggcgtaggtggtcggcggctcgttgatgccggccgcggcccaggtcttcttgttgtagaccactgcgcgggcggcaccgagggccggaatgccgtacagcttgccgtccacggtggcaggctcttccagaccggagagccaggtgacgccctggcgcaactcgtcagcgtggtcggtcaggtccatgaggccgccgctggccgcgaagccggcgacctgcgtattgccgaggtcgagcacgtcggggggggtgctggtggacagagccgtggtgattttggtgctgatgtccttccactgctggttctggatgttgacctcgacgccggtctctttggtgaactggtcgttgatggccttgatggtggcctcgctttgatcgccctgcatgacccagacggtgagcttgccatcgctcgaaccggtgtccgaggatggtgcgcccatcgagcatccggcgagggtaagggccgctgccgtgacgatggccgtggcctggagcaccctgcggatggcggggcgtacgttgtgctgctgcttcatgatgttccttcccgtccagttgtgaaccgttgcggctcgcttgatctggccgtctccattgactggtgatttcttgtaaacgtttacgagaaggagtataacactcacgtaaaggtttacaaatatcatgtgcgtgtcgtacttcacttaatatcggtaaatctcttttactatttacttcgtacacccttacggcagagaatgtttaccgactttcatacgccggcacggcaatccacaggcaccggacatgggccatgcggaatcatcaggaaaatcgcgcggtacaatcactgtgaacggccctaggacaggaaggagacgggcatggccataccccgtaagccggccactatcatggacgtcgccgcggcatccggcgtctcctacgccaccgtctcccgttatctcaacggcaatccgcatgtctcggccaaggcagccgagcgcatcgccgccgccgtcaagcaggtgaactacacgccgaacaacgccgcccgatcattggtacgccaacgcacgcaaaccgtggcgttcgtggtgcacgggcagccggattcgctaatcgccgaccccaatatcaacaccatcctgctcaacgccaaccagacgctcggcaatgccgattatcaactcatcacgctgatctccgactcccctgcggccggcgcacgcatcgccagactcgcctccagcggattcgccgacggatggattctcaacacgttccataaagatgacccgctatttcagagattcgccaatatcagcgtgccggtcgccatttccggcgtcggctatggcagcgccatccccttccccaccgtcgatatcgacaatcgactcgcttcacgcaagctcaccgagcatatgttggggcgcgggtatcggcgaatcgcctatatcatcggaccgccgtacttgccatgttccgacgaacgactgctcggattccaggatgcgatggccggcgatttcgacccggcactggtcattcggtccgacggctggacccggcccgatggccgcaacgccgtcgtgcggctgctggactcgctggctgagccgtcgggtagccgacttgccggcgccgacgccagcgtgcccgagctcctcgccgagcatcatatcgacgcgctgatatgcggcagtgattgcatcgccgctggagccatgaattatctgctcgaccgcggcgtgcgtgtgcccgacgatattgccattgccggcttcgacgacagcgccgacgccacagccctgcacccgcagctgaccaccgtgcgccagccaatggacgcattcggcgtcagcttggccaccctagtgcttgaccagatcgagggccgaccgttccagcgcacggtgttcctgcccaccgaggtcgtggccagaggctccaccggagagtaggcgcgcagagaacggttctcaataatatctgtgcgcacttctctacgcccgaagcgcacatggaatatgccctaatcactgccatgtcgccatttgcgatgatgtgagattgttatgttcttgttcatttgagcgcacagatactactgagaaccgttctctgcgcaaatagacaatgtggataactccataagctggaaccacattgccctgcctggcttgcattcaagtccaaatcagctttacggtcgcatcatgagctcttttatgcatgaggatattgtcggccgacgccgagcagaacgtgaacgttgcaatgatgctgcgcgccgttcaaaaggtccattgctggtgggatacatcaatgcggccaactactacggcgcgcccatcccccgacattgcacgctatctgttgatgccgtgcacgcctgtgtttccagtgccaacaaacgcagacgaatcaaaggcgtggtcttccatgtgtttaagggaaaactggatatccgcaaaaaggactatgaacatttctggattgcctcgccggtcatgatgtgggctcagatggcccaatactccacattggaggaacttgcggccattggagcctctttgatgagccgcgataaacggcgcagaatggccactcgcaaggatttcgatacttacttggaaatcagtccgcggttcataggtcgtaacaaatgccacgaggcactgccctacatgacagagaacacggattctccgccggaaaacacgctgtttgggatgctgaaggattcgggcttgggatgccccaccgccaactatcgcgtgaatatcggcaactcatacgtcatattggatatggcatatccggactgccgcgtcgcgttcgaatatcagggagcctatcacgccgatccggcacaaatgcgaattgacgcggcaaagcgaaacgcattgcaactgctcggctggatcgccattctcgtcactgcggatgacctgagaacagccgacacgcggcatcgttttatcgagatggcccatgtcgtggtgtcccggcaacgcaatctcgccgattggaaccgctcatgggccattacctcttagcatcgcaccgataatgcgctatgccgctatttaccgcgaggtgcccgccagacatcgggctcgacgtagatccccccattcataccaaggcagcgcggcacggcgtcctcgtccatgtgaatggcctgcaggttaatgcagcctatccacgccggcagtgcgctccactgcctcgaccaccaagtcgcgggtgctgtggtcaagcgattcgcccaccagcagcgagccggacttaaacgccagcgccgcctacaaaagtgtgaggccgcgcaggctcacactgccaacagccgttcagccaaccctcggaaggtctggccaatgccatccgtgcgcaaggcgccatcgacatccagcaccgcgggacggcctgcttcgccgatctcgcgcacttcgggttccagcggcagctgggccatcagcggcacgtcatagccaagcgccgcgcttaactgttcagacacgcgctgaccgccgccggcaccgaaaatctccagcttctcgccctcgtgctcgtagtagctcatgttctccaccacgccacgcaccttcatcggcacctgcagggccacgagtccggagcgcacggcgatgtcggaggcggagggctgcggggtggtgaccaccacgagttcggcgttgggcagcgcctgggccacggaaatcgccatgtcgccggtgccgggagccaagtcgagcaagaggacgtccggctcgccccaccatacgtcagacaggaactgttccaaggagcgctgcagtcgcggcccgcgccacagaatcgcccggtcggcaccggcgaacatgccgatggagatcagtttcacaccccacgcggtgaccggcataagcataccgttcagattggtgggctgcgtgtgcacgccgaacaggcgcggcagtgagaagccatagatgtccgcgtcgatggcggccgtgtcgaagccgagggccgcaaacgtggcggccaggttcgcggtaaccgaagacttgccgacgccgcccttgcccgaggcgatggcgaagatgcgggtcttgacgcccggcttgctgaaggggttccgcttgcgttcggccttgaggtcggcaaccagatcggccagcttgtcacgactcattgaaccgacttcgatatgaggcagcagctgtacgcccggataggagctgaccgcgccgttgatctggttggtgatggtctcgctcagtgggcatccgggaaccgtcagctcaacgtgcacggtgacgtcgtaagtgccggcgtccgacgatgcgggcgcggcttcgatagcggcaatcatgccgaggtcggtgaccgaacgaccgagctcggggtcgatgaccttgctcaggcgttcgtagatgtcggcttcgatctgacgtgcgtcgctcataaatccgtatcctcctttagggcctgttctaccctagcgtgtgatgcggcggcatgccagagggagtggagtaagtcacactggggcgggattcgctttttctctcccccagtcagcctaaaggctgacagccccctcatcagagggggttaatgaagcgtctgagggggctattttagatggtgccggtttctaggagctgggcgaattgggcttcgcccagcatggggatgccgagttcctc

SEQ ID NO: 2524 - DNA, 6243 bp, Unknown
  R50_10m  MAG No. k141_25783
agccgaaagctccgaagccgactgcaacaggccaagccgaggatacggacgacagccatcgagccggccaatccagtgcatccacggcggcgaagagctggagtgacgatgacccttgggccaagccggccgtaagcaacgcttcaccgcaatctgcagacgggttcgcacctaacgagcccgctgctgcgcctgcgcccgaagagcatcacaagaagcatgttgcggttccggacatcagtgatggtgttgatccgtgggccgctccggctgctcctgttgcacccgctgcgtccgttgcgtccgctggacccactggacagtccacggggcagccagccaccgcagctcccgctacggcagttgccggcgcaagcgatgatccatggaatcagccgcaatctcaggctacggcctcgctggcactgcaaccggtcgaagccgacccgtggaaccagccatatcagcagtctcctcacgatgatccgtggaatcagccgcaggggaaccatgctcaggcggctccgcagccaggagacgacccgtggaatcagccgcagtcccagactccggcttcttcggttcctcagacagtgtcgggcaatatgtcgggcaatatgtcgggcgatgacccgtggaaccagccccaatcggttccgcagccggctgccggcgatgacccgtggaatcaaccgcagcccgcacagccgacgccgaatgccgacccgtggaatagccagccgcagccgcaaccgcaagtcgcggccgaggacgacgaatactcgatgaacgaccagtcgctcggcgaggcgacggccatgaatcttgacgatctgaaaaagctattcgaggtcaaaaaagtcgagcaattcgcggcagatgatccgaagaaccccaagaacatccagcctgccaagaagcactcggatgaataatgaggacgaataacgaggaatacccatggcacttgcttatgacggcgcaatacagcgactgatcgacgctttcgggcggctgcccggcatcgggccgaagggcgcgcagcgtatcgccttctacatgctgtccgcgcccgaagatgaagcgcgcgatttggccgaggccatcgaggaggtcaaggccaagatccgcttctgtgatatttgcggcaacgtgtgcgaatccagcccctgcccggtatgcgccgacccgagacgcgaccgttcggtgatctgcgtggttgaagagcccaaggacgtgatgagcatcgagcgcacgcgcgaataccgcggcctataccatgtgctcggcggcgcaatcaacccaatggccaacgttggccctgccgacctgcgtattcccagtctgctcaaacgcttagaaggcgatgaggtcaaggaagtgattatggcgctcgacccgaatattgaaggcgaggccaccaccagctacttgacccagctattgcgacccgtaggtgtcaaggtcacccgacttgccagcggcctgccggtgggctccgacttggagtacgccgacgaaatcacgctgggcagggcgctggccggtcggcgtgaggcctaggccagcgtatcattggcgctttcgcccttgcggcgcatccacggccagaatgcgccgtggcggatgatgcgcgcggccttgtgccgtcgtgccaaccagataatgaacagtcctgccgccagtatgcccaggccaacaccaagggcgatattgcgcgcgtcaagcacgtcattcggctcgggggccggcatcggaattgccacgcggtgcccggagacaagcagtcgatgcgtgttcacgccgtatggcgtacaggtcatcaaggtgacacggtcctcacccggcacaatcttgagcttcgacgtgtcatccggcaaaatcactgaaatgcggtccactttgtagcccaaagtttcgcccatgacttcgatgtagaagaagtcgccctctttcacctcgtccaaacgggtgaacatcagcgcttcaaccaacccgcggtgcccggtaatgaccgaatgggtggatttacctcccaccggcagcgacgtgccgtacaggtggccggcaccagaagccagtgcttcctcggaagtgccgtgataaatcggcagattgatggactgtttgggcaccttgattgcgcccatcacgccgttgccggtattaagcagtgactggtattccttgtctttctttgaggcggaatcctcgccgctggcttgggatcctccttgggcggcggagaacggatcgacggcttcacccaagatgggctggccggattcagcgagcttcttgttgtatgcgtgggccgccgtgagcttgtctttcgcctgcgggtaaggccagccggctacttctttggctgtggtggctgtggtggcggccaagttgcggtcggactcgaattgcaacgctagcgggaaacaggccacggcgattgcggcgatcagcaacacaatggtgatgatgcgcatcgcccacagattgcgttgcaggcgtcggcgctcggccacgagatcgctaatatcgatgacttcgtcaaatggagttggaacgaatgctgtgggctcgggacgcgctggggaaacgttgtcatttgcagatgtgtcatcaggcatggccgcgttgttttcccgcattttctgtgaggcacggttactcgtcgaacgtcgatgcagcaatgccatagtcgcctgttccttcgcttgatctgctcatgatttgcttatacaagacagccggcccgtcttagtcgtggttggcataggtgctgccgcaagtggcaacgccgcacgtgccacactgcgaaacgttactccgcaccaagcctttcatgcaacatgccgacgagggccatataggggccatataggggcaatgtaggggtataagaagtccgaaaaagtctagttcgtaatctagtgtccaacttccctaatagggatggtccaacttccacaacgaaaatggtccaacttccacaatagagcgggaccgggccttgaaaaggagagaggaagaagaaggtattcagttatggggttctgcggaaacctcgccggtttgctttcgtttgccggtaattgatagttaaccgctcgaatctcaaaggatggatgcggctgtctcaaagaaccaccggtgaaaacttgaatatttgctgaacaacgtaggccatacccgtgtccgcatgccggcgcggggtcgcggggtgaacgcgacagcccttataatcgttgcgtttgcgtagaatatcgaccaaacaaatccctaagagaagaacaaaggacagcagtggctctcatcgtgcagaagtacggcggctcgtcggtcgccgataccgattcgatcaaacgtgtggccaagcgcgttgtggagacggagaagaagggcaataaggtggccgtggtggtctccgccatgggcgataccaccgatgaccttatcgatcaggcgctgagcatcgactccaacccgcccgagcgcgagatggatatgctgatgactgcaggcgagcgaatttccatgagcctgctggccatggccattcacgccgaaggcagccgcgcccactccttcaccggtcagcaggccggcttcttcaccgacacccgttacggcgcggcccacatcaaggccgtgagaccggaccgcgtgaagaacgcgctctcattgggagacatcgccatcgttgccggcttccagggcatcaacgccaagggtgacgccaccacgctcggccgcggtggttcggacacgtccgccgtggcactcgctgtggcccttggtgccgacatctgcgagatttacaccgacgtggacggcatctttaccgccgatccgcgcatcgtgccttccgcccgccgtattccttccatcggctacgaagccattctggaaatggcctcctgcggctccaaggtgctggcactgcgctgcgtagagtacgctcagcgtttcaacatgccgctgcatgtgcgctcttcgttctcccgtcgccccggcacgctggttgtgcctgacggcattgacccgcgcacgctgccgaacctcgactgagcgcggctacagcgaacaataatcgtaagtaatttcaaccaagacaaggcaagacatgactgaagaagaagcgaaatccatgggcgacctgttccctgacctaggccccgaggcgccggtgatttccggcattgcccacgaccgttccgaggcgctggccaccgtgcgtggcgtgccgaacgagccgggtatggccgccaaggtgttcaccgagctggccaccgccggcgtgaacgtggacatgatcgtgcaggccggcgcatccgtcggcactgcggacatctccttcaccgtgcccgaatcggccgtcaagcaggtgcagaacacgctgctcgacaagcaggaagtgctgggttaccactcctttgatgtgaacaccaacgtcggcaaggtagccgtggtgggtgttggcatgaagacccacgccggtctggctgccaagttcttccaggccctgagcgatgagggcatcaacgtgctgatgatttccacttccgagattcgtatcgccgcgcttgtgccgctcgaccagctgaacgacgccgtcaaggcgctgcacactgcatacggtctcgatgccgatcagatcgaagccgtggtgtacggcggtactggccgctgagccgcgaattccgcgcctaatacgatgaaagccctccttgcggagggcttttgcgattttaacgagattcaactacttcttagtgatgtagcctagagccttgagcatttcggcgcattcgagggcgccgccggctgcaccacgcagggtgttgtgggccagacccacgaacttccaatcgaagatggaatcctcacgcagacggccgatggaaacgcccatgccaccctcgtagtccacgtcgagcttgacctgcgggcggtcatcctcggtgaggtactggatgaagtgcttcggcgcgtgcggcagctccagctcggaagccttggacgtgtagttcaccagacggtcgataagctcttccttggtggccttcttgccgaagttcaggaacacggtggcggtgtgaccgttgagcacgggcacgcggatgcattgcgaagtgatcttgaggtcgccgtcgaacggcacgatctcgcccttttcggcgtccacatggccgaacaccttgagcggttccttctcggacttcgcttcttcaccagagatgaacgggatgatgttgcccaccatctcaggccaatccttgaaggtcttgcctgcgccggaaatcgcctgataggtgctcacaaccacctcacgcggctcgaattccttccatgcggccagtgccggcgtgtaggtctgaatcgagcagttcggcttgacggcgatgaaaccacgagtggtgcccaagcgcttgcgctggtgctcgatcacctcgaagtgctccgggttgatctccggcaccaccatcggcacgtccggggtccaacggtgagcgctgttgttggagaccaccggggtctcggtcttggcataacgctcttcaatggcgcgaatctggtccttcggcatgtttaccgcagagaacatgaaatcaacgccagaggccatggactcggcatcgtcgccatcgacgaccaccatgttcttgacgtattcgggcatcggggtttccatcttccaacggtctccgaccgcctcggcatacgtcttgccggcgctgtgcgcggaagcggcaagggtgaccacctcgaaccacgggtgattctcaagcagcgtgataaaacgctgacctaccataccggtggcaccaaggatgccgaccttcaatttttcggacatgatgacctctatgacctctgggtttcgatgggttacttgcgttcggacggccgtcatacgggtgaccgtaaaacaatgacattgtatgaaacgtgcggaacaacagtagcggtcttcccagatggtgactgcccgatgaagcgaaggtgatgttctacactggtagccatgtctatcgcatcagtagaggcccaaaaacagctcgaccgtatcgtggctctcggctacccggatgtggcggatatttccgccgccgcattccgctcgctggcccgacctctgatcggggcgctcgagcattccgatttgggatcgaacatcctgctggtgcccacgcgtgaactggtttcgcctgagtcgctgattgcacgaacctccatcaatcgcat

SEQ ID NO: 2525 - DNA, 4528 bp, Unknown
  R50_10m  MAG No. k141_25887
atccagaacgtcaaacgacgggcgagaggcttccgcgacatggaccactccgccaccatgatctacctgacctgcggcagactcgacctcaaagccgtcaccaccacttgaccatcacccaccacaaacagcgaatagcctttgtattttctcagtttccatacggttttttcgtttggtttcttgcttagttttccgtctggctttttgtgcgcttttcaaatgctgtacacttcgcgcgtcgtttcgcgcgttgctttggcgatttccgccaacgaacggtcgagataatcggcgagcgcctgcagagtgtagggaatcatgtatggtgcattagtgcggccgcggtatggcatcggacttaagtagggggcgtcggtctcgaccatgacatggctcatgccgacgagtttcgcggattcgcggataccgtcgttgcctttgtagctggatgtgccggaaaggcttaaataccaaccgttttcgcgggcgatttcacccatttcgacgtcgccggagtaactgtggaacacagtacgttcgggggcaccgtcggcgaggagtgtttcgatgacttccttgtgggagtcgcggtcgtgaatctgcatgggcagattgagctccttggcgagggcgatatgcgcacgaaacgcctcacattgcagctctttggcaccttcaccagtgcggaacaagtccatgccggtttcgccgatggccacgacttgattagggtaggtagtggcgagacggtgaacttcggccatggcatcgtcaaaggggatgtcgtgccagggcttgtatttgatgggcaggccgtcaggtccgggtacgccgcgatgaccatgcaatacggattcgttggggtggatggcgattgcggcgtgcacggttcccgggtgttcgcgggccatgtcgatggcggtcatgagattgggcagctcgcaaccgcagtcgattacgccttcgacgccgacatcctgggcttgtttcagcagttcgtcaacactgtagacaggcacttcgccctggcctttttccatggcttcgtggctcatggcttgcgagaaaggcacgacggatgcgacgtgggtgtggttgtcgatgacgtgcgcgtcttcgggaagtggctgtggggccggcgcccagttgcgattgcgatgatgcttgctcatggcttccagattacgcttcctgcgatggccagcattgctcgtatccgactccggtgagtcgttcgaccacggcacgggttttgtcggtgacgtcggctttgctgccgccgtgctgcagtcgtgcgatctcgtcaagcagaatggcgtcggtttccttgctgatcgccatccgttgcgatgcgatccagccgacaatcatggcgacggcgaaccagccgagcaacatggcgccgatgacgatgtgtgccgcgaatggctgcgtgccgtgttgggagtcgaatcccgttgcggcgagcacgaggccgacgccgatggacagcagtccgctgcacagctggcgtgcgaaggtctgcgtgccgaggaacgtggctgagcggtatcgtccggtgacgatgtggtccacatccgccatgtaggggaacacttgccatggcaggtatccgcaaagggatttgaacgagaagaaccacagcgcgccgatgacggtgaacaccgtccatgccggtcgtggcatgacgcctgcgcacagccagctggcgagcagccaggccacgccaatcaaacagccggcgaaattgatggcgtagaggcggcgggggccgatagctacgaccgcccagccgaatgccggcatcagtggtagggagatcacggcgcaggtgagcagcatcgatccgaaggctgcggaggagccccaatcgtagatggcgaagaacaggaacagctgtccgaacaggtccattgagaccattaccatgacgtatacgaccaggtggcggcggaattcggcgatacgcagcgtggacaggtattcgcgcagcatgacggcggcgcgatgcgtccacgtccggatgacggaacaggtctgtccggcgggccggccggcgttccgatggacggagccctgtgcgccacgggagagcgtctcgtatacgccgaatccggcctcccgcggcgtcatctcccatgtggagtgccagcagatgacaatcgccagcgagaacatggccgtcactacgaacgtgaatcccatgtatccaccgggatggtcctcccccaccgtggccagcacaatgccgccgaccagcggaatcagcgtgcccgaagcggtggcgaggaacagcctcacggtggacagcgtggtgcgttcgctgaaatcggttgtcatttcgccgggaagtgtgctgtacgatgtgccgaacagctgcgcgagcatgacccacaccacgtagaccaagcagtacagcgctaccggaagccccggaatccatagcaggaagccgaccagcaccgccggcgccacgacggcgagcaccagtcggcggcgaccgaaccgacgacctacacggaagcggtagagattatcgcacagcacgccgaagccgagggccgcgaacgcgctcagaatggcgctcatgccgatcacgccttgcgtcagaccgatgtccatgccgcagaaacgattccagaacagcgcaaggtaggtggccacaagcgcgccttggccaccgccgtacagatcgcccatgccgtatccgatggccgacatgaacgtgaccttgcgccgtgttccagattgtttcacagtgcgtttcacgatgattcaccccgtgtgatttcgctatttgagcgcgatgacggtgaacgaccacgccggcgccgcataggtgccgtccatcagatcgagcggagtattgaccggcttggtcggcgattcctcgccgacctgtccggcatacggatcgttgccggccaggatggtggccgttgccgtcgctgcggattgcgcggagacgtcgagtccggcgaggatctgactcaggtctacatccaccggttcgtccatggcgttgaccacgcgcacgtaggtttctcctgccttggcgttgcgcgatacggtgacagtgcgcctcggctcgtccttgacctccgtgccgtccgcgatcagcgttccatcgatgtacagcttcatggcctggccgcggccggtaacatcggcgtgcacctgccaggtggtgcccggcaacacttcgttcatggagacttcggtgccggcgagcgcgtaggctgtgccgtcgcggaccacgcggacgctgtggcctcggccgaatgagacgatgttgtggtttttgccgtcgatgtcgccgcagatgagatccatgccccatttgccttcgtagtagacgacggtggcatcgatgctgtaggcgtccgtgtgcaggtcgagcggggtgtcgatggttctgccgtcgtaggacacgtcaccgaggttgaccgtttctccggacgcggtggtgacggtgaggttgttgaagtcggctttggcgttgcctgcgatgcgcagtctcactgtgtcgggcagggtgcggcgcagcgtggatgggccttcgacggcgacgggccaggcggtgtcggccgtggtggtggcatacatttgctgtacccagtagctgtagggatggtaggcgcgttcgttgtcgaagtagataaggtccgggttccagctgtggtggctgttcttggcgaacagcggggcataggaggccatggccaccacgtcgccgttgagttccatgcgtcccatgaaggccgcttcggataggccgttgatcagttgggtgttccaggagccgtattcgccgaggtaaaccttcgggcccttgcggtccgtgtggtcgtagtggtcaaggttgtggaaccaccagctggatgactggtaggagtgttcgtcgacgatcggcaggcccgcttcgcgcgcgtatttccaaccttcctcatagtccttgccgctgggggatggtccgacggtgccgacgacgacgatgtccgggtatgcggctttgacggcatcgaagatctgttggaagcggtttttgaacacgtcgtcgatgaggtcttcattgccgatgccgaggtattcgaggccgaacggttcagggtggcccatggcggcgcgcttggcgccccattcggtgtcggtgccgccgttgcagaattcgatgaggtgcagcacttcatcgatgtaggtgggcatgtcctcctgagccactggcaccgggccttggctggtgttctggcagctcacaccggcaggtagcaccggcagcggcttggcaccgatggtttcgcacaggcacaggtattcgtagtagccgatgcggaacgactggtggtatccccagaggttgaagttgtgcggacggtgttcgactggtccgatggtgcggtcccagtggtacatgttgtccatgccgaggccgtgggtgatgcagccgccggggaatcgcatgaatcgtggtttaaggtcggcgagcgccttcaccaggtccggacggaagtgtttgagcccgtgg

SEQ ID NO: 2526 - DNA, 6460 bp, Unknown
  R50_10m  MAG No. k141_25891
accgtcagccgcgtgtaatccggcatgttctcggccagcacgcgcagttgcttgggagtgaccggcgggatgtcctcccttacggaatccggttccggcggtatcggaaagatgaacggattgtccttaagcaatggcggggacccatccatgctcatggttgtggccgagcggaacacggccttgagccgcatgcaggcccgtcggaacgaccactgcccctcgggatgcgggccgtcataccagtttttgatatgtctgggcttgatttccgtcaggcgcagtccttcgaacgcgggcatgaaatgggcgcgatgtccaggtacaggttgcgtctggttccgccggctatccgttcgccgttgggcagcgtgtattcgacggcccattgctcgacatactccttgaacatcatctggttggctcgttcccgcctcatgcggtcacggggatgaacccacgtttggatgcctttggtatgtagatcgaccagatgatgctcgttctccaaccacacatgagcctcgtgctcctgatgtggcttgaattgcttctgcaccttcttgccatgatccacggggttcggataacgaacctgccatgcgctgaggctaccggaatcgtcgtatcggggaatgacggtaccccattggctacgcggcttggacatgactttccccactggaatgttggtttttggcatgattgctctcccttgaacaaaaagtgcacccaaatatgcacttaagggagattgaagaaaacctgcatatgcagctcaacacaaggcggcaagtctgcgcgatttcggtacgcggctagagcgtccttggttacttcggctacgataaagccaagcctaggaaccttgaaataccgcccaagctagggtgtttgcgacggtgcaaccctatgctatagtggcatccagaattgaagttgaatcatgcaccacttccggagaggaggtagggcgcatgagcggtgatgttgttgccccctctctgggggtacttcattgaagacctcggtcatagcgaccgaggtcttttcgtattcgcgggaccaggcctgaaagcattcggcccacttccctgaaggaaacgggccgaatgcttggactcgggtttcaacccggaaggcttcagtccagcgatttcaccacaacgacctcggtgggcacgttgcccgcggtggccttggagtaggggcacagctcctgcgtacgctcgacgagcttggcggcagcctcatcgtcaagatcgggcagaactacctcaatcttgcccttcaggccgaaggactcgccttcaggaccgagcgagatgctggcgcgcacctgactcttggccagcttggtggccgccacgcgctgctccttggcggcaagcgccaacgctccttggaagcaggcgccccagccgatggcgaacagctgctcggggttcgtgccctgacccttgccgcccatggcgaccggcgtgtccaggtcgaactccagttccggctcatggctcacggcgtggccgttgcggccgcccgtaacctgcgccgtagcggtgtagacgatttgcgatggttcgttaccttgatatgtgctcatgctttcatctcagcacgtgttcacgcccgccacaaggactgtcccaccgtagacgatgtgacatcatccacactgtgacttcgcgcacagagtcccgacaccgtcctcacctcgtttatcggcaccatgcgtgtataaccacatatggcattatcggcgaatatcggccggcagaccagttgcacaaggagaacatcatccacatggcagacaccgccaacaccaacgcctggttgccggcgctcaaagcggcgtttccgctgaccataccgatttgcctgggattcctgtttctcggcgcctcatacggcattctcatgggcaccaagggcttctcgtttgtatggccgatgtgcatgagcgcgttcatcttcgccggttcgatggaattcgtcacggtgaatctgctgctctccgcgttcaacccactcgccggctttctgctggccctgatggtcaacgcccgtcacctgttttatggactatccatgctcggcaaattcaaggggctcggctggaagcgtccgtacctgattttcggcatgtgcgacgagacctttgccatcaactccaccgcgaaaatccccgccggtatcgaccgaagctggttctacttctgggtcacgctgtgcaaccagctgtattgggtgaccggcgccacactgggcgggctgattggcgcgcatctgccgttcaataccgacggtcttgatttcgtactgaccgcgctgtttctggtgatcttcctcgatcagtggctcgccggcaagcatcgcgagcgactgtccgccgtcatcggtgtgctgacgtcgctggcctgcctgctgatattcggggccaatgatttcatgattccctcaatgatcgccatgctgatactgttcgtcgcgttgcgcccgcatctggatgtgttgcggccggccgccgacgccccggaagccacggcagaccgtgccatgagccacgcagcggaccagcagaaggaaggacagacgcgatgacgatgaccatctggcaaggcgcgctcaccatcgtaacggtggtgctggggacgatgtgcacccgttttctgccgttcctggtatttcccgaatccaagcagccgccgcgcgtcatcgaatatttcagccgagtcctgccctatgcgatgaccggtctgctggtggtatacgcactgcgcaacaccccgattctgaccggttcacacggccttccggaactcatcgcctgcaccgtcatcgtgctgctgcacgtctggaaacgcagtatgctgctttcaatcgccggcggcacgatcgtatacatgctactggtgcagctggtgttctgaggttgggctcggcttctccttcgttgatctctccctccggtcgccttcggcgaccacctccctctgtgagggaggtgctgaacgcagcgaagcggaggtagagacccgcggtcgtaagactgcgaaacacacagcatcggccacaggccgattcctacagctgcttcgccacccaatcgacgatgtacggagcgacttcctcaatctggtcgatggcgacctcgaactcgtgcttgccgccgtaccacggatccactaaatcaatctgatcctcgcggccgggcttcggcttgggcagattcgggtcgaagctgcggtacatgtgcacttcggcgcgcttgccggccggcagcatgcgcagcagggcgcgcatgtgggaggcggtcatcggcaggaacaggtcggtacggtcgatttcctcacgtgagatgcggtgtgcgaagtggtcacgcggaatctcatcaccatagccacgttcgcgtagcacacgcacggcacgcgggtcgatcggatggctccactcctcgtcggacacaccgctggattccacgttcacctggtcgccgagaccgcgctcattaaagaagtgacgcagaataatctcgcccataggcgaacggcagatattgccggtgcagacggtcattacggtgtagggctgggtattgctcatagctttgaatcaatcctcaatcgggcttcaccgggccgcacacggcccgaatgtgtttttggggtcgaatgaatatgaatccggctcatgccgccataaaggacacaagccggattcgcatgctcacttggttttagccaagatacggaaacgataggaatcgatgccggactcctccttggcgggcgtatgccactcgcccacttcggcttcccgccacatcccggcctcgaccagcgacgccatatcgggcgcatagctgtcggcatccacagtgacggccagatcagtcacataggctttgtccgcgaacggcaacgcctcggcgaacagctgggcaccgccgatgatccaaatctccgaacggtccagaccgtcgtccggaatcgcctcctgacgggccatatcgagcgcgtcgtcaagactggtgaccacagtggctcccggcgcacggtacatcggatcgtgggaaacgacgatgttgtcgcggttgggcagcggccggtacttgaccctcagcgattcccaagtcttacgacccataatcaccggatgggagacggtcagctccttgagatgcttcatatcctcggcacagtgccaaggcatgccgccattgaggccgatggcaccggcgcgaccttccttgtcgcgggcttcggaccagataagattcaccgagaaggtcttgggataatcgtcaccccagtcttcttcagtggcagacagcccggcagatccgggctcgggttcgtgatagccgctacggctactgtcatgctccatttcgcttactcctcctggattgcggaactgggccttagtgtagtggacagcgaagactcggggcccgtcgcctccacattcttcgctgcccacgaaatggtaatcagcatcagaccgcaacaggtgccttaatagtagggtgatgctggtagccgacgaccttgaagtcctcatactggtagtcgaacagggaatcggccttacgaatctcgatggtcgggtacgggtagggcttgcggcccagctgctcaaggaactggtcgacgtggttgtcgtagacgtggcagtcgccgccggtccagacgaattcgcccggcttgagcccggtctgctgcgccatcatcatggtgagcagcgagtaggaagcgatgttgaacggcacgccgaggaacatgtcgcaggaacgctggtacagctggcagcttagcttgccgtcggccacgtagaactggaagagcgcgtggcagggcggcaacgccatcttctccacctcggccggattccacgcggagacgatcatgcggcgcgaatccggatgatgcttgatgaggtcgagcacattggagatctggtcgatggtgcgattcgggtcctcgggggtcggcgcgggccaggaacgccactgcacgccatagaccgggcctaggtcgccgttctcgtccgcccactcatcccaaatatgcacgttgtgctccagcagccagttgatgttggaggaacccttcaaaaaccacagcagctcgtaggccaggcccttgaagaacacggtcttggtggtcagcagcgggaagtacttcgacaggtcgaagcgcatctgctggccgaacagggaaatcgtgccggtgccggtgcgatcggacttcagcgtgccttcggtcaggatcttgcgcaccaggtcctcatagggcatcggaatgtccgtttcgggacgtgcggggatacgggagcgaatatctgcgagttgttcttcggtcaaagccatgtgcaccagtgtagcttaggggcataatagagaagtccgatgatgcgggagagcggccaggtgccgcgctcccccgctggcatggcgatgggccagatcgccggcggctgaaaataaaggagcagctatgggtaagcgactgtgggttgaacgcaacaaggacggttcgtgggatgcgttcagcgacgatggcgcgcacattaagttcggcaaggatcgtggccagttcacgccgggcgatctgatgaaggtcgcgctggccggttgcgccgcgctgtccagccagttcgccatcgaacatacgctgggtgagggcaagggtgccaagatcgtggtggatggcacgtacgaccccgagaacgacgcctacaccggtttcgaggagcaggtggtgattgatgcttctgacgccagcctgtccgaggaggatgccaacaagctcaaggaacgcgtcacccgccatatcgacaagggctgcacggtcaagcacacctacgtacaggagaccccggtgcgcatgaacgtcaccgtcaagcactgacgtactaataaaccgacgtactaataaattgagctccctctgatgagggagctcattgtatacccggactttactgcctgtcgggatcgatggtcttttcgatctgctgggcgacttcaggctcggctgcggacaccggaatctcctcgacgccggcaatctcctccagcgacttggtaggcacttcggcgggcgagctcggcacggtgtcgagacgcgattccgcagcctcaacatacttgcgtggcaccacgtacaccgggccggccgcatgctgcagcagtccctggctggtggagcccagcagcagaccggtgaagccgccgcgaccacgggagccgacaacaacaacatcgtgatcgtagctggccttggtcagtgcgctgacggccgggccggaaacgatctgcttgttgattttcagatcaggatgcgattcctgcaacggcttgatacgcacctcaagatcgtccttgtaggactccatgatggcatcctcgccatccacgcccttcaggttcggcacagcggaaatcacgtccagt

SEQ ID NO: 2527 - DNA, 10307 bp, Unknown
  R50_10m  MAG No. k141_25892
aggttatccataccagcttgcacaacctcttcagtgcgagtatcaatcgaggacgtggcctcgtcaaggatcagcgcgggcggatcggccaccgccgcacgggcaatggaaatcagctggcgctggccttgggacaggccggaaccgtcgccttcgagcactgtgtcgtagcccttgggcagcatgcggatgaagctgtccgcattgactagacgcgcggcctcgatgcattcctcatcggtggcgttcaggcggccgtaacggatgttgtccatcacggtgccggtgaacaggttcacgtcctgcagcacgatgcccaaagacctgcgcaggtcaggcttcttgatgccggccacggagatgccatcatacagaatctggccgtgctggatgtcgtagaaccggttgatgaggttggtcacggtggtcttgccggcaccggtggcgccgacgagcgcgatcttctggccgggcttggcgaaccaggtgatgtcgtgcagcaccggcttgtccgggttgtagccgaaggtcacgttggtgaagcgcacgtcgccgcgcagcagcgtataacgcccatcaggcgaggtgatcgcctgctccttggccttcatcgccacctcgcaggcggaaccgcgcagcttttcggcggccttcagagacctcataccatcgtcgccgatctcacgcttccacgcccagtggccggtctcatggtcgacttcggtcatggtgcggccgtccggcccaagttccacgttcacgagcgtcacggtgcccttgtcttcctcgatgggttcgtccatcaacttgaagatgcgggaggcgccggcgagcgccatcatcaccatggtcagctgctgggagacctggccgatcgggttgatgaacgagcgggacaaggtcagcagggagacgagcgtgccgagggtgagcggcttgacaccggtcagaccgatgtcattgacgccggccagcgaaacggcggcaccgacgatggcgagcaggatgtagagcagatagcccatattgccgacgaccggcatggtcacattgccccaagtgttcgcctcggcggacgcctcaaagagttcctcgttcttctcatcgaaggtcttctgagtggcgtcctcatggttgaagaccttgatgaccttctgaccattgacggactcctccacgaaggcgttcacgtcgccgatccactgctgctgcttgacgaagtagcggccggaacggctcacgatcttgcgcacgatgaaatacagcagaacggtgaacacaatcacgaacgcagtgaacgggattgacagccacagcatggacagcaatgccgcaatcgcggagataatcgaggagaacatctgcgggaacgactgcgagatggcctggcgcagcgtatcggtgtcgttggtgtagtggctcatgatgtcgccgtgctcgtggctgtcgaagtagcggatcggcagcttctgttggtgggcgaacatatcgtcacgaatcttcttgagcgtgccctgttcaacggtgatgatcagccactgccaagcccaggatgccacgataccggccacatacaggcagcccatcagactgatggcgcgcagcaacggagcccagtcggggttcgattcccccaccatcggcaggatgtaggtgtcaatcagcgattggaggaacagcgcggatccggcctgcgcggcggcaccgatcaggatgcacactacgatggcgataacgcgcaatttgtattggaagatgtagctgaagatgcgcttgatggttccggggtcggctttgcccatggcgggctcgcgattcttgaaactctggtcgttgctcatcgtgcttctccttccttggtatcggctgcattggtatcagctgcgctggtatcggccgtgggcatggtcactgtcaccgtcacggtttcggacggctcagcggtagatgactcagcagcctgtccggcagcggccagttcttcgggcttagcctggctcttggtctgggattcgtaaatggaacggtattcgtcgcaagtggtgagcagttcctcgtgcgtgccggaggccatgatacggccggaatccatgacaagaatcatgtcggattcctgcacggaggccacgcgctgggcgatgatgatcttcgtggtgtccgggatctcgttgtggaatgcggcgcggatcagcttgtccgtcttggtatcgacggcgctggtcgaatcgtcgagaatcagaatcttcggcttcttcagcagcgcacgggcgatgcacaggcgctggcgctgtccgccggacacattggtaccgccctgctcgatgtacgtgtcgtacttatcggggaattcctgaacgaatccatcggcctgcgcgagctgcgcggcatggcgaatctcttcatcggtggcgttcgggttgccccagcgcaggttttcggcaatagtgccggagaacagcacgttcttctgcaacaccatggccacctgatcgcgcagcgcctcaatgtcatagtcgcgcacgtccacgccgccgaccttgagcgagccagagctcacgtcgtacagtcgcggcaccagctgcaccaaagacgactttgccgaaccagtaccgccgacgatgccgatggtcatgccggagcgaatcttcaggttgatgtcgtcaagcacgggcttttcggaactgtcggagtagcggaaggtgacgtggtcgaattcgatggagccgtcggccatgtcagtcaccgggtgagccgggttctgcaccgtgctttcctcctgcagcacctggcagatacgctcggcagaagcctgagaaataatcaccatgacgaaaatcatggacagcatcatcatggccataagaatctgcatggcataggtgaccagcgaagtcagctcgccggtggacaggcccaacgccgcattattgccggaagcgacgatctgctgcgcgcccatccatgcgatgagaatcatcgaggcgtagacgcacaccatcatgatcggcatgttgaagctcatgatgcgctcagccttggtgaagtccttgaagatgcgctgggagatgcggccgaacttggagacctcgaaggattcgcggttataggacttgaccacgcggatgccctgcaggttctcgtcgaccacgttgttcaacgcatcgtaggtgtgaaacacgcgctcgaacacggggtgcacgagcacgaccagaccgcacaggccgatggccaggatcgggatgcaggccaggaacaccagggagatcgacggggagatacggaacgaaaacagccaggctacgaccaccatgatcggggcacgcacgcccagacgaatgatcatcatgtaggcgttctgcaggttcgtcacgtcggtggtcagtcgggtcacgatcgaaccggtggagaaccggtcaatattggtgaagctgaagccctgcaccttctcgaactggtccttgcgcaggttcttggcgaagcccgcgccggccacggccgcgtactttccggacaggaagccggcacccagcgaaaccatcgcgcacatcagcagaatcacgccgaacttgacggtggccggcatgctgccaccggtgataccctcatcgatcagcgaagccatgatggtcggaatcaggatttccagaataccttcgaccgccacgaacaccggagccaggatgctggctttcttgtattcacgaatcgaatgacccagcgtgcgcagtacatgcttaggtctaccgggttcgacggctttgcgcgcctgcgcgattgcctctgcggtatcgctcattcgttctcctccttcgtgttagcaacctccgctccgtcttgatcgggagccatcaccacaggtgactgagggagtgtttgatgttcaaattcataatcaagagacccatatacaacagttgtacatacaacaatcagcgtgttgtagtatttccggctcttccgattttggcgtgtaagggcatgtgtcagaggtgggtttggatggcgtgtctgaagccgccggcgtgcagcaggcttctggtgatggtggcgtcgaggttgcggaagcccagggccatgcccctgagggtctcgagccttccgctacggcaggtccttacgttcgaacacccacatggtctcgtccgtggatctgttgtcggtaagaatcgtcaacatgaaccgctcaccgtcgttcttcacgtaaccgcattgcactgcaccttccgacttgagccggctacggacgacatcgtagtcaagcagtcgcaggagaccttcttgatattcgggagcaatcctcacataacaaaactcacgtaatgcttcgcggaaggaaccgccatgaccatcaagcatacgctgaaagaaatcgggcaccatgatcgaacgctgcgtatcggtattcagattgactataaatgacaccggataacgtacattcagatgttcaagcagcattttcatatcctcatcgcgcaccagaatatcctcaagctggttgttgagcatgcggagctggcgtttgcctccgccattgacgtaataccgtttcttgtcctgacgcatacggatttccgcctgattgatgaggtccggaagatcccctccatcatcggattcggccatgcctacggatatatcccaatcaccttccagaaaatcccgacgcatacgcgccatccgacgcatactttggctcaccgtatggttgcagctgacaatcacgaactcatcgcctccgatgcggtagatcctgtcgtccccgaagcaggcacgcatcgcattcgcaagtccgcacaacgccgaatcgcccttggcatgccccaaatggttgttgatttcatgcagtccgatcatgtcgacgtacaccaccgtcaacggcttgtcatgcgtggtctggatgtactccaagtcatcatcgtaggcattgcggttgagtagtcccgtaagcgagtccctgcggtaattatcggcatcgccgcatgccaatagtcctatgggcagattctgtccgaccagcaccacagcccaagggtcggatggggagcatgcgtgcgtgggaatcgccgcgaatgcgactacgccggttttggccaatacctcgctgcggtatatccccagcacggtttcctgcctgtatagccgttcccggatcgaagacagactcagatcggtgaagaatcgtccggcatcgtcaggatgcaccacccggctggcggccaccgcacgcaggtaagcgccgaattcgtcgacttccggatcgggaatcaccccatcccgtttgatgacacggtattcgcctgtctccacattcaaccgggatatttccgccagaccatcagctaggatttcaaaggtgtcggccgccaacgcggagactcccaacagcacccggccgttgacggtcacatgattgcgatgcaggtaatcgcacgacatatcccaatagtgccgaccgtcggcgcgttcggccaacagcgtttccatctgtttcaccggcagtggagggtagaaataatatccttggatgtattcacacccgactgctttcagccgatcgacctgttccttggtctgggcgccctcggcgatgaccatcagatgcagcttcttggccatcacaattatggattggatgattttcacgcctttaccggcattctccttgctcagctcgatgaacttcgcgtccagtttgatcatatcgacattaatgtctttgagcatgttcagcgaggaatatgccgaaccgaaatcatccatcagcaccacgatgcctctcgcatgcagtttacggattgtgtccttcaccatggacaggtttttcgccacggtgctttcggtgatttccacccgcaacagacgcgcgtcgacgtcatattcgttcaacagcccgccgatcacgtcggccacatccatctggtcgatatccatcatggacacgttcacggaaaccggtaccagattgcgtccttcacgctcccatctgcccagcatctcaaccacgaagcgccatacgaacatatccacatggcagatacgcccggctctttccaataccgggacgaaccatcctggggaaatcacgccatatttggggtgattccagcgcaccaacgcctcggctcctacaatagctcccgtctccgcattgcatttaggctgcagataacagcagaattcgccgttttcgagcgcatgatcgatgtcttcgaatgtgaaaaaaggcaccagctcgtcgttagacggcattccgcccatttccggcatgtcggtcacgcggtcctcccctcgtcgaaaaaactatccgtggtattcgccgttgtactgtatcagtgttacgtcctcgacgccgtcaatcgcacggatacgttcggcgaacgtcatatccttgtcgtcgcaaaacacttcgacggccatttccgtgcgttcgctacgcatggttttggatttgacgaagaatttggtacgtccgaacgcgcgcgtgatctcatcgccaaccatatcgcccacatagtggatcaccgcaatgtacacgcgtcccttgtcctgatgcgaataaaacaatgccaacataccgatcatcaccaatccggcaacaatcaccagcacatacatgcccgcacccgccgcgatacctgaagtaatcgaccagaacaaatacagcagatccatcggatccttgaccgcggtacggtaacgcacaatcgacaacgcaccgaccataccaagggaaatcacaatattcgtactgatggacaacgtgaccatgcaggtgagcacacacatgcccaccaacgtgaccgcgaaactgcgcgaatacaccacgcccgtgtagaaacggcggtacacgtagtaaatgacgatgccgacgatcaacgccaccagcaatgccaacgccattttgggcacattgtattgactgaaggatttcagcaccgactttttgatcatatcattaacgctcataatgctgctctttctctcttgcttccttgattcgtaacgtttgatttcgggaaatgccagccgatcatagactgtctttacaggctcggcacgctccagccttcctgccagtagccgaatccccgcaaatacgaggctttgtcataacagagcacgtatttcgaagccgacgtcaactcctgagctttgccaggcaacagatcgcgtaccatctgcggcaggaattcagtgaatttgacttccatcaccagttttcccggctcaagcacgggcagtaccggcagtgtggagtcgaaaatatcgaatcctccaaccgccgcacgcacattcatatcgaaagtgacacgcacagtaccggcgtcaagaatccacggttcgcgctcataatcgacgatcacacgcggacgcaacacattgcacatgcattccacataaagctcgcggcacaattgatgctcgctgtcgcgcaaaaactcgtaatcgccggcaagaatgcggtcgaactgctcatgggtgagcggcgcatcctccttgtagatccaactgccgcttttgcgtttgcgttccagtttgatcacacggtcgctgtaatcgtagatgcgaatacggtatttcttgcgcagcagcacaccatcgactttttcccgatatgcggtgttccaataatcgtcgaaatacaggctgcgaatcatatagccgccgttgctcgcatgtttgtcgagaccaagcagcggcgccatacgcacgttcaaatcggctttttgcgcgtatgagatcagatatttgagctcatgacgaaaccgttccttggcggtgctcggcggaacggataattcttcgctgacacggttcgcgatgcggccgagcagcgacgtgtcatggttgccgcggtcgctactcattggcatcctccacaatgctgccgtcggctttcacatagaagcatttggtgccgtaaatcttgttgccgtcggtgatgtaatggtcgaatgcgtcttgcgtgtagcctgacgcgttgcgcacgctcaccttgatgaagtactggccttcgtcaggcatgtccatcacggcttccggcagcacgacatcgctttgcgagaacactacgtcgtcgcccgcatagtccttggacacggtgacggtgtaacgcagatcctcatcgttgaaatcgtaggccacatcccagttgagcttaagcttgccgttggcggaagtcggcttgccgatatagaacggcatgggcttgttgaatccggtttggtacgtctggtaattccgctcgatttcgctgtgcaattgatttgccaccgtgtcgtattggcttggcgtcagaggctcatgcatggagtcgggcatcttctgcacgtatggctcaacgatggaacgatactgccgcaccatggaattgatgcgaccggcgctcatgtatttgtattcgtcgttgatggctttatcgagcgcggtgcggaacgacttggtctgcaggcaacgtcgtaacagtatgttgccccaatagttgctgatgccgttttcccagctttggccgtcggcacgttgcctgatctcatattccttgcgcatgagcataccgtcgttgtcccagtcaagcaggtaaaaagtatccgaattcgtaggactatacaggtacacattacggttttgcgtgtcgatattgccggtcaacaattggaatgccatccaatatgcgatgttttcggtatcgaagtatttgccgaggatttcgctcatcggcacggaataatcattgagatcattcagcatggcgatcagtttggtatggtcgttgtcgcctttgatttcgagtttttcttcgaatttcgtctgatcatagtcgggatcgtcggcaagtttgatcacgtcttcgtctcgatagaattcgaaatcattgactttatacagctggccgttcttatcaagtccgtgcgcctgcaatgcggctttgttgagctgttcgacctgcgtatacagcccgtaatcgtcaaaggaatccgatccgctggtctcgtctttcacatacaagtgcacgaattgcgtgcgcagccccatcatctggtcgatgcctttgatgagatcaaaggccattttgttacggaaacgcagaccttcacccatatgcttgttcaatgcgatggtacgctgtccacgccacttgcctttgccgcttttcaactcgatcttgtaattcttctgctcgtttttactcgatgactgaccacgtacctgcacggtggcgttcggcgcgctttcgccaaaaccaagctccccggaaaccggcccctgttcgtcgccgacctgcagcaaaccattgaccttgtagcgtccaacgcccattgccgcatagtcatcaacggaatactggttgatttcactccagctatggtcggttccttccgacgaattaccgcgcgataccgtcagatacatggtttccacgccgctgtcgtcatacaccttgtataacgattcgttgtcgcgcaagtgtgcgccgtcgatgctttgttcagcgcttttcttgacttgctcatgcgtctgcgttgaatccgatgattgcgattgctcattatcgttgggtgacgaagtcgcacacccagcgcaggaaagcaccatcagcattgccgtcaatgccgctatttgcttgacaagcgtggtaatggcttttgtgttgcgtcgattccaccatgtcatgatttacgattcctccccgattgtattgttcgcttctgtaatgttcgtcccgcactcgcgccgcgcgtgcctcttatgttccgtgtgacgcagtgattgatcgattcgttgttcgccgtgttcaaacagtatgcccagttcggtgaaacgtccacgtttcgtctgtgccacaatcggctgctgccccaacactcggtatggcagattgtcggtgtatgaggcgagccggaacatcgcataaatagcgaacagcgacgctcccatcagaaaaccgaagccgaacagtgtggtagtgaagaactgtccgatcaccgcgaaaataaccgtcgacccggcaaataatgccgatgcagtcaacgcaccggaataatcagtgaagtacagcagaatcagcattacgatattgccgaccgcatacagcgcatatccgacgcatagcacacgaaaatatccatgcatcgcatcattgaaacccaaaggaagcgcgttcagcactgttttttccaacgaaatcacggcagcggtcaccaacaattgcttcaacgccgtgtaatgcaattctcgattgagcacagccagcatttcattttcggcaacggtaatgtctttgaccgtgcctccatcgttgagca

SEQ ID NO: 2528 - DNA, 4826 bp, Unknown
  R50_10m  MAG No. k141_25925
actggaccggctcgatcctcttcctggcggcgctcatcctcttcgagggcgtggtgccatggttgcgcggcggctgcacgttcggcggcagcttcacgcacatgacgatagagacccggccgcgcgaagggtggcttcgcgtggcgttctatgtggcgcgcatggcgacgctgatcgccgtggtgtggtggcatagtggcggattcaatctgctggtgttcatcggcctcggcatcttctggctggtcaagcgtcagatgccgtacgacctgatataaaccggcgctccgctgcttggcgttacaggaaaacctccgaccactggtcgggattcggaatgctgcgcagcgggccggccaacgatacggccaatcccgctacggaacagaccacggctacggccatcaccgccgtgaaaccgagatctggctgttgcaacagccagccgaccatcgccgggcatgctgcgcccagtatgccgaccgtggtttcaaatacggcagaagcccgcccctgcatgttgtcgggtgtcttgccgtagagaaagcccagcagaccggcgttcaacgcgggaacggcaggccggccagaatctggcagatcagaatggccgcgtagctgtgcaggaatagcagtggcatctggctgaccacgaacaacgccagcgcgcccgcaatcagtttccctgtgggaaccatatcgactagcttgttggccaacagcgagccgaccaaagtactcacgcccattgccgtgccgagcagtccgatcatgaccgcgttggcgccacgggcggccaacatgatctgcgcgccggtgatactggctacgcaggcgatgttcaccattgcaccgagtatgatcgcgtataggaagacgcgcttggtcagggcccatcgccagccttcgaccaagtgcgtgggaaatggcacaacagaagtgccgtgggcccaaacggtgaccacggcttagcgcgacgagtcaacgcgcattagctgtctgcgaacgacaccaacaccttgtacataacaatgccctttgcaaaaaccaaactccaattgttgtaccagttcgagcacgggaccaggcacgtcactgggctcaacataatcggccatcaatggtttctcggcttcgaggggctgatttcgtccggtggggacatctacttggctttcgaggggctgctcaaacgccaaaccacgagtataaacggctttgcggcaacgccattacgccattgtggagccttgtctactcgggcatcagccccttgaaacggagatagatctccggcaagtgccaaatcagcccctcgaaatcgagttaggcgttgttttcgcgtttgcgctgccgttcgagtgcgtaataggccgcgtagcagcaggcgacgaacgggatcatgcaatacagggtcgaacgctgcgtatcatcgagcaccacgagcaccagcgcgccgatgcacatcacgatggccagccacggcagcaccgggaaaccgggcgcacgatagccgagctcatcggcgctgtgcccatcccgcgcccattcgcgccggaaacggatatggcacacgcatacggagaaccacaccaccagcgtcgccaaacctgacacggcgaccaacaccagatatacggtcgaggcggcgatcacggaagacagcaacgccagcagtgagcccgccatgctgaacagcacggcccacaccggcacaccacggaaattcgtcctagcaaaacgttcgggaatcagccgctccttggccagcgaccacaccatgcgcgaacacacgtacaggccggagttcgcggcggaaagcacagccgtgagcaccacgaagttcatgatgtcgccggcgaacggcataccgattgactggaacaccagcacgaacgggctcgtatccacgccggcctgatgccaggggatcaaggccgccatcaccagaatcgagccgatgaagaaaatcgccaggcgcagcaccgtggtgtgcacggccttgggaatcgcacgcgagggatccttggtttcgccggccgccacgcccaccacttcggtgccggagaacgcgaacaccacggtcagcagagtcgagaaaatcggcgcgataccgcttgggaaccagccgtcggccacgaagttgcccagcaacggcgcggaatcatgaccggcaatcggtatggcgccgaagatcgccagcaggccgatcacaatgaacgcgacgatggcgaacaccttgatcgacgcgaaccagaattccgcctcgccgtacagccgcacggacatgatgttgagcgcgaacaccaccacaatgaacacggccgaccacacccaggacggcgaatgcgggaaccatcgctgcatcaacagccctgcggccgtgaattcggaggcgagcgccaccgcccagttcagccaatacaggatggcgatggtgaacgcggtgccggggccgatgaaccgcttcgcatacatgtggaagctgccggcgtacggcatggccacggacagctcgcccaacgacaccatcacgcagtatacgagcagagagccggccgcgtaagcgaggatcgcgcccaacggtcccgcctgatgaatcgcgtagccggagctgacgaacagaccggtgccgatcacgccgcccagggagatcatcgtcaggtgacgcgactccatcttccgttcaaggccggtatcgtccttgggtgtgccggctgccgccatgctcgggtctcctttggtcgggtgaacagttgtgtctcgtgtcggttgtgcgggcggcgctcgatgccgcctaccatatgatagcggtaacacgaacagcgagtggaacacgaggagtttggaatgatggaactgtatatcggatcgcatctgtcgacggccggcggatggaatgcgctgctggaacgttcccatgaggagggcggtaccgcgttcgcgttcttcccgcgttccccgtacggcaagcgttcgaaggcgctcgacccggccggcgcggcggcgttcggtgcgcgtctgaaggctgagggctatgggccgttggtcgtccatgcgccgtacgtctacaatctggccggcaaggatgaggccaagcgcacattcgcgatcgaggcgttggccgaggacatcgagctgctgaccgccatccgcgaggccggccaggaggtgtatatcaatattcatcccggcgcgcatgtgggccaaggctccgagaccggctgccggctgatcagcgagggactgaatcaggtgttcgagcgcgcggccggcgtcatggtgcttctggagaccatggccggcaaaggcacggaatgtggccgcaatttcgatgagctcgccacgatcatggatggcgtggagaataaggcgaacgtcggcgtcacgttcgacacctgccatgtgttggatgccggctacgatttggtgcacgactacgacggcgtgatgcgccagttggatgaggcgatcggcttggccaaggtcaaggcgattcatgtgaacggttcgcagttcggcctcgactcgcacaaggaccgtcacgccaatatcggggagggccagctcggcatcccgttcttcacgcgactggtcaacgacccaaccatggccaagctcccgatgattctcgaaaccaaggagcagacgcccgccacgcatcgcgacgagatcgagttgttgcgcggattggtgcaaaagtagtcgtagtcgaccaatgtcgagcagaagagacctgtttttgactgatggctatacgaggttagctatcagcggggcgttgattgacccgtcttcatatacagctgcatagccggttccagctgcaagagctcaaaacagacgcatgggttcggcggaatccaatggctgaataagacgtttgccgtcgctgttcagtggcgcgacttcgtgaaattgcagatgccgagaaagcatggtacccgcttcccgcatggaatctaacagtgcggctccgtcaacggagcggtccagccatgaggcaaccatattccgaggcgccagcaggggcatgcgatcatgcaccttgacgaactcgtccgcggcagggcaggtgatgatggttgcggtcagctgccatggcgatgcgggagacggcctccaccatgagtacaggccggccaaagacaatagttcatcatgtggtgcgtgaaaatagaacggcctgcgacctttccattcgtagtagccggaagcggggatgatggctcgcatggattttgtggattcggcgaacgccggcttgacatgcgcagactccacacgcgcattatatgtggggtagctcagcactttgctggcgctccatcgcggcaccagcgaccaataggcaccggtcagatgacggcggccatccttgccctgtgccaccacgccaatgttctgcatgggtgcgatgttgtaggaaggctgtggcagagtgtcaacgcgcacgtcatcctcgtctaccgcgaactgtgaggccacggcatcccaatccaaatcaagcgcgaatctcctgcacatgcgcccagtctatgccatcaatggaatcaatcccaggccgtatgaccgatattcatggcgattttcctttttgttggccgctctggttccgtagcgatacgaaccaacgaggaatagcccagaatgtaggacgggttcggcaatcgggacggggcgtgacctagagtggcgcatgaccgaacaccaacaaagggaggaccatgtcggttttggacgaactggtggcgggagcgctggaggatcagcgcgcccgtgagctcaccgtatcgcttgagggcgtgaagaaggccgcgctggcg

SEQ ID NO: 2529 - DNA, 3975 bp, Unknown
  R50_10m  MAG No. k141_25932
agaagtccggcacctacgtgggcttcgacgtggacgtggccaaatacgtcgccaagaaactcggctattcagaagaccagatcatctggaaggaagccccctccaagcagcgtgaggccatgattcagaacggcgacgtggacatgatcctcgccacctactccatcaccgacgagcgcaagaaggccgtctccttcgccggcccgtacttcgtggccggacaggatctgctcgtgcgcaaggacgacaactccatcaacggccccgaagacctgaacggcaagcgcctatgctccgtcaccggttcgacctccgccgccaccgtcaaggagaagttcgcctccgaagtccagcttatggaacagcccggttacgccgaatgcgccactgccctgttctccggcatcgtggacgcggtaaccaccgacgacatcatcctggccggcctggcctccgcctcgcgcggcaagctcaaggtggtcggcaaaccgttcacgcaggaacactacggcgtgggcatcaagaagggcgacacgcagctggccaccaaaatcaacaacgccatcgtggacatgattcaggacggctcgtgggagaacgccatcagcgataacaccaagggcaccaactacacgcccgacgtacgctacaacccgcccaccccggacgaaggagaggaggcctgatgagcggattcctggaactcttcagccagtatgacgtgctcggcgcgtttctggtcaatatcgaactgaccctatggtccgccctgttctccctgatcctcggcgtgatccttgtggtgatgcgcatctcgccgatttcctcgctcagggccgtggccggtgcgtatgtggaactgttcaagaacctgccgctgaccatcatcatggtgttcatggtgctgggtgcctacgcgcagctgaagctcagcttctccgacaccttcaccacgaacttcttctggctcgcggtcaccggcctgagcctgtacacggcggcgttcgtgtgcgaatctctgcgttcgggcatcaacaccgtgccgattggccaggccgaggccgcacgagcgctgggcttgggcttcatgcagtccgccaccgagatcattctgccgcaggccttccgaggctccgtggcaccgctcggcaacacgctgatcgccctgctcaagaactccaccgtggccgccgccgcatccgtggccaccgaaacatcctcgctgatgagcgagatgatcgaattccgtcccgacgtgatcatccaaatcttcctgatcttcgcgctcggctacgtgatcctgatcatccccatcggcatgctcaccacgtacctgtccaacaaactcgccgtaaggaggtgacggatatggccgatacttcgaattccgtgctgttcgacgcgccaggtcccaagggccggcgcaccattcgcatcgtcaactggatcgcgggcattctgttcgcggtggtgctcgtgtttatcctcatgcgcctgcacaacccgccggacggcgagaaccagcttagctgggagctgtggaagcccgccgtcgaacgagaggcgtggaccgacttctacctgcccggactgtggatgaccatcaaggccaccatcgtggccgtggtgggtgccgtggtgttcggcttggtgttcggcgtgggccgactgctgccgaacccgctggtacgtggcgtttccgccgtgatcgtcgagttctgccgtgcggtgccggtgctgctgctcatgatcttcttctggcgatggttcgcgttcgcgggcctgcccagcccgtcctattgggccgtggtgctggccttggtgctgtacaacggttcggtggtcgccgaactggtgcgctccggcgtcggcaatctgccgggcggccagcgtgaggcctcgctcgctttgggcctgaccgaaacgcagtcgctgatggagatcgaggtgccgcaggccgtctacgccatgctgccggccgccgtcacccagctggtcgtggtgttgaaggataccgctctgggctcgatcatcatgtataccgacctgctgcaggaatcgcgccgactcggctcgatgtacttcaacatcctgcagacgctggtcatggccgcggtgatttacttcatcgcctgctggctgttgtcgaggctcgccgaatggctgccctcgcgcatgcagcagcgtacggccgcacccgccgaacccgagcccgtggcgccgatcgccgccggcgacccgtccaatgtcaaccagatcgctgtggccaaggaggtcgaagagctgccgctgggcggtacgccgcgcaaataccatgtgcatcaccgtggcaccaacgcctcgattcgcaactggcggcgcacccgctacgaacagggatatgacgccacccagcccgagtcacaggttgacccggaaaccggcgaattccaggagtctcaaaagcctgaggacaagccagaggcctgacaatcagctcaatcgccgctaagccggcacgaagaatttactgagtgtttgactgggctccggctacgtagccttcacggaggataggttggaacatatgaagatgttccggcacctatcctccgtttttgctattgcgaccattgcgccgctggcgttggcggccacgctagccgtgacgcctgcaatcgcacaggccgaccagctgcccaacccggattgggtggcattgctctccgactacgaaaagaactattggcaggcccccaccgatgccgaacacggtggcaaggtgctcgacgccgatacaatgaaactcgacgaagatttggccgtggccattaaccacaaagccgccgaaaatctcgataaggatggcctgaacgcccaacgcaagcgtgcgctcgtcgactccgatctgcaagccgaggaagccatgccggacgcgctcggtccggtgcttggcaaatatatgagcgaagggctcaaatccgggaaactcaacgccgtcgccgatatcttctcctttaacgtggcctccacctacgcctcaaaacgtgcggccatgcatccgcgcccctatctgaaccgtgcggaaagcagctacggcggcactaacgatctcgccggactgcccgccacgcttgacatcaagcaatcaccctcatggctcgaacacgtgcccggctactcgaacttgcagaaaaacagttcctacccctccggccacactaccggcgcctattcgtggggtatcgcgctggccggcatgattcccgaactcgcgccgcaaatcatggcccgcacttcggaggccggcaacaaccgcatcgtgctcggcgtgcattatccgcttgacatcatgggcgggcgcattggcgcatccgcccagaacgggcagtactggcataacgaattcgcttcgtccatcgtgcccgcgtcccggcagctgcgggactatctggtgtcccgctgcgccgcggacggccacggcactaccctcgccgcctgcatcgccaacaccaaggcctccggttcgggcggctacaccaacgattttctggacccggtggccaccgagccggtcgcggaccaggcctcggccgtgcgcgtctacaccgcacgcctgacctacaccttcccgcaagacaccgcccagtccggcgctgatttcgtggcaccgcgcggggcggcggacgtgctgcgactggcctatcccgaactgcacgccgatcagcgcaacgcgattttgaaagtcactgccttggattccggataccccctatggcaatcgagcgacggctggcagcgtatcaactgggccaaagccctgtgcgcccgcgtcaccttggataagcacggcgatgtggccaaggtcgagaccgccgaccaagtggcgcttaccggcccgagtgtggtcaatgcccagtacgccgacgcgggcaatcacccggcgtctgatggctcggcgggtgaaaacagcgccattgcggccgggccggatct

SEQ ID NO: 2530 - DNA, 2551 bp, Unknown
  R50_10m  MAG No. k141_26051
gtatgcgcctatcatccacgggttggcctgatagccggtcgggctcatgttcgcgtattgggcgatccacaaaccgtatcggtcgcggatgtcctgcgggatggtgccggcgaccgggccggtgtacagcaatgggcgcacaccgcccgaaagccgttcgcactcactcatgaatcggcgtacccaatcccaatcgccccatgcggggttgtcgtccatctcccagtcgagcgccacgatgccgtgacgccaatagttcgacgtgttcaggtagaagaattgggcttcgccttccgggttgcctcccatggcgtagtggtagaggccgaatttcttgccggatgcctgcgcctgggcgatcatgcggttggcgtcggtgttcacaccggacacgaggcagttgttgttgacctgtccggtgccccatgtggtgccgaccacgatgaaatcggcctgcatgttatacacgtccgcgccgcactgccagttgctcatgtccacgccctgcatgtccgcgtgcgccgccggggcgaacgccatgaagaccgcggcgacgagcgcggtcagtgccatgaccacgcgccggtgcaggcgtccgtgtttatgcttgcttttgtcgaggatcttcacatcctctccttcccgccccgagtcaaggggcaatagaaaagccatcccggaatgggatggctttgaaaaccggtgcgaaaatcaatgcctgtgcgcgccaaaattgaagacgagcaacaaggcaagcaacagcaggtatacgccgcctgcgatcatgagacgcgtcattgccggtcctccaaatatttttcggccgcgtcgactatccagcattgcgcgtcgagtttttcgagtttggccaactcgtaacggacggcctccgaatggtcgtgcgcttggtcgccgtagatcaggctgatgatcgtgttcttgatcgtgtcccggcagagctcgtccatgcggtcgtcgaatttctcggtacgctcgccgagacgccgggtcttggcgaaatgctgtgaaagcgggctgtcatagggcaagcgttccggttgtacgtgcgcgtacaggccggtcgccaacgcgtccaacgcgcccggccatatcctgagcagcagggtgatgagcgcgcacgcgccacccacacccccgaaaccagctagaaacgtctgaaacacattacatctccttaaaaaatcagtttggccgtggcatgaggtcgccgtacagtgctcccatgcctgggacgaactgcttgtattccttccaatccgcttgtgtcatcagattgattgccgagaattgcagcggatgattcagcggacacttcaactggatgaattgcgcatcatccatacgaaaatcaaaaccaaggaatgtgtttccgcctgtattgccatgaggaaacagcattcccctgttctttgctgcgttggctacgtagcagataccgtcatgccatctgctatcttccggcacctgggaaacccagaagttcagatggaaatcaccggagaccggttcgcacagtcggatcttggccataggattgacagcgccactgtttggcgtaacgatcatgcgatcagggtcaacatgctgcacggtcgcctcgtatgccgagacggcaccgttcgggaacatcaagagtggattcggaatcagattcgttaccaggctcatgccaccacccccatgagggtcaggcgagcggcatcgtatccccggtgaaatatccgatgccgtcgagcagggtcttgttcgcctgatattcgtcccacgtgcagatgagcatattcgtcactgtgacggtcggattgcctgacctgacggaataactcattgacatcggaccggcattgccggcggtcaacgcgtagctgacacgttggcttgcactgaggtcgccatacatgttcaacgagatagtgccgccggtgacgttcacataggcactgaccagatatctcgtccctggctcgttcggaatggtcgtgatacccacccaacggcctgccgacaaggtgatggtcgaggatgggctcgtgcataggttcgtgaccatcatcgggcaccacccgcccgatagtcgcgcctactgcaacggcatggtgtcgccggtgaagaagcccggaagcccccccccaatggcagtgtcgtaagtggacttggattcgaggaggatgtagcgaatcagtatgaatttgccgaccgtggacggtggtacgacacgtatcaacaattgcttcgtgttggctggaatcgtgatgtccgcgtcaattcccttcgtctgattgtctgcgatgccggtctcgtgcaggatggtgaacccgttgccgacgcccgcatagacgcggaagagtgcgccggagcctcgcgcatagcagaccgcgtgaatgtgatacacgccggccggtggaagatcggctcccgcaagcacgtattgcgcgtatatgtcaccactgccgctggtcgtggcacgcagccatcggaatccgctgacggtcggaaaatccacggtgcattgtgctggtatgcattggaa

SEQ ID NO: 2531 - DNA, 5292 bp, Unknown
  R50_10m  MAG No. k141_26338
aacttcgacaccctgaaggccgtggccgacgacatgcaggcccgcaaggacgagctcggcatcaagggcgcgttcacctccgccggcttcgactccagctccgactggcgcttcaagacccacctggccaatctgccgctttactacgagttcaaggacgacaacgtcaccgagcagccggccaagatcaagggcacctacctgccgaactacaagaagatcttcgacctgtacatcgccgactccaccaccgaacccacccagctgagcgccaagaccggagatgatgcgaactccgagttcgcgctcggcgaggccgccttctaccagaacggcacctgggcctggaccgacctgcagaaggccggcatgaccgccgctcaggtaggcatgatgccgatctacatcggcgtcaagggcgaggagaagcagggtctgaccaccggttccgagaactactggtgcatcaatgacaaggcctccgacgccgacaagaaggccaccgaggacttcctcaagtgggtgatcacctctgataccggcaagaaggccctctctcaggacatgggcttcaccaccccgttcaagaccttcgatgacgtcaaaagcgacaacccgctgaccgaggccgccgtggaagaccaggagtccggcaagacccaggtttcttggaacttcaccatgatgccgtccgaggaatggaagaacaaggtcggccaggcgctgctcgagtacgcgcagggcaccggcaagtgggatgccgtcaagaccgccttcgtggacggttgggcttccgaatacgaggcctcgcactgagtctcatagagtcccatagccgataagcaacaatccgcggcgcccctgcctttccttctccaggggcgccgctttgtattgctgagtctcgcacaaaatcgtccgccgcagaaaagtgtgaggcacgcacccgctcaatcgcacgctgtggggccatgaatcggcgatttttcgccatttcccacaatgtgcgattgagcgttattgtgcggttgcctcacgctttttctatggtgggctttgttgtgtgagcctacttaacgcgggaggtggaggagcggaccttcagctgggccgggaacacgatatagggttgctcaatcggcttctcgtcaatgaggtcgagcgtcatgcgggctgccacgcgggccatctccgccggatcctggcggatggtggtcaggccgatatcgccggtgtagaaactatcgtcgtagccgaccagcgagacgtcgccgggcacggagaacccattgcgctccagctggaacataagcggcaaagcgatgccatcctcctggcatgcgatggcggtgggcatctcgtcttggctcatgagttggtcgaccacgtcgctgatttcataacgcccatcgtcatcgaccttgcagacgatgacctgcggctcgatgccttccctgcggcagcaggcggtgaatgagtcgaatcggctttgcacggagaagctcagtgacacctcgcgattggtgctgatgtaggtgatgcggcgatgtccgagattgataagatggcgggcggccagcgtggagccctgcacgtcgtcgatattgacggcggcggtaaagccgcgggcttcgggctcgactgaattgatgccgacgatcggcacgccgaccgaagccagttgcgcgatttcgttgttgtcgatatcgaaagacgccacaatcacggcatcggcgttacggcgtaccggcaacatctcgaagaattccttgcgctcctcgatgctggaaatctggaataccgaaatatcgtagccctgcgtgtgcagcacctcgttgagcccctcgatgaccgaggcggtgaaccacaggcggatatggccgctcatcagtactgcgatgcgcagggagcggccggatttcagggccgcagccgagcgggagagtgagaaattgagtttgtcggcgatggcgagcacgcgctcgcgggtcttggccgacaccagatccggcctggtgaaggaacgtgagacggtggagatggagacgccggcctcgcgggcgacatcctgaatgctcgtagccattgcagcccccttgcgttgaatggaaaatcgcaatacacatgcacaactgactacagtgtacatgctgattgattgatttgcggcgatgacaacgattgtattacaaacgtttgcaaagtgtctatgacggcgtcagattggctttatatagccattatcttagttgaaagaagattgctggagctggagtatgctcgagattgaaacgctgaaaatgacaacgtttgacatataatgattcgacgtttactatgaacataggcttgaacgagaacaggccgtgcatgcggttctcgatcggcaggctcgcattgagttgaactccgcagccggcgcacgatgcagtgtcgcaacgcagcggactcaaggaggaggaaaagtcatgatcagcatggctggcaaggcgatacgcagatggtgggcgctgttcgcgctccccacattcgccgcattcatcatcgggttcctggtgcccttcatcatgggcgtctacttaagcttttgcgaattcaccaccgttaccgacggtgaatgggtggggcttaagaactatggcaaagcgttgaaagacaaggaattcctgcacgcgctcggcttctccaccgcgtttaccatcgtgaccaccatcgtgatcaacgtgatcgccttcgccatcgcctacatgctgaccaaggcgatcaagggctccacgctgttccgctcggtattcttcatgccgaaccttatcggcggcatcatcctgggctacatctggctgctgctcctgaacggcgtactggcccactggggccgcgccctgacctataaggcgtcctacgggttctggggcttggtcatcctggtgtgctggcagcagatcggctacatgatgatcatctacatcgccggcctgcaagccctgcccgccgatgtgctggaggccgcggccgtggacggcgccaacggacggcagaccatgttccgcatcatcatcccgctgatgatgccgtccatcaccgtgtgctccttcctgaccgtgaccaacggtttcaagctctacgaccagaacctcgcattgaccaacggtgcgccgagcaacatgtctgaaggtctggcgctgaacatcacccgcaccttctacggccgtatgggctgggaaggcgtcggccaggcgaaggccgtgctgttcttcatcctggtcgcggtcatcgccctgattcagaacaagctcaccacgagcaaggaggtggcagcctgatgaacgagaacaagcctgtgaagcatggcgcattatggaccgtgctgtttgccgttgtctccctgttctggattttcccgatcgtcctggtgctgatcaactccttcaagcagaaggcgtacatctccaagaacgcgttctccctgcctgccggcaaggcgttcgtgggacttgagaactatgtgcgcggcatcgagaccacgcagttcttcgcctccttcggctggacgctgcttatcaccgtcggctcggtggtgctgattctggtgtgcacctcgatgtgcgcatggtggatcgtgcgcgtgaacaactgggctgcgaagctgctctacaccctgttcctgttcaacatgatcgtgccgttccagatggtgatgttcaccctctccaagatcgccgacatgctgaagctcaataccccgtggggcctgtgcatcgtgtacctcggtttcggggccggtctggccgtgttcatcttcaccggcgtgatcaagggcatcccgcaggagcttgaggagtccgccatgatcgacggcgcgtcagtgccgcgcatcttcttccagatcgtggtgccgatcatgaagccgtcgatcgtctcggtggccatcctcgaagccatgtggatctggaacgactacctgctgccgtacctgacgctcgacctcggcaagtacaagaccatctcggtcgccgtgcaatacctcaagggcggctacggttccgtggatatgggcgccatgatggcctgcctggtgctggccatcatccccatcatcgtcttctacttggtatgccagaagtatatagtctctggtgtcatggcgggagccgtcaagggctgacgactcgcgtcgtcagcccatggctggaagcccagtgggcttccagcaggctccaggctgagccgcgacagcggcgaagctaatgatgagcctcgtcgtaggcgagtccgtaattgcagggccgaaggcggagcggtcaagggctgagctccaccaatccggctcccctctttgaggggagccgtcggcggaagccgactgaggggagtatcctgagctccatcaagtctcccctcagtcatctgcgatgacagctcccctcagagaggggagccacaggcgacacaaggagtagttgatgaactggctggcaccggactcgaaattcatgcgcgcgtggagcaatcttgttgacggcgtatggatcaacattctgatgctggtcacttcgattccgctcatcaccatcggtgcggccctgaccgccggccatgatgcttgccgccgctccatcgagggcgagggcaaaggcgtaaccgccaactacttcaagtcattcaaagccaacttcatcaaagccacactgttgtggctgccgttcttggtggtgctgattgcactggtctggtcatggatcgtcctgcagatcacgccgctgctcatcatcaaattcgcgctgaccatcctctggcttatcggcttcgaatgggtgttcgcgcttcaggcacgcttcgagaacaccgtggccggcaccttgaagaacgccttcatcttcggcatctcccacatcgcgatgaccgtggccctggtcatcgtggatgccgtgttcgtggcgctgctggtggccagctggttctacatgcccggtggactgttcctgctggtgattcttggttacggcaccatgctgatgctccatatccccgtcaccgagcgtgttttcaatccatatctcattgactaggcgggttctctcgcgaatatgcggcgatcttcgaggtctgagcgttctctgtccacgcaagcgcggtaaagataacaaattgaggctattcgctgtttgtggtgggtgatggtcaagtggtggtgacggctttgaggtcgagtctgccgcaggtcaggtagatcatggtggcggagtggtccatgtcgcggaagcctctcgcccgtcgtttgacgttctggat

SEQ ID NO: 2532 - DNA, 5739 bp, Unknown
  R50_10m  MAG No. k141_26599
acagctccaacaccttggcctgcaccgacacgtccaatgcagaagtcggctcatcggcgatcagcagcgacggcttcaacgccaaaccacgcgccaaagacgccctctggcgctggccgccggacagctcatgcgggaaacggttcatgtaggcgcgcggcagctggaccatctccagcaggtcgcccacatagttcttggcctcggccacggaaccgtacttgtggtgcacgagcagcggctcggccacattctccgcgatggtcatcagcgggttgaacgaggagcccggatcctggaacacgaaaccaatgtccgcgcgcttgggcttgaagtcacgctccttgacgccgttcatctcgatgccaagcacgttcagggagccgccggacaccttctgcaggccggcgatggcacggccggtggtggacttgccggaaccggactcgcccaccaggcccagcacttcggagcggtggatggtgaagttcgcgccgtccacggccttgaagtcgggctgcatgagatggcccgggtacgtgatggtcaggttcttggcctcaacggcgatcggctgttcgcgccaatcggccttgcgctcgatcggcttgccctcgcggtcgcgcacgaccagcttctgaccgatgcgcggcacggcacccagcagtcgcttggtgtagtcgtccttcggatggtagaagatctgctccacgtcgccctgctcgaccacgtggccgcggtacatgacgaccacctggtcggcgatgtccgcgatcacgcccatgttgtgggtgatgatgagcacggaggcgtcgaactcgtcacgggcgaggcgcagcaggtcgagaatttcggcttgcacggtcacgtcgagggcagtggtaggctcgtcggccagaatcagacctgggttcagcaccaacgccatggcgatgacgatgcgctgcttctggccgccggagaactggtgcgggtagtagtccacgcgggtttcggcatccgggatgccgaccttcttcaggatgtcgatggccttggcgcgcagttccttcttgtccttcatgccgtgggcgcgcaggccctcttcaatctgccagccgatggtgtacaccgggttcagcaccgaattgggctcctggaacaccatcgcggcctcggaaccacgcacttcgcgcagctgttcgccgctcagggagagcacgtccagcgaatcggagccatcgcgcttggacaggtagacggcaccggaggtggtggccgtctccggcagcagcttgatgatggagcgcgcggtcacggacttgccggaaccggattcgccgaccacgccgaccacggtcttgcgcggaatggtgaagttcacgtcctcgacggccttgatggaaccggcgtcggtcatgaaggagacggacaggtccttgatatcggcgagattcttgttgtcttcgctcatctctcactccttgccttccggcttgccttcgccggtccattcggaggcgacgatggtcgggtcatggtcggtgacggtggccggcgggtcgacgttcgcgtcgagttcggcgatcacctcgttgcgtgcggacggcttctcgtttgggtcgacggacgtgtcttcgatcgatccgaccacttcgccggcggacttgcgggcgcgcagacgcgggtcggccagatcgttgagcgattcgcccacgagcgtgatgccgagcacgataagcacgatggcgatgcccgggaacacggcggtccaccagatgccggcggtcacgtcggaaaccgaacggttcaggtcgtagccccattcggcggcggcggtcggctcgatgccgaagccgaggaagcccaggccggcgagggtcaggatggcttcggacgagttcagcgtcaggatcaccggcagcgtgcgggtggagttcttgaacaggtgcttggtcatgatgcgccaggtggaggcgccgaccacgcgcgcggactcgacatacgcggattccttgatgcggatcacttcggcgcgaattgtgcggaaatactgcgggatgtacaccacggtgatggagatgccggaggccaggatgccgctccacaggccggactggccgtgggagatcatgatggccatcagaatggcgagcagcagcgaggggaaggagtagacggcgtcggcgatcatcaccaggatgcggtccacccagccaccgtagtagccggacaccagaccaagcagcacgccggcgaagatggagagcagcacggccacgacgatggcgatgacggcggtgcgggcaccccacaccacacgggagaacacatcgaatccggcggcggtggtgccccagatgtgttcggcggagggcgcggcctgcgccgggaaggacgtgccgtcggcggccttgatctgggcgtggccgtagggggcgatcagcggggcgaagagggccacgagcaggaagaacgcggtgatcgcgagaccggtgatcagcatgcccttctgccagccgaccgccacgcgcagttccttgatgattggaatcttggtccagaacggcgtcttggtgctgacgttgagcttggtgaggcggtcgtcaccggggacggtgatcttgtcggaggatgcggtggtcatctcagtacctcactctcgggtcgataagcgcggcgatgacgtcgacgaggaagttgacgacggccacgatgatggcgataaggatcacgatgccctgcacggccacgaagtcacgggccttcaggtactgggacagcatgaagcccaggcccttccattcgaaggtggtttcggtcaggaccgcaccggcgagcatcagggcgatctgcatgcccatgacggtgatgatcgggatcagggccggccgccaggcgtgcttgttgagcaggcgcttttcggagacgccgcgcgagcgggcggcctcgacgtagccggaattgtaggtggagatgacgttggtgcgcaccagacggatgaacacgccggcggtcagcaggcctagggcgacggccggcagcacggcgtggcgcagcacgtcgacgagcacgttcatgtcgccgagctggatggcgtcgatgatgtagaagccggtcggcgataccagacgggtgaactgcatttcggagttcaggtcggagcggccggaggctggcaggatgttgagccagacggcgaagatgagcttcagcacgaggccgaggaagaacaccggggtggcgtagcacaggatggcgaagatgcggatgccggcgtcggcggcacggtcgcgtttgcgggcggcgagtcggcctaggccgatgccgccaatcagcgccacaatcagggcgaggaaggccagttcgaatgtggcggcgccgtagtgcgtaaggatgctgatcaccggctggttatcggtcagcgtcgtgccgaggtcgccgtgcagcaggccgccaagatagtcgacgtattgcacgatcagcgggcggtcatagccggccgcgtggatgcgctgctggagttcggcgggtgtcaggcggccgcccagggcggcggaaatcgggtcgccggtggcgcgcatcacgaagaacacgatggtgaccagaatgaaaacggtggggataatgaggaggaacctcgtcagcacgaagcggaagaaactacctgacagtcggttcttcttcgtcttggctttcgccagagtggtgctggaggtcgctgtggcgctgtctgacacgcgatgctccttggtgttggtaatcggtatataaagcaataaaggctcccctctccgaggggagctggcggcgaagccgactgaggggagtcatacgagttgggctcccctcagtctgccgtcggcagacagctcccccccccctcaaagaggggagctcatgctggatcagcccttggtgacggaggcatagcggaagcggaaggaagcgtcgagggtgacacccttcacggaggtgccggtgacggcgacctgggcaccctgcagcagcgggatggtggagaggtcttcggtctcgagtttctggacctgcttgaggatgtcctcacgggcggaggcatccttctcgccggcctgcttgacgatcaggtcgttgacttccttgttggagtagccgttgttcacgaagttaccatcgcggaagaacggggacaggtagttgtccgggtcggagtagtccgggaaccagccgagctggtagaccgggtacacaccgtcggaatcgtcggtgaccacgcggtccttggagtactgggtccattcggtggactgcaggtcgaccttgaacaggccgccttcctcaagctgggacttcaaggccgcgtactcgtcggcggaggcggagccatagtggtcgctgttgtactggagcttgaggtcgaccggggtggtgacgccggcatcggcgaggaccttcttggccttctcggtgctcggcttgccgttgccgtcgccgtaggcggacttcagcgtgtcatcgtgaccggccaggccgtccgggatgaaggagtacatcggggtgtaggtgcccttgtagaccttggtggagagctcttcgcggtcgatgaggttggcgacggcctggcgcacggccttggccttgttagcgtcggcgtcgggctgggattcaccgtagggctgaatcttgaagttgaaggcgatgaagcgctcctcaccgcccgggcccttgacgaccttgaccttggagtccttggagaggtcctcgatgtcggtcgggctcagggagcggtaggccacgtcgacctggccctgctggacggccatcttcaggttggaggcgtcggcgaagtacttgacctgcacggcggagttcttggccggggtcaggcccttgtaggagtcgttcttagcgtaggcggcggactcgttgatcttgaaggcggtcagcgtgtacgggccggcgaaggccttcttggagacgatggtgtcggcgtcggtgagcttgtcggcgtcgaaggtatcctcatcgacgatcgggccggcggggctggacatgacctgcttcaaagtcacgtcgaaaggcacggaatccttgaacaccacggtggtgtcgtccttggcggtcacggattcgacgttggcgagcagggagctcgggccgttcgggtcgttgatcttcttgatgcggtcgtaggagaacttgacgtcggaagcggtcaggtcgttgccgttggcaaacttcaggccgtccttgagcttgacggtgaattcggtgccgtcatcgttccaggtaccgtcatcggcggcgatgtccgggctcagctcggaggtgttgtagtcctgggcatacaggaacgggaacacctggatctgcacggcgtaggagccgttgtcgtaggagccggcggggtccaggctggtgatcttatcggtggtgccgatggtgatggcgttgccggaatcggcgcctgcggtggtgtcatccttcacaccgccgcaggcggtcagggatgcgatggcggccacggagacggcggcggccagaatcttcttggaattcaacaggaatcctctctcataacttgtttccacgccatcactgcgggcgtggattaccgcctgactatggtgaggatgtgttactcctgcgtttccacagccatcgacttatgtttcgcttgtggcgaccatggccggttttatgcggtatcgagcagtattacggattcttgtattacgacgtgaataacgttcaaatggtgagatgaacatgctatca

SEQ ID NO: 2533 - DNA, 22788 bp, Unknown
  R50_10m  MAG No. k141_26813
agataatatggcgtaccgccgaaagtcgcatagtattggaccagttcttgcggagatgtgttcgttagaaattttgccgcatccgcatagtcgaatggcaggagtcgaatctgtgctgtacgacgcccgtatagcgggcttttacgccccaatacgtcgttttccatgaatccctcgttactaccggatagaatcatcgtcacttttgtggcgaggaatccatggtcaattgctatctgcaacatggagggtaatgctggctcggcggcagctgcataagggaactcatcgaatacgaacaccatacgttcgtcagtctgtgcagcacgttcagcaacaaacgataacgcatcagaccacccgccaaacgacggggtggaatcaggcataccaaagaacgacaatgccgctcttgagaaatcttcaagattcatcttggcgctttgctgtatggccgtgaagtacagcacgcgtttatctttgacaaattcgtcgatcaacgccgttttccctacacgccgtctaccgtacagcaccaccatttcgaacgaatcgctggtaaacagcttttccagcacttgtaactcgtgctctcgtgcgacaaacattgcagccctccgatccgcctaccgcccaataataagagtatcatggttaatgtaatcacgattaccttaattatgatactgataattgttgccctaccgcgaggaggatcttccttccgctgtcaaaacgaaagcccaacagtccagactgacgagcagcaacatcggcagatcaaccgctgacgccagccagcctgacagcacaaatcagcctgattgcaggcatataggcactagttagcgaaaccggctcttcgcattttggtgcgtaggggccgtgcggtttgattcggtgtgtgattgaaaaagtgaatgaaaccgcacggcccctacacgccaaaaccggaagagcccataaagtcccctcagtagcgccaacctgccagtcctttggcggaaccacaccacatagaccttcctcaacggcgccaagctgccacacgctggcagaccaacaccgctgtgtgcattctctgcgtcggcggcagtccaaaacttggcccagcaacgacgcttgctgtgcccagcgtcggcagagggccaataattggacgcaaacgacacagaacacaccctcagcgtcggcagaactccaagatctgtaccgctgacgacggtaagccctccacagcgtcgtcagagatacaaaacctgtcccaacaccgacgcctgccacccccagcgtcgccggagtcccaagtctcggcccagcaacgacgcctacgaaccccacacataagaaaccgcacctccgatcatcgaatctgaattacttcagtccaacaaccggggtgcggttcactgaggggagttctgccagtatagctatatcagtcgtcgccgagcgtgacatgcacgccgccgaccagcgagctgaccacgttgtagatcagtgccgcaatggtggccagcagggtgaagatcaccacttcaacaatcgagaagatggtgacgccggagaccacggtggtaagggacaacacgttcttgagatcgaaaccgcctgcatcaagaccggtggaagacacaatctgcgtaatctggctgaatacaccgaccacatcaagcagcacccatacgatcgcggaggcaacgacctgaataatcgccacggcgatggacagcatgaacgtcactttggccacggaccaagcatccacgcgggtcagcgacaagctcatgcggcgagccctgggggcgctacggcgaggtgccggacgcacgggagtggcggcacctgaagaaggcaacgtggattcttccggatcgctggacacggagcgtgccacgcggggagcgtgctcagtaccgatcagcggctcgacatgatcgttctgcgtattgccgactgccggcggtatgatccggggctcgttgtcttcgagattctcgctcatcgtttctccttaacaggcttggcggtagcctctgctgtatgcgaggctaccagcttttcaggacgctgctcacgcctcgtccgcgttgttcacattctcgccggattgtgcggtctcggcggtgccgttcgccgcggcatcgccactgtcctcgggctcgtccttctcctcgttacgggcgatggagagaatcgtgtcgcccttgtcaggcttggcgaaggtaacaccctgggtgttgcgcccggtgcgcttgacctcgtccacgttggaacgaatcaccttgccggacttcatgatggccatgacctgatcgtcttcggacaccacgagcgcgccgaccagggcaccacggccctcgaccagttgcacggccttgatacccaagccgttacggccctgcagacggtattcgctgatggcggtgcgcttggcgaagccctcgttggtcaccacgaacaggtccttgtcggagtcgccagggaccacatccatggccagcaggctgtcgtcgttacggaacttcatgccctgcacgccggcggtctggcggcccatcggacgcagctgctcgtcgtcggcctggaacttgaggctcatgccgagcttggagaccaggatgatgtcatcctcggcgttgcacagcgcggcaccgatgagctcgtcggcgttctcgccgttctcgtcggccatgaggcgcacggcgatcaggccgccttggcgcggggaatcgtactcggccagcggggtcttcttgaccttgccggaacgggtggcgagcaccaggtacttggccacctcgtagttcgggatggacagcacggtctggatggtctcgtcgggcgcgaactgcagcaggttggccacgtgctggcccttggagtcgcgcgaaccctcgggcagctcgtaggccttgatgcggtagacgcggcccttgttcgtgaagaacagcagccaattgtgcgtggaggtcaggaagaagtgatccaccacgtcgtcctcgcgcagcttggtgcccttgatacccttgccgccgcggtgctgggcgcggtattcgtcggccttggtgcgcttgatgaagccggagtgggtcacggtgaccaccacgttctcttcggcgatcaggtcctcgacgttcatctcgccggagaacggcaggatcttggtgcggcggtcgtcgccgtacttggccacgatctcgtcgagctcatcgccgatgatcttgcgctggcgttccggcttggcgaggatgtcgatgtagtcggcgatcttgcgctgcaattcctcatgctcggccacgatcttgtcgcggttcatgcgggtcagcgtgcgcagctgcatggccagaatggcgtccgcctgcacctggtcgatgtccagcagccccataaggcccgtacgggcggtgtcggtgtcttcggaggcgcggatgagggcgatgacctcgtccagcatgtcgagggccttgagatagccctgcaggatgtggtcgcgctcttcggcctcgcgcttcaggtacgcggtgcggcgggcgattacgtcgagctggtggttcacccagtggcggatgaaggcgtccaggctcagcgtgcgcggcacgccgtcgaccagcgccagcatgttggcgccgaaggtctgctgcagctgggagtgcttgtacaggttgttcaggaccaccttcggcacggcgtcgcgcttcaagaccagcacgaggcgctggccggtgcggccggaggtctcgtcgcgcatgtcggcaatgccctggatcttgccgtcgcgcacggcctcacgaatggagacgacgaggcggtccgggttgacctggtagggcagttcggtgaccaccaggcacatacggccgttgatctcctcagtgttgaccacggcacgcatggtgatcaggccacggccggtgcggtaggcctgttcgatgcccttgtggccgaggatggtggcgccggtggggaagtccggtcccttgatgatgcggatcaggttttccagcagttcctcgcggctggcgtccgggtggtcgagcgcccagtggacgccgtccgccacctcgcgcatgttgtgcggcgggatgttggtggccatgccgacggcgatgccggcggagccgttgacgagcaggttcgggaagcgcgcgggcagcacggtcggctcctgggtcttgccgtcgtagttgggcacgaagtcgacggtgtccttgtcgatgtcgcgcaccatttccatggccagcggggccatgcggcattcggtgtaacgcatggcggcggccgggtcatcgccgggggagccgaagttgccctggccgtcgacgagcatgttgcgcatcgaccaggactgggccatacgcaccaaggtgtcgtagatggcgaaatcgccgtgcgggtggtacttacccatcacgtcgccgaccacgcgggagcacttgttgtagccgcgatcggggcggtagccgccgtcgtacatcgcgtagatcacgcggcgatgcacgggcttcatgccgtcgcgcacgtccggcagggcgcgctcgacgatcacggagagggcatacgccagataggactcgcgcatctcctgctgcaggtccttgcgctggatgcgttcgccggtgtccatcaggccgtagtcggtggtgtccgcctcctgcgggctcaacggctccatcgagccgtccggcgtgaactgctcgtcgccggtgttgttttcatctgccactgttgttcctttagttgtctaagtccgttgtgtacctccctctgacgagggaggttggaggattccgttacgcatcgatccaacgcacgttcttggcgttgcgctggatgaagaggcggcggggttcgacctcatcgcccatcagcatcgagaaggtctcgtcggccgcggcggcgtcctcgatgtgcacctgcttcagaatgcggtgctcggggtccatggtggtctcccacagctcctggtagctcatctcgcccagacccttgtagcgctggatgccttcgcccttgggcagctggcgtccgttggccttgccttcggcgagcacgcggtcgcgctcggcgtcggtgtacacgaagtcgtgcgggcccttggtccacttcaggcggtacagcggcggcatggccacgtacacgtagccggcggtgatcatcgggcgcatgtagcggaagaacagcgtcaggttcagggtggcgatatgcgcaccgtccacatcggcatcggccatgatgatgaccttgtgatagcggaccttggagatgtcgaagtcctcgccatagccgccgccgaccgcggtgatcagcgattcgatggtgtcggacttcatcatgcggtccaggctggcgcgctcggtgttgaggatcttgcctcgcagcggcaggatggcctgcgtgatcgggttgcggccctggatggcggagccgcctgcggaatcgccctccacgatgaacagctcgcactcttccgggttggaggactggcagtccttgagcttgtcgggcatgccggcggactcgaagatggacttgcggcgggtgttctcgcgggctttcttggcggccagacgggcgcgggaggcctcgatggccttctggatgatgttcttggcctcgttcgggtgggcgtcgaaccagtcgccgagcttgtcggtcatcacgcgctgcacgaaggtcttggcttcggagttgccgagcttggtcttggtctggccttcgaactgcgggttggtgagcttgacggagatcacggcggtcaggccttcacgcacgtcgtcgccggagaggttctcgtccttgtccttgaggatgcccttgtcacgcgcgtaacggttgaccagcgaagtcagcgcggcgcggaagccctcctcgtgggtaccgccctcggtggtggagatcgtgttcgcgaaggtgtgcacggcctcggagtaggcagtggtccactgcatggcgagttcggcggagatgccgagcttcaggtcttcggcctcgaagctgatgacgtcctcttccaccggcgtggccttgcgcaccttgaccagatagtcgacgtagtccttgatgccgttgaggtactggtaggtgacggtctggtgctttgcgccgggctcgtccgcggcgtcgccggccacctcgtcgccggcctggtcgttctcacgctcgtcggtcaggctgatcttgaggcccttgttcaggaaggccatctgctggaagcgggaacgcagcgtctcgaagtcgtagatggtggtctcgaagatcttcgggtcggcccagaaagtcacggacgtaccggtggactcgccttcggtcatcggctcgccctgcttcaagggcgcggtggggtgctggtcgatgtacgtctgggtccagtggaagccctgacggcgcacttcgatgtccacgcgggtggagagtgcgttgaccacggagatacccacgccgtgcagaccgccggatactgcataaccgccgccgccgaacttgccgccggcgtgcagcttggtcatcacggtctccacaccggagacgccctcgccgggcacctcatcgaccgggatgcctcgaccatcgtccaccacgcggatgccgttgtccggcagaatggtgacctcgatatggctggcgtatccggccagcgcctcgtcgaccgagttatcgacgatctcatagaccaggtggtgcaaaccgcgcgggccggtggaaccgatgtacataccggggcggatacgcacggcctcgagtccttcgagcaccctcagatcggaggcctcataatgctcgggggccatggattcgtcaagttcgccttcggtcaattccgcattgttgatgcgttccgcagccgccttcagctgctcctctttgctggtttcgtctgccaacaggcttccttccgtgactacagggtcaacctccgtcatgaaggtcattcacggaggcgatatggcttacgaggcccgtaaagggctcttctggccatttgaccatactgcatgtgattttactcgtctaacccgacgagcgccatagcgaggcttctgcgaatttgtttggtatcttggctaccgccgccgagcccatttgcgtgtgtatccggcggccgggccggtcacgcgaatctcggtgatggtcaatcctctgagattgcgacggatggtatcggtgagttgggggataaggtaggtcagctgcgtggcccagaccgtggattcggcacggatggtcagtacaccgtccatgaaatcggcgactgccgaatggctggcgatggcctgccccaccacttggtcccaatggttgcgcaattgcgcaagcttcatattcgccgtccagacgccgttgccggcgatggtggtcatcacgctgcccagttcagccggatcgcgccccggtttgccgaagttttcgatggcctcctcacggcggcgtctgtagtccttcaaggtcgccccgcgacgggagagccgctcgaatatttcggccggcagtttggtctcgtccaggttgagttggcgggcgatcggcgggttcatgacactttccgttctacggacgcgctgtccaccgcggttttttcgtcatacccacccaaactctcattttcccgcgaatcggacaaattgcccagagttggcaatatcacggaagctggttcgtccagtgcggccacgtcgatacgatgggccgattcatagtcgggcacatcgccttcagcggccacggtaatcagcacctgatcctgttttctggcgaaatcaagaatctgcgtgcgccggctgtcgtcaagctgggcgaacacatcatcgagaatcacaatcggctgcaatcccaaccggtcacgcactatttcgaacaatgccattttcaaggccaacgccatcgtccacatctcgccgttcgaagcgaactcgcgggcgggaataccgcccaactcaaggttcatgtcatcgcgctgcggaccgataaggttcacgccgcgagccacttcaccggggtagatgcgttgaaaatgctcgctaatctgcggatgcggatcgtcgaacatcagcacttcgtcgaatgaaggcgcataagtgagcgtcacctgctcgccggcaccggccaagtcggcgtaaatcgcggcaaatggctcggcaagcagaccgatcacatgagcgcgcatacgggtcaacgccacaccggcttcgatgaactggccggtccagatttccaaaccgctcagaaccgcatccatcggctggccattgttggcattggcattcaattgcttcaacaatgtggcacgctgtttggcgatgcgcgtgaactgttgcaacgtctgcatgtatccgggctcgagcagagccgcagcctgattcatcatgacgcggcgtgctcccggatcgccggacaccaaccgctgatcttcgggagtgaaggaaacgctgggaatcttgccgatgatatcgcgcagatacagcgacgaccccgagttgatgcgggctcggttggcaccacgcgcatgaatcgacgcttcatacgtagtggtttgaccggcatcatcagcgacgttcgcgcggatggtggccgtggtctgcccgcgttcgatcagcggcaacgtgctggacgtgcgatggctcgatccggtggacagcacttcgacggcttccaccagattggttttgcccagaccgttcttgccgaacaggatattcacgcctggtacgaaatcgaccactacctgactccatgagcggtagtggtcgagtgcgagacgggagatgtgcattagcgaatcgttggaaattcagggatctcagttgttgaagcgcatcggcacgagcaggtatcggtagtccatggactcgtcggaatcagcttcctgctggccattgaactcgaccggcttgaccggggtcgtcattttgatgcgcacgaatggttcggtcacggcggacagaccctccttcaggtaggacgggttgaatgccacggtgatgtcgtcgccatccatgtcgatgtccagtgtttcgttggcctgagcctcgtcgaccgatccggcggacagcgccacttcctgaccggtgaaggtcatgcgaatcggagcattgcgttcggcgaccaaagccacacggctgatggcgtcgagcaaatcctgcttgttgactacggcctgaatcggatattcgtcggcgaacaggcggtcgaccgccgggaattcaccgtcgatgagctgggaggtggagacgcggccggcgttttcgaagccgagcagcgtcgggctatcggcatcgaaatcaaggcggatgttctggtgctcgtcaagagcacgggccacatccttgagcagggagccgcgaaccagcgtggtggtgtcgacgtccgggttctgcggagtccaagtgaaggtggcgcgggccaaacggaagcgatcggtggaggtcatgacgaccttgtcgccttggaattgcatgcgaacgccggtcagtaccgggcggttttcttcgcgggagacggcaacgcacgcctggttcacggcctgaacgaaagtcggggcatcgacttggccgagcatggccggtaccacgggcagatccgggtactcggtgtcgggcatgagctgcaaggtgaacttcgacttgccggacgtgatggtcagcgtggagccgtcggtgaccaggtacgttttctccgaacgcagcgatttggtgatatcggccagcagcttgccctgaaccagtacggaaccggcttcgtcaacgccggcttcgatgtggtggcgagcggaaatctcgtagttgaaggcggagaattgcagcgttccgtcaatggcttccagcttgacgccagcgagaatcgggttggagggacgtgcgtcgatgactcgggaggtccaggctacggcgtcggccagggctgcggtatcgatttcgactttcatgtgtgattgttcccttcgtcggattggctgaggaatattctagccgttaggtggcgaacttacgtacgatgggtgactggctgttactgtggcgatgatgcttttcacgtaactgagtaagtaatcgccataataaggccggtggatagtgtggataagtagggctgagccctacaactgcaacggttcataagtccctgaaaattgtggacaaattctgcatggcttgtggataagtgggcgagttttccacagccagttcgtcgaatttgagttttccacatcgaggtcgcggttatgcacgagttttccacaacaaaacagtgggtaatccacgagttatccgccgagtttacccacatctgtgcacaactgtgtggataacttttttggttttcgtactttcgcacggcgtgttgaaggctgtttttcgtcgaggagaatcgattctggagaccgttttcggcacttttttcgtctcgctcgcccaaacccgcaaaatcggtcctcagaatcgattctctcgtttcatgggttttttgcgtgttccccttcgatactcccctcagtcgtctgcgacgacagctctcctcacaaaggggagccatgaggaatctgatgtctcgaatccgttgcctcgacgtatccaccagaatccgcctgagcaaccaaaaacggcacttttcggactgactttccgaaaagtgccgtttttcgtctctcagaagcgttgtgtcagttggtgttgctttgcttgaggcgaaccgtgagctccataacgtagttatagatctcctgtttttgctgcattcggtcactgattcgagtgcaggcatgcattactgtggtgtgatcgcgcccgccaaagacctggccaatatccatcaggctcatactggtcatttcgcgagccagatacatggcgatctgacgaggaacagccacgtttttggttcgtgatttaccgacaagatcctcaaacgtcaggtggaagtacttcgccacctgactgatgatgtccgtgggcttgatttccacatcggtggtgaagaagtcctgcaacgtctgctcggccaaggcgcgggtcaccggctgattactcagcgaggccacggccgtaacacgggtaagcgcgccctcaagttcgcgaatgttctcggtgaagcgttcggcgatgaggtccaaaacatcgctggggattttcgaaccgttcatcgaggcgatcatacgaagaattgcgattcgggtctccagatccggcggcttgacgtctacggtcaggccggattcgaagcgcgagatgagtcgagcctcgaaacccttcaaattcttgggtgccacatcggaagcaatgacaatacgcttatttgcctgatgcagtgcattgaacgtatggaagaactgatccaaggtggcttccttgccgccgaggaactggatatcgtcaataagcaacacatcaacctgtcggtatcgacggttgaattcagcaatctgaccctggctttggttcgggttttgcagcgcgtcgatgaattcgttcgtgaattcctcagacgtgacgtatcgaacctttagcccgggatccttgaccagtgcatagttgccgatggcgttcagcaagtgggttttgcccaggcccgatccgccatagatacacaacgggttgaaatcctgaccggaaccttcggccacggccagtgcgaccgtacgggcaaaacggttggaatcgccgggcacgaaggaatcaaacgtgaagttcttattgagatgagtctcgggatcgcgattcatcttctgctgaccgaccgggaactgcgactcggtggcgggcatcggttcccgcggtgcggctaccggctttgcaccataggattctttaccgaactcggcgacggtcggagaaatttccgaaggatacggctgcgccggctttgccgccgaaagcggttcggactcggttttcggcacgaccttgaacgcgggaaacatattttcgccggttaccgtacgcaatgcctgaagcagggaatcgttcaaatcaccctgaatggcttgaagcgtgtcgttgttgtccacacacagcacgatggtcgaaccgaagacgccttcaggaacaacgccttccaaccagcctttttctcgtgggctgagcgaagcgctgtgtttgagcaccgtcagcgtgtctgaccagatgtgggcggcctcgattacggggtcgccggaagcgttaaccatggtggccccttctatcggtgtggcgaaatctgtacaacagataatatttactctggtttagacaagttatccaccgtgtcgcgtgttgaaataactggattgtgaataacagacatgtaatttgtggataacttttggccgtgaatggttggtattccgccgattataagagatttgaggcgtgtctcgcaacgtgtcgaaatgtgaaaatactccgtccgttttgacttgagggtaggggtgagagtactttggtatagcttgactcacgtgagggcagcgcgaagcgttgccgaatagacctaggagcaatggattatgaagaggacgttccagccgaacaaccgtcgtcgccacatgaagcacggcttccgcctgcgcatgcgcacccgttctggccgtgcggtgatcaaccgtcgccgtgccaagggccgcaagtccctctccgcctgatcattccgatcagtgccacaggcatagtcgaggtggagcggcttcaaagccatcgtgatttcgtcaccgtgctgaaacgccggcgcaaagcaggtggcaaggatatcgtcgtgcactatttggtgcccgacgaccatcatgatgatgacgaccggacggtgcatcgccgtttgggattagctgtctccaaatcggtaggacatgcggtcacccgtaatacggtgaagcgtaggtttcgtgtattggccagagcccatgaggatctgctgcccgcgcattgcgatatcgttttgcgcgccaagcccagtgccgcgaccgcatcgttcgcttcgctagatcagcagatcgcgaaggcttttgccacagtggcgcataaggtggctgaggcatgacagcttctttcaaggcggtgatgattggtggggtgcgctggtatcaacagcacatctcggcaaacacaccgccttgttgtaagtattatccaacgtgctcgaattatgccattgaggcattggaacggtatggcgcgttcaaagggggagtgctcgccatgctgagattactgcgttgccggccgtggagtcgtgggggaatcgacgatgttccacaacggtattccattttttacagattttcgtggtcgaaggctcatgaagagccccgactgacaccattggccacagcccaaagagaggcccaacgatgaactcaaatgaatttctgcttgatagcgggttttggggatttctatataaaatcctgactcccgttgagtggttgcagacctggatcatgaagatcgtgcatgacttcttcgcgatgctgggcatgagcccgattggtgtctcatgggtgcttgccattatcatcctggtgctggtggtgcaggcttgtatcttcccgctgttctacaagcagatgaagtcgatgcgcaagatgcaggcattggcaccgaagatgcagcgcattcagaacaagtacaaaggtaagacggatcaggcgtccaaggaagccatgagtcgtgaaaccatgaaactgtatcaagacaatgacgccaatccggctggctcctgcttgcctatgctcattcagggcccggtgttcatgtccatgttctatacgctgtcggccattccatacattgccaacggtaaacgcgatgcgttgggcgcgttcgacgtagcaaccgccaagcaattcacccaaaccgatgtgttcggcattgtcagtgtgaccgataacttcacccgcgcatctactgcaggcaaggtggtcatcggtatcttcgtgttcctgatgtgcttctgcttgtggctcattcagtacatcaacatgaagcgcaacatggcagctgcttcgatgaacaagcagaccgagaccatgcagaaggccatgctgtggctcttcccggtgatgtacatcttctcgggtgtttccttcccgttcgccgtgttggtgtactggctgaccaacaacgtttgcaacttgtgccgtacgctgtggcaggtgtatgcattcccgacccctggctctccggctgcggcggacaaggagaagcgcgatcatcgtaatgagaatgctcgccgcgcaaaggccggcctgccctctctggaagaagaagcattggccaaggccaaggaagaggctgagcgtaaggccactcagggctatcagcgtcaacagcccgtgcgtaagcgcaaaaagaagtgacgaccatgtcggtgcgcgttcgatgtttcacgtgaaacattcaacacgcaccgacattactttctctgttcgggggagcagggcttagacttggaattcaaacacgacatgaaggagtagcgtatggcacaggatgacgtgaagtcgatcgatcagctcaacgaagaggctgacatcgccgcggattaccttgaaggcctactggatatcgccgactatgagggcgacattgagatgggcgtgcgtaatgaccgccccaccgtgcaaatcgttgctgatgacgataccgacatcaaacatcttattggccataatggtgaagtcgttgatgctctgcagcaattgactcgtctggctgtacagcagaagaccggcgagcgttctcatctgattgtggatgtcgacggtttcctgaagcgcaagcgtcagcacctccgtgatatcgccctggatgccattgacgcagtgaaggattccggcgagccgtatgatttgaagccgatgaattccttcgaacgtaaagtcgttcacgatgtggttcgggaagaggggctgaagtctcgctcgcacggtgaggagcctcatcgttacgtgacggtgtatctcaagaacaaaatcgaggatgttgccgaagacgacgagcttgatcaggagtaataggtcgacgagtttttgagatgacaaggacgttcaacggatgtcgtctctaaacaaacaagagtgaccgtagggagaatggcgtcgtaatgagcgacgccttttccatgttgattgtttcacgtgaaacatggtgagggagatggctatgacggatcagctgcaggggtcacctgtacttgctgaggtcttgggtgatgcgttgccgaagttggagcgtttccatgccaagattgccgaagagggtgaacctcgtggattaatcggcccccgtgacgtcgatatcatttgggaacggcatattctgaattccgctgcgattgtgccgtacgttcggaatgtgacgaatggtattcgcttcaaaacagttgccgacgtcggcagtggtggtggttttcctggattggtggctgccgcgtgtttgcctgatcatgacttcacgctgattgaaccgatggagcggcgaatcgaatggttgcatgaatgtgttgacctgatgcaactgcagaacgttgagattattcgtggacgctccgatgccgtcatccagcaggtacggaagcgggaaattcatccgttcgctgttgtcacgtgtcgtgcggttgctcctatgaccaaactctctggctggacgttgccgttgctgaaaccgtcaggacagttgatcgcactgaagggacggtctgctcaggctgaaatcgacaaggctggcaaggagattgcaaaattcggtggtcgtcgtccacgcgtcgttgaagcggctgtcggaccggatcttgagcctacccgcgtggtgattgtggataagcgatgagtggagtactgattaagttatccacatttccatatgtgcgtaaaagttatccacatttttacgggacgatgtgcagaatgatgaaaacactgatttttcaatgtttttcgtctgcgaatacataatctaacactcaacgtcattcacacttatccacacttatccacattgcatatcgcaattgtggataacgagcatcatgtccatacgaatgagaacactggaacttacgtctgtgcaaggaggagcgatggccaccaaggatcatcagtcggaacctatagaatcggcttccgaaacgcttcagcgaatattcgatggtcacggttcagtgcttggtagccagatggctgatgaaagctcacgctacgatgtactcaagaaaaccgatttccccaaacctcaacgtacccgtcgtattgccgtggccaaccagaaggggggagtgggtaaaaccacatccacggtgaacaccgctgcggcgctggcagacaagggcgcgcaggtgttggtcatcgatatggacccgcagggcaatgcctctacggcgttgggtgtatctcatgcatcgggagagccctcggtctatgacgttatcgaggggcgttccgatctgggggatgtcatcacggtctgtcctgattttcccacacttgatgttgtacctgcatcaatcgatctcagcggtgccgagttggaagtggccgatctgcccaaccgaaacaccttgctgaaggaggccctagacctctacctacgtcaatcagataaacactatgattacgtgttcattgattgcccgcccagcttgggcctgttggtcatcaacgccatgtgtgcagtgaccgagatgctgattcctatccaggctgagtattacgcattggagggtcttggccagctgattaacacgattggtttagtgcaagagcatttcaatcccgtactgctggtgtccaccatgctcgtcacgatgtttgatcgccgaacgttattgagccgtgaagtatataacgaggtcaagggacactatcccagcattgtgctgaataccaccatcccgcgttcagtcaagatctccgaagcgccgagtttctcccaatcggtgattgcctatgatcctcgtggcataggtgccatatcgtatggtgaagcagctttggaaatcgcacagcgttcgcaacaagtccttgacaccattgatgcgaggaggaacaagtaatggcatcaaaatcacgactcggtaagggccttggcgctttgttccccacattgccaggggaggaaccagtggcggagcagcccgcaatgattgcggaggattcgtctactccggcggccactgctgacataacccccgccaagaaggctactgcccagcaggaatcaaagcctgccgcgcctcagacggtatcatccagcaaggcagccaagaaagccgccggtaaacgcgcatccatgcccgcattggacaccattactcatcctagcgacctgtttttcggtacggagaaacctcaaaccggtaaggtcgccgcacctcagcagggcggcaagccgtctgcgtctcagacggcacatcgtacatccgtcaccgtcaaagatgtttcacgtgaaacatctcagactgcatcggcggcaaagaccgctgacacagataagaaggacgagctcaagccggtagccggtggttatctggctgaactcaaactgtctgatatcgggcccaatgcacatcagcctcgtaccatcttcgacgaggatgagttgaatgagctgtctgcttccattaaggaagttggtgtgctgcaaccgatagtcgtgcgcaagcgtccggcaagccggattgctgcggccaaagccgccaagcacgacgagacggaatccagcacgaatccgtttgccggtcatttggacagcccgtatgagctcattatgggtgaacgccgttggcgtgcttctcagttggctgggttggagacgattcccgccatcgtcaaaaccactgcggatgatgatatgctccgcgatgcattgctagaaaacctgcaccgtgtggccttgaatccgctggaagaggcggctgcctaccagcagatgatcgaagagttcgggttgacgcaagcacaactgtccaagtcggtgtccaagtctcgcccgcaaatcgccaataccttgcgactgctgaacctgccggccgctgtgcaaaagagagtggctgccggtgtgctatcgtccggtcatgcgcgtgcgctattgggcctgagcgatccggaggaaatggacaagctggcttctcgtattattgcggaaggtctttctgtacgcagcaccgaagaaatcgtcgccatgaagattgcgtcgggggagcagccgaagaagcccaagacgtccaagaccaatccttgggttggttccgccatccagcagagtttggaaaatcatttcgacaccaaggtgtcgattaagggcagcaccaagcatggtcgcatcgaaatcgtcttctcgtcaccagaggatatggatcgcatcctgcagctgctggtgccgagccaaggcgatgccgattccaaatgggtgtaacacgataagaacattcgtgttgtcgccggcatcgtcagtgacaacaccgatgcttagcgttgtcacttggcattgtatcggcttgtcactgtcgccggcattattgctgtgcagtgcgttgtacgcgcaagacgttatagcctctgcgtgattcctggcaggggcgtatgcctgcgttgtagcccctgtcgcaatagaaaacccctcaggctggagggacaatcacacatcgtgattctccgtcgcctgaggggcctttctatgcctttgaccggtgcgtactatccaagggcggcatgctgtaacactgacctagcgctgctcctatgtcacaggcagcagtcagaacagcaagccatcatcaggtcgccgcaatcagtccgtaagataggcctgcgcatccagcgctgcacggcagcccatgcccgctgcgctgattgcctgacgataagtacgatccacgcaatcgcctgcagcaaagatgcctggcgcactggtcaccgtgctggcaccctgcaccacgacatacccatcattgtcacggtccacaacaccagctgcaaaatcagtggctggcgtatggccgatagccacgaatacggcgttggtgtccagcgtgctttcttctccggtcaccacgttacgtacggcaatgctgctgacactggccggtgccacagccggtcgtttgattgtcaagccaggaatggcaataggtgcaccggtgttctgtgtgggggaggaggtgccggtaatggaggtcaccactgtgttggtcagtagggtgatggtcggattggctttggctcggtccaccatgatctgcgaggcacggaagctatcgcgtcggtgaatcaaggtgaccgaagaaccgaaccgggtcaggaataatgcctcttcaaaagccgaatcgccaccgcctacgaccacgataggcttgttcctgaagaagaagccatcgcaggtggcgcagtacgagacgccatgtccggacagctcctgttcgccgggcaccccaagcttacggaatgacgaccctgtggcgatgatgagtgctgatgcctccaactgggagtcatcggagagcgttacacgataggtcggcttgaccgaatcactctcacacgcctcaatggaagagacatcgtctgtgatataggttgtaccgaagcgcttggcctgttccttcatgcgatccataagatccgggccaagaataccttccgggaatccagggaagttctccacctcagtggtgttgaccaactgtccacctggcgacaacgcaccagtgaccataacaggattaagacctgcacggccaagatagatggcggccgtgtagccagcgggaccagaaccgataatgatgacgttatgtttcacgtgaaacattgtcacacccccatacgatattccatgtcattcagccagacgcgaagaaagggcggcaccgtcgaatgtatgcgaacggtaccgcccttcttgggtcagttatcggtatagatgccgattagaagacctccaccttctcgatgtacagctggttctgcggcaggctacccgatggcacccacagcagcagatcctgcgtattgacggctttggtgaacttcacctcagtagtgccaccttcagcaaaggtgaattcggccacctgctcgccctgagtggggtctccagtggtatttgcgcgaatatagcccttaccaccggatgtgcggatggtgataaccatgcggtacgcatcctgcggctggtcaaggtgcatgtagtatgcgtacccggattggccgccaggattcgacaggaagttggcgctggaaatcgtaaacgccgtgttgttctcatggcgcggttgcggagcagcgctggaatccttatcgctggacttcttggccttggtcttcttggacgacgaatcagcagtctcggacttcttggacttgtctgatgccgagtccctggattcgctctgagtggcatcactcgactttgaggaatcgtcagtggcgccaccgttcgtcgcgttcttgctgccaccgaatggcacagcgtcagcattgatatcgggccagtcaccttcactggagttgctggaagcatcggcaggattgtctccggaggatcggaacgcatacactgcccaaacagccgctgccactaccaatatcagagccacaatgatggcaacgaccttggtcgacagtttgccgaacagatgttcatcgggcagcttgctgtcatcctcgtcatccggcacatccttcggtgtgaagctcggaggaatggcgcttacttcggcaatgcgggcctgctcctcttccaaggcacgcagcgattcctcaccgggggccacagcacggccgctgacatcgaacacgggaatacgactggtcgtctctcccacggtggcatcggaaataccgccggtaacaataggcaccgtcaaccgagtattatcacccggaccgccgatgggggccggattcatttcgctgtaccagtcaccggtgtcttcaccggaaagattctcgtgctcccaggcgtcagaaaggttgaagtcaaacagacggcgggcgtcagattgagactggttgccgtcagcagtactggacccatcaggcagaggagccggtgacatcgcgtgcggagcggggacggcggccggctgaaccggcagggaaggggtaatagacaattccggaagactgctgctgttaatcaacgtgctgggaataggcacgatatcggtctcgttggcgggcttcagtatcgccttggtaatcgagcaatcgctttccacgctcggcaaagcgatatcagcatcgctcagttcagagagcggcttccaattacccaacaaggcgtcgagttctacaagggcagccatcggcaacgtgtgctcgtcgggcttgctcaaggccaatccacgcttgcaaatcacgcggaattcgccaggggtgtcttgcggcaaggcgcgcagattgaatgtgggtgtcgcttggcttggcgtgcgtgtcagcagggcatagagcaatgccgcaagctggcgaatcgcataccgttcaggaccgtccgtacgcagatcggtagcggacgtgtcggccagcatcgtggcacatggtgcatcggcaatctgcacaccggaggtagtcactcgaacggtgtcggttgtgatgacgatgctgctgggagtatccgcaatgacctcgcgcagcacgttggcgcattctccgataatcgaccggatggcgctgtagctgagcggcttgtcggtatccaccatgtagtcagtcaggcattggccgctgtccaccggcatgacaatgagaagtacgtcggattccatacggtatttcagtacgggaatcacacgatcagggcgagtggcggcgatgcgaccagcgagctcatcgattgcggcgaaagcgctgcgattggtaatgatgaacagctggcaatcctttgccaacacacggtcgttggctttccatgcctgaatgccaggctcctcacgcaacgatgataccaaggtgtatcggttgagaatcgtgtctccgagttgcggtttcatagtgcgttcggctccgtgtgattggtgttcgagactggtcttagatattctacgtgtggggctatccttgacgggctccgtctcaggattgatttgcgtatcgtcgactttttccggctgggctgtcacagcaacgtcctcactggccggagtcttgtgtagacgggccagtatcgagtgataggcgctgatgagttccggggtgcgtaccacccacaacacagccacatatactacggccagcacgatggtgagcaccacgcagatggccagcgcagaccaccagctcatgtgcccgcctaccgatcgaatatccgcgccgaacagtgcgactaccggtcgtttgatcagccagaccacaactccggaagccagtgccgccacaatggccttggcatatgtcctcgtgatctcccgaccgccaagattgccttcgaacttgcggcgcaacatcatcaacgtcagcggcaacgccagtaatccgccgagtgtcaccgagcaggcgatgccgagtacccaatgctcaggaggaagtaccatcatgccaatcatcatgaataccgaggtgaacccatactgcatcaccgcggacaggaaggggtgcaggccgtcctcaaaggcatagaacgtgcgctggatcaacaggaacgccgatcccaaaggagtgcccacagatagggcgataagcgcgtaggaaatcagcatggtctcgtccatcgagacggacggaagcaatgcgcggatgatcggttcggggaacacgaccatgtcggcggcgaagaatatgatcagcagccccacgttgttcagcgcgctcaccagatcgtgccgtgc

SEQ ID NO: 2534 - DNA, 7546 bp, Unknown
  R50_10m  MAG No. k141_26966
acgcgggtgcgttcgccttcggacagtcgccacatctccttgccttccagataggagacgcgaaaatcgcgcagcagctggcgggcgcgggcgtatccctcttgcgtgtaggtgtcgcgccagcgcccggtcacggcggacaggccggtgaccacggcgtccagcgggtcctcgaactcggggaactgccggcccaggtcggccgaggcgagaccgatgcgggtgcgcagtttgaatacgtcgtatttgccgagttgatggccgaggatgaatacgcggccttccgagggaaacgtgcgggtggccagcatgtcgaccgcggtggatttgccgatgccgttcggaccgaacagcacccaacgctcccccgcgttgatggtgaggttcacgtcggtgatgatgacacgacggttgcgccggaattcgacgttgtcgagttggaggacggtgtttgtcatgagtgaaatactaactatgattcgcgatctgaggactcccctcagtcacctacggtgacagctcccctccctgaggggagctggccggcgcagccggactgaggggagcactcgttgcagcgctacttacttcttctgctcgtcgagcacggactggtagacctccacggtcttgtcgccgatggactcccagctgaacacgtcgcgggcgcgttcgtagccggcctgacccatcttcttggcgagttcggggtcagccatgatcctgtcgatggcggcggccatgtcgtgcacaaacttgtccggatcggtgggggtgccggtgccgtcgtgcagctggtcgatcgggaccagatagccggtttcgccgtcgaccacgacttccggaatgccgccagtggcggatgcgacgaccggcagaccgcaggccatggcctcaaggttcacgatgcccagcggctcgtagatgctcgggcagatgaaggcatcacagccgtgttccaaagcattcagctcaggcttcggcagcatttcttcaatccagacgatgttgccgcgttcctcatccagcttggcgaacgcgatcttgacctcttcggcgatttccggggtgtcaggagcaccggcgcacagcaccacctgaatgtccttggaaatcaggtgcagtgccttgagcaggtatggcaggcccttctggcgggtgatacggcccacgaacagcagggtgggcttcgaacggtcgatgtggtaacgctcgaacaccttccaacccggatcgtctggtgccggggtagcgaagtcggccatggtgatgccgttgtacaccacaaccaccttgttcggatcgaggttcgggtaagcagccagaatatccttgcgcatgccaccggaaacggcgatcacacgatcggcgtgctcgtaagcatccttctcagcccaggagctcagattgtagccgccgccgagctgctcacgcttccacgggcggaacggctccagagagtgcgcggtaataaccaatggagtgccgtgcagcatcttggccatgtagcccgccaagcaggcataccaggtgtgcgcgtggatgatgtcggcgtccacatcattggcgatctgcaaatcaacgccgaaggtcttcaatgcggggttggcatcagccagctcagaaggcgtgtcatagccgacgaccttcaagctgcccttagcatcggcagcattcgggatagcaggaatgtccgcctcggtgcgcttgccatcaaacgcacgaacggttacgtcgatgcgctcggcaagcaccttggacagttcctcggcgtgtacaccggccccaccatagacatgcggcgggtattcgcgggttagaatatcaactttcatcggactgcctctccttcgtgcgtcagaaagaaactcaagcacttcttactttagggcaccgcatacaagaaaacgcacaacttccgtcgtgcgttttgcttttcaagccggatttaccgggcaaaagatcagactgccgtgccgttctgatccaaattcggattgtgcttggaatcgccagcggtgaagaacaggctcagcacacccacaatgaacaccgcggaaacggtgatgatcagccacatcggatggcttggcagccacataaccacgaagaacgcgataatcgcgatggcgatcagcgtccagctgcccacacggaaccactgacgcagcgaatgcggtgccttgaacatcttcggattcgtgtagttcgggttagtggtcagcagggtttcggtgtccgcaatcgtaccgccgctgggcttccattcggtgccgtcggtgccgtcctgcagacgctgggacttctgctgcagctgatattcgtcaatcattcccgaacggccacggccacgggtctggtcatactgcgacggcactcccctgcggcctgctttggcttgggcacggcgttctgcacgattcggcattccactactcctgtttcgacggtgacactgttggctatattacccgcttatcggcggcaatttgccaccagtccatcggaacccactgtgtgtcattgtattttcagtcagtgatgcgggcagtcggtgatgcgataggtttgcgtatggaagtcgcaagtgaccgcagtgccgtccgcgaataccgaacgctgcaccagcggatcatcatccacgaactcgtgacgaaccagttcctgcatgccgacccgctcatggaatgcagcgaccgtatggcagcgttcgatgtcgttttccgtgcgagcgcgctgttcgtcgtccatgtcgccgtcaacgccgatgtatgcggcatcgcgaatcaggtatggagctccgccgttgagcaaggcgtacagcatgtaatcgtcgccgtccaccacacgctccatcatccacggctcgataacgcaatcatggtagacgaggttatacagcggcaccggtacaccttggcgcggctcgttgggtgagcgcatctggaagtcgtatggcgcgtaatggcagaatatcaggcttggcactgcccagtccgatacctcttcggacgaggagaggatgccgtgcgagagcagatattcgaagcattcggcgcggcggtcaaagcattcgcggcgggtcatgcggtgttcggggttcgagcattcgtcgccttcgttgcaggtgaaaacatccaagtatgcacagtcgagcttgatgccgtgtgcggcgatttcggcgaaattgcggcgcacgtagtccggtgcgagctcggcgcacaggtaggtctggtggccgcccgcccagcgtgcgtgttcgggcatcgtaccgtctgccagccgaatcgcattgttggcatcaaaggtttgcgcggtgaagtagtaatcgcggtactggtcatgcgtgccgaaaatatcgccttgctcatggcaggcgtcgaccagcgacttcatgccttcccagccgcctgcctcctgacaagccggcagatagtcggggtgtgcgttgtcgtatccgggctgtgcccaaccatccaagtgcatgtacagtcggcctgcacccatgctgtgcaatgttcgcatttgcttttcgcgctgcgcaaaggtgaccaatgaatcgtttttctcggggtggtccttatcgtagtagtacgagtcgggctgtactttggttttgatgccgatgtgcacccatgaacgaccaatcaggtcacgcacggagggattgcgcgccgccttttcggcgagcgtacgcaggcgacctcgttcgttgacgtacgaacgataggccttgcacaccgccgtgtgatcggcgtggtcgaggaactggtagcgtaccacgcggcgataattcattgtgccgaggcttggctcaaaccaagtattgatatgggtgtacgggccatcgctgggatggtcgatgccgtaaccggcattccatggagtttcgcagatggcgatatacccgtgtccgtctgcgcggagctgcgcgaaccacggcatgtaaccgccagccgtttcgaagcggccgtcgaaggcgatgtctttggtgctcacggcggtaggccatgtgttggggatcatcacaccttgctcatgggtgatgagtgtcgtgtcatggtcgtcggcgcaatcgaagtccatggctgcgggccacgtcacattggtgatgttcaggccttgctcattgagcggaatccattcgaagagcacatcgcctgaggcacgctccacccatacataggtttcaaaggagtatgcgctgtgcccaaagccggtgaagatgctgcgaatgccggttcccgtgccggtttcacgctgctcatgggtgatggaagtggcatccgcgaacgcgaaggtgccttgcgcgcattgcagggtcggcttgaaatcagcgcaggtattccattcggcaccgtcgcgcgtaaaagcgaactgcattgttcgttcatcgaatcgcacggtagtgccggatacggtgaattccatagttaatgtgctcctgtatgttctcgattgctcccgcttacgggagctcgctcatataacaagataggggtggtctgctgtttgagaccacccccagtcggctttgccgacagcccccgccagcggggggggctagcgctgtctgtttattacttactgcttactgcttcttggtcagtgcggtgaacactgggccgccgccgtagtcgaatgcgacgccggagactgcggaggtgctggctgcggtggcattctggttccacaacgggatagccggaaggtcctgcagcagaatctcctcaccttgctgataatacttgtcggcttcctcggtggacggggcggaaagagccttgtccatcatggcatcgaactcggggttcttgtagttgccgctgttgccgcccttgccgtcggccgaactggaatcgtacagctgtaccagatagttgtccgcggatggataatcagggccccaaccgctgcggtatgcggaggtcatcttgcctgaatccacattggacaggaattcgtcggaagtggacatcgggatgctcttggcatcgatatccagcgtgttcttgatgtagttgcagattgcctcaacccagttcttcgcagtgccatcagcattgtatgcaatgccgaactcaccgctccacggggagatggcgttggccttggcccacagttccttggccttggacgggttgtacttcagtacttcatttcccttgagttccttggagtaggcgctgattggggctgcaaggaagtcgacggcgggcgtggcggtgccgtggaagatcttctcggcgacggtcttgcggtcgatggacatggaaatggcctgacgacgcaggttgccttcctcgttctggccgaagtgttccagccattcaggaatggtgaaggtgagcgtattgccaccgggctcgttgtatgccttcagcgacttgtcggattggaaggaggtaagtgcggtgtcaggaatcgtgttcgtgaagtccaggttgccaccgcgtaggtcggcgtatgccgaatcaggcgaggtatagatcttgaagttcaggccatcgttcttggcgacacgattgcccttgtagtcagggttcttcaccatttcgatgctgtggttgtgctgccaggacacgaacttgtatgggccgttgctcactgggtgctgaccgaacttcttcgggtccttgaacgcggattcgggcaacggcatgtaggcgtggctgccggccttgaccgggaatgccgagtcgggctggctgagcttgacatcgatggtgttgtcgtcaacgacggtcagaccgctcagcgtggccttggggtccacgtccggcttttgcagatcatcatagccttcgattgtgctgaagaagctggcgctggcctgcttgttggcactgttggcggtgtaattccatgcgtttacgaaggagtgcgcggtcaccggagtgccgtcggtgaacttccatccgctcttgagcttgatgacgtaatgcgtggcgttgtcgctggaggtgatgctgtctgctacctcgttgtggatgccgcccttcgcatcgtaggtcaccagacctgcgaacagctggtctacaaccttgccgccaccggcctcagtggtgttgccggggaatagtgggtgtgccggctcactgccgtacacggaaatgatattggaatctgaagcattgctggaattggaggtaccggtcgatccgcagccgctgagcagcatgacgattgccgcaccggccgcgaccagtgaagtgacatgacgtgtgttcatgaatctctcccaaatattctggcgtcatctttttggcgacgaaagacaccataggagcttcatgttaaccatgtatgcaatattctcgaaatataaacattactgaagactcaaggcagtaattaatcccagaaacgcaaaaatcccctcatgaagaagggattttcatgtttctgtttggaaagtattcagcgaggcagcatcatcggacgctggctggccttgatcggggccggcagctcgctcttttccttggagaggtactcgtccacggctgcggcgcaggagcggccttcggcgatggcccagaccacgaggctctggccacggccggcatcgccgcacacgaacacgccatcctgggaggtggcgaacttgtcattgcgagcgatgttgccacgcttgtcgagttcgacgggcagctggtcgaggatggtctcggtgtccgggtgcaggaagcccacggagatgaggaccagatcggcgggcagcacgcgctcagtgccaggctggcgagtgaacggaccattttcgccgggagccacggagacgaccttcaagccggtgacatgaccacgctcatcggccacgaagccttcggcggtggtcgagttgtcgatggtgaccttggccttctcctcttcggtgccctcgaagttcacggagtcggtggagtagatgtactcgccgccctcttccatggaggaggtcttctggtaggtgcgggcgaaggtcggccatgggctgttgtccggacggcttgacggctctttcggcatgatctgtagcacggtgacgtccttcgcaccctgacggatcgaggtgccgaggcagtcggaaccggtgtcgccaccgccgatgacgatgacgtgcttgtccttggcggtgatgtcgtgcaccggcttgacgccgaagatacggcgcgtggcgtcgggcaggaagtcgagggcgaagtggatgccgtcgagctcgcggcccggaatcttcatatcgcgcggcacgcgggagccgatggccactacgacggcgtcgtaacggtcacgcaggtcatcccacgtgatgtccttgccgatttccacgttggtgcggaagcgggtgccttcggcctccatctgcttgatacgacggtcgatcagtcgcttgtcgagcttgaagttcgggatgccgtagcgcatcagaccgccgatggcgtcatcgcgctcatagacgacgaccgtgtggccggctcgggtgagctgctgggcgcatgccagaccggcgggaccggatccgacgaccgccacggtctggtcggtcagacgctgcggaggcatg

SEQ ID NO: 2535 - DNA, 3568 bp, Unknown
  R50_10m  MAG No. k141_27314
acaggagcaacgaacggtgatagtcaaccagatcctgatcgatgtaaccgatcagatgggccagctcggcggcatacaccataccgacggccaccgcattgccatgcctccagcggaagtgctcgagcttttcgatggcatggcccatcgtgtgcccgtagttgaggaattcacgcagacccttctccttcaaatcggaggagacgtagtaggccttgacctttaccgtgcgctcaatgagctcggcaaccacgtcttcgagcggcgagccgaggaatgtagagccgtcgaaagcgcgcagttcagctgcgtggtcttcgaggatatgcaggatttcggggtcgcggatgaaaccggatttggcgacttcaccgagaccctcaatgaagatgtcattgggcagcgtagccagcgtcttggtgtcggccagcacaccggcaggcgtgtagaacgagccgacgaggttcttgccctgcggggtgttgatgccggttttgccaccggtggaggcatcgaccatggccagcagcgaggtcgggcagtttacatagcgcacgccgcgcatccacgtggcagccacaaaaccggccaaatcggttgcggcaccgcctccaagccccaccacggcatcggatcgggtgaaaccttcgttgccaaggcgttcccaaatgccgttggccacggtaatggtcttgccgggttcggcatccggaatcacgatgtcggaaacctcatagccgccctgacgcaacagggcgcgggcacgatcggagtgtcgctgcaccggctgggtatggataagcgcgattttggcgggcttgggtcccagcacgtcgaccagatgattcatggcaccttcgccaatgaccacatcatacggctcaattgccgatccggtaacatgcactgctcgctcagataccatatcaatcactttcttcgctgcgccctgaggcgtaagcccccgggtatggacatgaacgttggcgacctcgcggaataccgggtcacgctgcttgaacagtgtcttccaacgggagttggcattgccattgagcatgggccggcctcccccgcggttcgcgcgttccatggcctccgccggatcggcgtcaaggtagaccacacgaccgccatggtcgatgtatgaggcgagggcatgctgggtggatggcgtcatgggagcgccaccgcccagcgaaaagataccgtcgaaatcctcaagcatatcggcgatgagatcggcctcgacctcgcggaatgccggctcaccgtattcatcgaagtaggcgggaatcttcatgcccacttcacgttcgatctccacatcggcatcggcgaacggcagacgcaacatatgcgccacttccttaccgacacgtgttttgccggctcccatcatgccgatgatgacggcgcgggggcgtgcggtcataatctacgaatcctctcgacgattggtgggtacagttgctgatggttccgcggcagtcgtctcggaaccatactccacttcgttcagcgcatgtgctccggccacgaggcgagatacgactcaaggttgcgccgtgtttcggcaacactgtctccaccgaacttatccagcgcgtacttcgccaaagtcagacgcaccatggcctcggccaccacggatgccgcaggcacggcggtgctgtcggaacgctggttgatggcttgtgcggattcgccggtcagcacgtcgaccgtacgcagggccttggggatggacggaatcggcttcatggcaccgcgtacgcgaatcacctggccattggacataccgccttcaatgccgcctgcgcggttggacagacggtcgatgcggccgtcggcgttgaccacgatctcatcgtgcgcctgcgaaccggggcgggaggcttccaggaagccgtcgccgatctccacacccttgaacgcctgaatgcccataatcgcggaggccagagccgcgtccagtcggcggtcggactccacatacgtgccgatgccggcaggcacaccgtaagccagcacttcaatcacgccgcccaacgtatcggcggccttcttggcctcgttgatgcgttcgatgatacggacctcggcctctttatccaacgtacgcacgggagaggcatccaacgcttccagatcgtcaggtgtgggcaacggcaaatcagggttggtctgcacgccaccgagcgccaccacgtgggctacggtgcggatgccgaacgcctgatccaggaactgcttggccacctcgcccaaggccacacgggaggcggtctcacgggcgctggagcgctccagtaccggtcgggcgtcgtcaaaaccatacttgcgcatgccggtcagatcggcgtggcccgggcgcgggcggctcagcggcgcattgcggccttcgcgcggcaggtcatggtcgagtgcatcggcgctcatgacctcggtccacttcggccattcggtgttggcgatttcgatggccaccggcgagccgagggtcaggccgtggcgtacaccggtcagcagacggaccttgtcttgctcgaacttcatgcgggcaccgcgaccatatccaagtcgacggcgtgccagtgcggaaacgatatcgtccgtgctaatacgcacgccggccggcaacccttcaatcatggccaccaatgcttctccgtgcgactcccctgccgtctgccaacgcagcataacttccctcgtttcatgtgtgtacgtctatgagtacgtctaactaggggttaatgttaagctatgccatacctgttcacgctacccggtctgctatgtgggcttacactgtccattgaggatgttcgtcatcggcgggtgccgatcgcatgggtggccgtgggcgcgttaatccagttggccgccgatttcgcgtatggagtggtggcgaacgacctgttcgtgctgttgcaggcactgttgttcaccgtgctatgttgcctgatccagttcgcgttggcgttgctggtgccgcggtcattgggattcggcgatgtgaccgccttgatacctatgggattgtctgtcggactgtttggcctgttgcctgtggtggtctggtggctggcgatgggcgttgccggcatcacatggattgccttgtggacgcgattcgacccacaacgcacatcaccggcacatgcgggcaaggtgccgtatgtgccggtgatattggcgggcgcgattgtggcggtggttgttggggcttaatcccgtattactcccctcagtccgctttgcggacagctcccctcggcgaggggagccaatgaggcgactactggttttcggcttgccacttgcgtagttcggccacattctggtcatgttcatcggcggttacggcgaacttggtttcgccggtgtccagattgaccgtgcagaagtacagccaattgccgctgtcggggtgcagtgccgcttgaatggcgctatcgccgggattgctgatcggcgtaggcggcaggccggagatcttgtacgtgttgtacgggttggactcgtcttgggtcatctcggtggtcacctgcgcgggcttgac

SEQ ID NO: 2536 - DNA, 3037 bp, Unknown
  R50_10m  MAG No. k141_27422
atcagaccaccgatggcgtcgtccttctcgtagacgacgacggtgtggccggcgcgggtgagctgctgtgcggcggcgaggccggcagggccggagccgacgacggcgaccgtctggtcggtcagacgctgcggcggcagcggcttgacgtagtccaaatcccatgcctggtcgatgatggtctgctcgtcaagcttgatcatggtcggcggctggtggatgccgagcacgcaggcctgctcgcacagggccgggcagatgcggccggtgacttcggggaagttgttggtcatggacagacggttgtaggcgtcttcccacttgccctgacggaccaagtcgttccactcgggaatcaggttacccagcgggcatccggtcatgcagaacggggtgccacaatccatgcagcgggccgcctgcgtttgggtccacggttgcaggccggtttcggcgtgaacgtcgaaccagtccttgatacgctcctcaacggggcgttcagccaactctcggcgggtacggaccttcaggaatcctctcgggtcgcccatgtcagcgcgctccttccataacctgctcgtacaccttttcccaggtgccgggcgcattgaaatctacattgttggccttggcttcttccatggccttcgtcatggccacgaactgcttcggcaccacgtgagtgaaccgcttgacggtttcgttccagtcctccagcagggccgcggcgaactgggaaccggtctcttcggcatgctgcttgaccagtgcgtacaccagcttggaggtttcggcatcaagcgacttgaaaagcagtgcaccggacttgatggcacccgggttgaccttcttcatatcgaggtcaagcacataagtgttaccgccggagaagcctgcaccgaagttgcgtccggtggggccgagcaccacaacagtgccgccggtcatgtactcgcagccgtggtcgcccacgccttcgaccacgaacgtggcaccgccgttacgaacgccgaaacgttcgccggcgcgaccggctacgaacatctggccggaagtggcgccgaaaccggtgacagtgccggcgatgacgttgctgtgcttgtcgaaggtgacggcgtcttccgggcgcacgatcatgcgaccgccggacaggcccttgccggcgtagtcgttgacttcaccgtagatgcgcatggtctcgccgcgcgggatgaacgcaccgatggactggcctccggaaccgtgcagggtcatgtcgatggtgtcgtccggcagaccttcctcgccgtaacggcgggtgatctcgtagccgaccatggtgccgaccgtacggttgacgttgcgaatcggcatttcgatgcgcacgggttccttgtgttcgagggccggctgggcaagttcgatgagcttgttgtccagtgccttctccagctcgtggttctgctcgatggtctggtgcaggatcgtgccgggtaccgggccggcctgcttgagcacgttggtcaggtcgatgccgccggacttccagcgcttgatggcctcgtcctgatccaaacactcaacgtggccgatggcctcctcaagagtcctgaagccgagctgggcgaggatctcgcgcacctcctcagcgatgaacatgaagaagttgaccacgtactcgggcttgcccttaaagcgggcgcgcagctcaggatcctgggtggcaatgccctgcgggcaggtgttcttctggcaggcgcgcatcatgacgcagccttccacgatcagggccgcagtagcgaagccgaattcctcggcaccaagcagggcggcgatgaccacgtcacgaccggtcttgagctcgccgtcgcactgtacgacgatgcgggagcgcaggccgttcaggatcagcgtctgctgggtttcggacaggccgatctcccacggggtgccggcgtgcttgatggcgttgagcggggctgcacccgtaccgccgtcatagccggagataagcaccacgtcggcatggcacttggccacaccggccgcgatggtgccgacgccgaactccgagacgagcttgacgtggatgcgcgccttcgggttggccatcttcgcatcgttgatcagctgcttgagatcctcgatggagtagatgtcgtggtgaggcggcggggagataagctccacgcccggggtggcgtgacggaccttggcgatccacggcgggaccttggcaccgggcaggtggccaccctcaccgggcttggcgccctgggcgagcttgatctgcaggtcggtggcgtgcacgaggtaatcggaggtcacgccgaagcgagcggacgcgatctgcttgatgcggctgtagcgctgcgggtcgttgatacgatcgtcggattcgccgccctcaccggagttggagcgtgcgccaatcgaattcatggcgatggcaagcgtctcgtgcgcttcctgtgagatggaaccgtagctcatggcaccggtggagaagcgcttgacgatctcagaggccggctcgacttcggagatgtcgattggcttgcggttgttgttgaacttcatcaggccacgcagggtcatgagtcggttcgacgtgtcgttgatgtggtgcgaatacttcttgaacatctggtagtcgccacggtgggtcgactgctggagcaggaagatggcctcgggatcgttgaggtggtcctcgccggtacgacgccacttgtagtcgccgcccgtgcgcaggttgcggtgcggggatgcgctccactggttcgggtaggccacgcggtgacggatggccacttcttcggcgatctcgtcaaggcccacgccacccacacgggaggtggtgccggtgaagtattcgtcgatgacttcctggctcaggcccacagcctcgaacagctgtgcgccacggtagctcatgatggtggagacgcccatcttggacatgatcttgagcacaccggtggaaagcgccttggtgaggttcttcacggcggtgtccgcgtcgaccttgaggtagccgttacgggccaaatcctca

SEQ ID NO: 2537 - DNA, 6521 bp, Unknown
  R50_10m  MAG No. k141_27527
cggtgatattccggttattttcaacattcacggtggcgcgttcttctattcattcaaggaaattcagaatgcgtatgccgctcagcttgccagccgaggatttgccgtggtgtgccccaactatacgttggcacccgggggcgatttcctcgatatgttgactgatgtgtcgacggccttgcgatggctagtaagcaatggtgatgggtggcagctgtcggctgagcaactgttcctggtcagcgattctgccggcgcattgctgggaacgttcctgttggcgtgtgagaccaatgaggagctgtcctctcttctggggattgatagtaatcatgtgcggttccaattagtcggtttcacctccggcatgctggtgtatgaccatctgttcgatgcgttctacccggattccggcgagctgttcgagaagctgcggccagcgttccgaacattgatatcacgattggagggaacaccatatgagcgtactgaatcgttgatgcgagcaatcgcatatccgccggtatggctttccaccagtaccgatgattttctggaaaacgatgcgctgtacgcaacgatgctactgcgctcgatgaactgcgatcatgaactgcatgatctgcggtctgtcaacggcaagcgtattcctcatgactatcccttgatgacgtgggattccggcagcggagaactcaatgacgcaatgatggcgttcttccgcgagcatctatcaccgcgcacatcgcttacggcgagtgtgtagatgacattgccgccgcaatcgcgaaaagacgatgactgcggcggcatcctcaacatcactccaacagaaagcatgacccacggcaccacgcgtcaggcgttcagtctcatcaccaatcccatcgtcaccatcgtgcttttttgcgctcgccgtgttcgcctgctgacggtagcctacactgagaaacagcctacactgagaaaccatgagcaagcaccaccatcgcgaccgtagctgggccccggcacctgaagcattgccggacgacgcccagaccatcgacaaccacactcacgtggcctccgtaatccctttcgcgcgcgctatgagccatgaggcgcaggagaaggggcagcccgaagtcccggtgtacgacgtcgaccaattgctggcgcaggcgcaatctgtcggcattgggggtatcatcgactgcggttgcgagctgccgcacctgatgaccgccgtccagatggccctcgatcatccaggtaacgtgcacgcggcgctcgcaatacaccccaatgagtccgtgctccacgggcatcgcggtgtgccggggccggatggtctgcccctcaaatacaagccttaccatgacacgtctttcgaggacgcgctcgccgaagtacatcgcctcgccaccacataccccgagcaagtggtggctatcggcgagaccggcatggacctcttccgcaccggcgaaggtgccaaggaactgcaacgcgaggctttccgcgcgcatattgccctggccaaggaactgggcctgcccatgcagattcacgaccgcgactcccatcgcgaggtcatcgaaaccctgctggccgacggcgcgcccgaacgcaccgtattccactcgtattccggcgaccgtgagatggccgagattgcgcgcgaacatggctggtatctgagcttctccggcaccgtgagctacaaaggcaatgacggtatccgcgaatcgctacggattgtgggtctgggccatgcgatggtcgaaaccgacgcgccgtatctgacgcccatgccgtaccgtggccgcaccaacgcgccgtacatgatcccctacaccttgcgggccatggccgatacgctcgacctgtccatcgcggatgtggcgcgcggcacccgcgataccgcccgcgccgtatacggactgtgagggccgggtgtgcggccgtcgcggcgatgtgttgacttgtaaaatttgtcagaattgtgaacgaggtctaccatgatgtacctgacataagcgagggggatgatctccacctcaatggaggactgaacgtatggctgagtcgaaccaaaggaccgcacgcgcccaaaaagcctcaaaggcccagacagcccaggctggcgccgccaaagccaaggcccgacaggaagaagaagcactgctgagggccgacacctttaccaatgctcccaaggtgtcccgccgcactctcaccaaggaggagcgcgaggcactcgccaagcagagggaagccgaaaccaaggaagccgagaaaatcgccagcgcatggtcgaaaggcggcctcggccgatggtgggcccgcttgcaatccagcccagacaaggttacctggggcatggcgatcgtggcgctcggcgtggtgtacggcgacatcggcacctcgcccctctacaccgcgcagaccttccttgccggtcagggagggcttggcagcgtaaaccgagaggccgtgctcggcatgctgtcgctggtcttctggtcgattacgctgatcaccaccgtcaaatatgtgctcatcgccatgcgcatcgacaacaatggcgaaggcggcatcttcgcactgtactcgttgattcgcaagtacggcgcatggctcgcgattcccgccatgctcggcggcgcggcattccttgcggattcggtacttaccccggcggtttccatcagttccgcagtcgaaggcttgcagaccctgccgccattggaagggttgttcgacgaaaacccaagcctgaccctgatgattaccgtcgtgatcatcgtgattctcttctccgtgcagtcgcgcggcaccgaaagcatcggcaaagtattcggctcgatggtgctggtctggttcagcttcctcgccatcgtaggcgtcacgaatctctctaacgactggtctgtgttcgcggccctgaacccggtgtacggcatcaaattcctgttcagcccggacaatgctgccggcatcgccctgatgggcaccgtgttcctctcgaccaccggtgccgaggcgctgtactccgacatgggccacgtggggcgcggcaacatctacttcacctggccattcatcaaggttgcgctggtgctcaactacttcggccaaggcgcgtggatgttggccaatagcgataacccgcaatacaccgcgatgaagtcgctcaacccgttcttccagatgatgaccccgaacgtgcggtacctggccgtgattctgtctgtttcggccggcgtgatcgcctcccaggccctgatcacgggcgcgttcaccatggtttccgaggccacccgcctcaactggatgccccatctgcaggtgcgttacccggcccgtacgcgcggccagctgtacattccggtggtcaacggcgtgttgtgcgtggccacgctcgccgtgctcgccatcttcaaggattccgaacacatctccgccgcgtacggcctggcgttgaccattacgatgatcaccaccaccgtgttgctcggcgtctacttatggcattccggcaagcgggtcggtgccatcgtgttcaccgtgctgttcttggcgattcaggctatgttcttcatcgcgtctatggccaaattcctgcacggtggttggttcaccatgttgctgaccgccgcgattctgttcgtcatgtacacgtggaatgagggcaccaagctcgaacgtgcgcaacgccgtcacatgcggcccaacgacttcctacccgcgctcgacaagctgcacggtgatttccgcatcccgtattttgcggacaacatcgtgtacctgacctccgactcggaaaccaagcgactcgacacggacatcttcttctccatcttcgccgaccaccccaagcgtgcccgtgcttggtgggcagtcagcgtggaaaccaccgacgagccgttcacccgtgaatactcggtggaggacttcggcacgaactacatctaccgcgtgcgcttccgtttgggcttcaaggtttcgcagtccatcccggcgtacatccaccagatcatgcacgacctgtccaaaaccggcgaactgcctaagcagaagtcgatttaccccaaggtcgacgccgatccggacatcggcaccatccgttacgtgctgattcacaaggccctgatgccggaatccaaggtttccgcacgcggtgccctgtcgttgcaagccaagtacgcaatccgccgcatggccggctcgccggttaagtggttcggtctggcaccttacaacccgctggtcgaggtgcagccgctgttcgtctccacccgccgcccaccgcgtctgaagcgcaccgatacggccaagaccatcacgacgcccacgccgactcgtgcagtggccgacccggccgccgtccccgacccgatggacaccacgtccgggctcgggcgattggtacaggagctcgatgccgccgtatcggccgaggagcggaagatcgctgagaccgctgccgccgctgagcagggcgataagggcaaggccaagaacggcaaacccgccgccaagcctcagcgctccgccaaacagaagcgataacataccagtttgcagcggcgctgatgcgctctataaagaatgcctataacagtcgccgcacgtcgccacatggtttcggtaagttgaaataccatgtgcagattactgggatacgcgacggcaggcttcaacctgagtctcaacgccgtgttggggcaagacaatgtcgaggatttccgtgaactgtctgaaatccacaatgatggctggggtgtagcccagctttccgatcccgccgaagcaccgcacgtgcgcgacggcggcgcacccactccggaaaccggcacccgaatctacaagtcgaccatcgcggcccgtcatgacagcacgtttgaggcgctggccgacgaaccgtctcgcggtgccatctggcacctgcgcttggcaagctccaatctgccgctcatcatggagaaccagcacccgttctatgcgaacggcctgagcttcatccacaacggcgatatctcggacgccaatggccgcaacatcgtcaccaaccgttcatacccggtgaaccacagcgtgctcctctccaccggcggccgttccgactccgctatcttcttcgcggtgattctggaatacatcggcttcggcttcccgctcgacgaggctgtggcccaggccgtgcgcgaactgcgccaaacctacccgaagtccagctacaactgcatgattcagtccgaggaccagctcatcgccctgtgcgccgccggtcgtgagaagaccagcccgcgcatcgtggaaatctacgatgagtacggccgtggcgagcaggccgccgactaccgtgtgatgcgctaccgtgagctgcgcgacgacaacggcgactccgccggtgtggtggtctcctcttccggctatgagcaggaaggctggaatgtgctggagaacgaccagatgatcatcgcctccaaccgcaacggcacctaccgtctccgttccatctgaaatagcttcataagctccctctgacgaggaggcccctagagcctcaaatcatccgcatcccatacttctccgccaacgccggaatatccggcacgccatacttggccaccagatccagccatcgttgtttgttctctccgccaaatcgctcggctcgggccgtatacgcctcgacctgcaggaacttcggcggcactgacttgctatggaacttgtcggcgtacatcaccacttcctgctcgagattcatcggcacatagtcggctggtggcaatggcagctcctggcgcaccacatcctcgcgcgtaagtcccacgccggtatggttgcggcagaactgggcgatggactcgtccacgccctcgtcgagcagatactcgtagcccttaagaccgtgcagaatgtagcgtttcttgctgaatttgagcggttcgtcgtcagagccgtcatgcttgaacacgcggtaggtgccgatgtcatgcagcagtccgccgatgagtactaaatgctcgtcgagcagacgcggcggcacatggccgccggtgacgcctgcggtgggcggtacctccgcgtccttcggtaatgtgcagcggcgcgtgaacagcgcgttctgccggcgcacgatctggcagccgatggtcgccacaatcacgcaatgcgtgtgcaccagctcgtacgccgccttggacggcgcgattttgcggtgcaactcgtcgatctgctccagtgtgggaatatatccggtcatgattatcaggtttcgcctcgtacggtcagatttatcttcagattagcgcggcaatgagccgcatcaggattgtcaggagctgattcggacatctcgacatgcctatctccgtttcaaggggctgattcggcatcctcctgaggtctacttccgtttcaaggggctggtcatccgccaaaccccgagtataaacggcttcatgccaacgtcattccgccgtttttacgccgcgtatacttgggcactagccccttgaaacgga

SEQ ID NO: 2538 - DNA, 3734 bp, Unknown
  R50_10m  MAG No. k141_27912
gcgtatcctggctcatcgtgtagatggactggtagaagatcacggtttcggcgccctcacggaacacggcgaggaagctcagcatggcgagcgaaatcaccgtgcgggaagccaccttctcgccggattcgacctgcgaggagacagaggccaccgcggcttcggtcttttccctgatgtagcggttccacgcttccaccgaggacttgttgagcatccagttgctggtccacagcagcatgcacatggcgacgagcgcgcacacgccttccatgatctcctgcagcgggccggagccgccgaacgcgagcatgaagatgaccgccacgatgcctgcgccggccagaccggcgagcacgcccacgtagatccacttggtgaagcgcttgttgccggacttgacgaggtaggccaccacagcggcgaccacgagcagggcctcgagaccctcgcggatcagaatcaggaacgcctggccgaccgagctggtgatgaacttgaggaagccaccctcctcatcggccgcgccgccgtcgagcttggcggcatcggtggccagcatgttcttcaggtcgtcgatgtacttcttgacttcggaagcaggcttgccggtgttcatcgaggagcggcacagcttgaactggtattccacctgggagacgcggttgccgctgatggcgctcagcacggtcttctcgaagccgagcttctcgtagtgctggtagtaggcgtcgttcacgagcgtggcgcccttggcggcgtcgccaccctcataggccttgtaggcgttgtccaggatcggaagcatcgcatccgcgacttccttccaagtcttggccgtttcctcggtgcgcttcttcttggcgtcgagctccttgcgctccttggcgatctgcttctggaggtcttcggagtactgcttcgggttggcgaggctggtgttggcgtcgagctgctgggccgtggcgtcgaggtcggcggtcaggtcgttgaccttctgggtaagctgatcggcctggtctgacgtgaacacctggctttgcaggtcctggaaggcctgctgctgcgcggtctgcttgtctgcgccgatggtgtcgctcaccactttgttgaagttggacgtcacgtagacggtggtgtatgcagccccgaaatcggacttggcacccattgggttgccgtccttgtattccttaaggccttcctgcaactgcgcttcgacggccttggcaacgtcggcccaggtcgcgtaatcgacgctggtgatgtcgtcgctcttgacggtggcagcagtggcagtggttgccggcgtcacggcgaacgcggactgcggaatgatggcggaggggaggaaggtcgcggcgatcatcgcaaacagaaaaacgatgaccgcaaatgcacgagccgagaccgtggccgactgcagacgacaggcgctgcccgacttcgcgcgcacgcgagaaacggcaacgcgcgtatcacgttcccgcatcgtgttcatttcagcggactgcgcgcaggcgcgacgaaccatgctgaattcctctcacttcaagtactcgaatggtccaaaaacaactatgaactctatagaaaaaaattcttgaacaacagtcttgattttttgacgggtgcgaggtaatagaaggcgttttagtgcttttcaaccccgcaattatttcactatctgagataactatgctcagagaggatggctttcccggaatgtgaacggcaacaccacaaaaagcggcaacgtgaggaataccggaatcggataccaaaatagtgccacgggtgaggcatacagcgacagcaccgtgaatgccagcaagccgtaagcggccagtgcggggccgtagcgtcgtcgcgcaggccgcaccgccagcgcaagaccagcagccagcggaatccacgtgacgtacagggccatcgaagtcagcggattgcctttgcgaacaccgacatgaccatccgaacgcacccaccgatgaatcgcccgcaatatgtttttctgccattgcggcttgtcggaggtacccctcagcggcgcaaggtcatgttcgatggcggcaagccgttcggccgccacggtatcggcatcgccgtcggaagtatgcttccaagcaccttcagtcaggaaagacgcccattgcctgagatagctaggcgtgaacaggtagtcggaatcagtggggtacgcgaaattgacgcgcgggtcccaccatccgcgagtcaccccggcataggccgtggcatattcaaccggatgcgcgaggccgagctgcacccagacctgcagggccgcgagttgttgcgccgcggttggcctagggtgctcgcgcagagtgcggaaggtctcatcggtgcggtgcgggttgatgccggcggcggcccagtcgagatccatgatcgcgttcagccgccgccgctgaatcttgtctatcgcactgggatcatcgtgcgcgagccgggccacgggctgggtgaccaggccccacacctcacgtccgggcgatcgattcgcatgcgtggcggccgcgcttaatggcgtccacacgccctgcgccacaacgatggcaaccgcaagacacgcgaacgcacgacgccgcgcgcctttgggcgtgcagacggcgagcaaacagcagccggcgcatagcacgattatgagcgccgtccgcttggagacgatggtggcgaacaacaggatgacgaatgcgaatgccaccggacggcgagccagtaccgagccgcgcgtcagacaagcctccacgaacagcacggccaacggcagatagaacacggcgtgcaacgagtccttacccatcgtggtgattgcaccgaccaccacatagttggtggcaagatagacgaggccgagaccgatgagccagcgcggcgagccgattttgcggatgtagcacagcagaagcgcgcacccggcggcgagtagaaccgcttgggtcacggtgtacagggcctgcccgatcagaggggagccgagtgcgctgccgatatgccagaacaagccgaacgtgagagtatcaaacagcggatgctgggtgtagtagttgtgcagaccggacgattgcagatattgggcaagcgtatcgtcgcgcatcgagcccggccaggtgagtatgagccacggcagccaggcgatagcgagcgtgagcaggtaagggaggaatcgcgcgcgcagcgatgtggataacgtggtcgggcggcgggccgtgagccaactaaggatcgcggatatgctgcggtacgtctttgagtgtttcttcgattggcgcgaccggccgccatgtgctgtggttacgtcggccgctgtcccctcgttcatgactcaacagcctaggcgcgattgcgggcgcgcgccgggcgaacatcgaaaattcacccggatacggtgatttctttaccgggggttgtgtaggtgcgcgcgggtgtgtgggccctgcacaagcatgcggtccttgtgcgggtgttgcgcgggactttccagtgagtctttcactcgcagtgatcattcttcacatccgcgtcgcgacacgcgccacgccgaagcgtgcacttatccgaaacctgtggtaacttattcgagttgcctgcggaacacagttcaactgcgcgctgcaaagcatggaggattcgcctagtggtctatggcgcacgcttggaaagcgtgttggtgtaacagcctcacgagttcgaatctcgtatcctccgcc

SEQ ID NO: 2539 - DNA, 2804 bp, Unknown
  R50_10m  MAG No. k141_27954
gttcacatggaatgtgccgggcctgttggatgagctgatcctgtcgatgatgggcatgcaggtggtgcgtgagcccaaggcctccgatttcgcggggctgaccggtgcggcgcgcgcccgtgcgatgaaacgcgcccagaagcagtcgaagaacgattatcagggcgcgcgcggcacccgtttcgccctgttccccgcctccgccgtggccaagaagaccccgtcatgggtgatgagcaccgaactggtggagacctctcgcctgtgggcccgctattcggcggccatcgacccggcgtgggccgaaccgttggccggccaattgacccgcaccacgtatgcggagccgcactggtcgggttcgcgtggctcggctgtggccaccgcgcgcgtgctgctgtatggtctgccgatcgtacaggaccgtgccgtgcagtggggacgcatcaatccgcttgaggcgcgcgacttcctgattcgccagggtctggtcgagggcgatattcagcagcgcttcagttacgacgactttgtgggcaaaaaccgtgacattctcgaggatgccgccgatgacgcgagccgcacccgccagctggcggacaccgtgtccgacgaggatctgttcgacttctacaacgcggtcattcccaacgatgtgaccagcgtggccgatctggcgaaatggtggaagtccgagcatgaccgtcagccgaatctgcttgatttcgacccggccaaggtggagcgtctggcatccagcgattcggtgagtctggacgattaccccgaccattggcatacgaccggatcggacggccaacccatcgacctgcgtttgagctacgtatacgatccggccgacccggccgacggcgtcaccgtgcatgtgccgttgaaggcgctctcgcgtatcacgcccgaccagttcacatggaatgtgccgggcctgttggatgagctgattctgtcgatgatcaaggcgctgcccaagcagctgcgcgtccagttcgtgccggccccggatgccgcgcgtgcgattcgtgactggatcgacgagcattacccggatctgccgggctcgggctcgcagcagaagccgaatctgccgccggtggatgaggatggcacgaccgttggctggcctgatttggcacatgtgttcaccaaggcggccatcgccaccaagggtgcgcagattcatcccgaagtgttggggccggaactggtcgagcgtctttccccgtatctcagggtcacgttctcggtggagcagcaactgccggccggcaagcaccctcgtggacgccggcatgcgcgcggccccgtcaaggtgctgggtgtgtccaaggatctgaaggcgctgcaacgcaagttcgccgcgcaggcggaggcgtcggcccgtcaaatggtcaagaagcaggccgatcaggctggagaacagggcaagctggtcagtcaggcgaacctgttgcataaggcgggtgccaccaccgagtcccgggccacgatgctctggcgtggcgcattggatgcgctgcggttgccggccgaacgcatttcgtcgcgctggctgggtaccgaggcgttgatgctggcttctgctccgtacaagtccaccaaggatctggtcgaagacctgcagctggccacggtcaaacggctgatgccgaatgtcgacaggctctcggacgatgaggcgttggccaatgcggtgctcgatgtgcgcgaagtgtacgaggacaccgtctatcaggtggcgcatgacgtgatcgccgtgctcaaggcttatgccgaagtcgacaaggccactggcggcaaggccgacttgccgatgctgtcggtgctgcagtcgattcgcgaccatatcgccacgctcgtctaccccggattcatcgggcgtactcccccggatgcgctgaagtcgttgagccgatatttgagagccgatctgagccgactcaataaggcgaaaaccgataagaaccgtgacgtcaagtgggcctggcaggccgacgaggcccgtcaggtggtcgataaggcgttggcccgtgccaaggcggagccggccggcccgaagcatgaggcattgatgaagcaggccgaacaggcccgttggatgcttgaagagttctacgtgtccctatgggcgcaggagcttggcaccgccaagccggtgagcctgcagcgcatcaagaaggcactggcgtagcgatggcgacgacgcaacggcgcaagccggccaatccgcgcggcagggcgaacgtgattgtcgcggggcggggcgtgtcaggaggcaatcgcaaacgtcgcccgggcaaacgcccgcgcaatcgcaggtatccgctcagcccggcgcgctggtggaagcgggccgggttggcgcagcgcgtcgcggctgtgctggtcaccgtggtggcggccgcatgcgtggtcgcgctggtcgtgggcactgtgcgggtcgtccagtggcgtcgcgacgtgcaggaggccgaggcccgccagctgcagctgacgcagcaatacgacttcaatcccggcgacatcatctcggacggccagttcttcaacgccaatgcgatgagcgaggccgaggtccagtcgttcctcgacaagcagggcgcggcgtgcagcggttcccggtgcctgaaaaccatgaccttcgacaccgaggaccaggcggcgaacgagtattgcgcggcgtacgagggcgcgagaaaggagaccgcggccgcgatcatcgacaagtcggcgcgcgcgtgcggcatcagccagaaggtgctgctcaccgtgatgcagaaggagca

SEQ ID NO: 2540 - DNA, 10465 bp, Unknown
  R50_10m  MAG No. k141_28053
gcgtatccccggccctcgcgcacctgcaacagcaaccccgcccaacagcagtggcaccgacggcagtatcgccagtgccggtatcacccgcatcaccatctccgtctccctgcgcatccccttccccatcgaatgccgccggcaccgttctggcaggcagcacgcaagcggtaaggctcgaatcccaactcaccaccaaccgcgtgcacgggtccttcagccccgagcacgacaccacaggcgtcatcggccgcgataccgcctgcctgattcgcatcaacgattatctggtctcccgcaaacactgctcgctggaaaccaccagcagcggcatcctgctcactgacctgaactccgccaacggcacttacgtcaacggccgccgcgtcgcgaagatctggctgcgggaagacgacgtcgtcaccgtcggcaacaccgacctgatcgtgcatgaaggcgtgctgtgcgaccgcacgccgtttgtcagcaacgacgcggttatcgccgaaaacatcggactgaccgtgggcaaaggcacccggctgcttgacggcatcaacgccgtattcgccaagggcacgctcaccgccgtaatcggaccttccggcgccggcaaatcaacattcacctccatcgtcgccgggctcaacagccccacggacgggcgcgtgctgtttgatggatacgacgtgcatcagaacatcgaactgttgcgcagccgtatcggattcgtgccgcaggacgacgtggtgcaccgcaagctctctgtggacgcggcgctcgaatacgccgccaagctgcgcctgcccggctcaaccaaggccgagcgcgccgaaatcatcgacaacgtgctcaatgagctggaactcacgtctcgccgtaagaatcgcattgacagactgtccggcggccaacgcaagcgcgtgtccaccgctatcgagctactcaccgaacccgaactgctgattctcgacgaaccgacctcgggcctcgacccggcgctggatcttacggtgatgaccatgttgcgccaactggcggatgccggccgcgtggttatcatggtcacccattcactgtcgtatatcaacaagttgtgcgataacgtgctcatgctcgctcccggcggccatccggcattcttcggcaccgtgcaggagatgagccaggcgttcaacggcaaggaatgggccgacatcttcaacgatgtcgccgaatctccggaacgggtgtattcgattactgattcacgccagcgcaccatgcaggccgagtccaccatcacgcggcacaccgagcatgagaaaccggcaaagccattccgcatcaaacagaccatcactctggtgattcgtcagctgcatttgatcatcgccgaccccggattgctgatcttcctgctgttgctgccattgctcctaggactgctgtcgctggttgtgcccggttctcatggcttgggtgagcccgatttcaaagacgccgccaccgagccgaaccagctgcttgtgctcgtcatactgggtgcctgttttatgggatcggctttgtccgtgcgagacatcgtctccgagcgagcgatttacggccgcgaacgcgcggtgggtttgtcgcccacgtcatacaccgcctcgaaactcatcgtgatgggtttgcagaccttgttgcaggcggcgattctgaccactgcggtcagcctcggcaagcccggcccggaccatggtgtggtcactgattccggcatacccgaactggtgttggcgatttggctgactgcgtggacttccgcattgttgggcgaagtcggctcggcgttggtgaagtcgggagaacagacgatgccattgctggtggtgctggtcatggcccagttggtgttctccggcggcatgattccggtcaccggccgcgacagcctcgagctggtcagcatgatcttccccggacgttggggcttctccgccgccgcctcggatatcgggctcaacgatctgctgtatggccccaccaaggtgccgatgttcaaaaaggatgatctgtgggagcacaccacggatcagttctggttcaacattggcattctggggattatggtagtcgtcttcaccattgtgctgcgtatttgcgtcagcaatgccgtggccaagatgcgtcggcgctcatagaactggatcgaaactagcccgcaaccggcttacttcattcattaggtcaattatgcgttcatttggtcactgcactccaacactgaccattgaaatgccgccattccaacgcctcaccatgccgacaacccaccaaatgaacgcgcaacctaccaaatgaatgaacccagccctatatttggtgctacaacgactgcaaatactgccccaaatgcggcaccgcaaattccagctgcccatgacctgccgggcggatgagtttgtccttgataagaaccgcccggtacttgctcacccagcttcgacttctgcgcgtacgatccgcaatatcacccacctgcgtgggatttggcgaatccttggccatagccgcgagaaacagcctctctgcactagtaatgccgtccagcgctggagcgcatacggcatcgtcgaaggcgagcagcgcatcggaaacaccggtcgacacgtcgtccgcggtaatgacatctgaacctcgacgctgcgcagattgccacatgtagtagccaacaagctgcaccatgtacgggtatccttcagactggcgagcggcttcaagcgcatcttccccactgatggtcttgccggaatccgcaactgtttccaggaacgcattcttgacgtctggaagcggcacgttatccaattcgcggcgtagcgcacggcgcaggaatgtggttacctcgttatccagcaaatcgttgaccatatacggcaagccggcaaatacgatggcaacgcccttcttatcctcatcaggcgtatcactttcatcggcatccgtaatgacgtgctgcacggctgtagcaatggcaaccaaatcatcgtgtgaggccgcttgcgtctcatcgatggtgatgagaatgcccttccccttgccgagtttcttactgcccagccgcttgttcaacgcgttgcgcaacgtcagcggattggattccgcggaaaagtgcgcttgcccgagactcgccgtggcaatgccggaaattccaatggaaggactgatattggcctgatccagacgcaatcccgaaggcgataatgccgctatgagtctcgtgaccagtcctgcggacgccgtctctccaatgacttcccaatgctgcgctttggcgatgcgccgaaattcggtgagcataaccgtctttccgaagccgcgctgcccggtgaccagcatgatgcgcccaggagcccctaccccgttggtcagcgcctcggaaaaatcttcgataatggagtgccggccaataagaatcggcggcattttaccggcggttggtttgaagggattgactgccatgaccacactcctgtccacaacacataccatctgccacgattgcgtaccatattacacgattgcgtaccaaattacacgaaattacaccatatgacacgattgcgtatcattgcgtactctttcacaccatcacacacgtcaacacacatcacgcctcacatagccagcgcagctagcaaaccctgcccagccagcacaccccaatttgacgtgccactcccctagagttaaaggcatgtcacttggtttgaacatcctcctgatttttgtatttctcgttatcggttccgtgttctccggcaccgagttggcattggtctctctgcgcggctcgcagatcgagcaaatggagcaggaggacgctcgcggcgccaaagtcgccaaaatcgcacgtgacccgaacaccttcctctccaccgtgcagatcggcgtgacgctctccggcttcctgtccgcctcgttcggcgcctcttccatcgccccctacctgattccggtggtcgaaagctggggtgtgcaccccggcatcgccggcggcctggtgaacatcatcctgaccctcatcatctcctactgctccatcgtgatctccgagatggtgcccaagcgcatcgccatgcagcgcaccgagcagatcgcgcgcgccgtggtgcccgccatcgacgccttcgccgccgtctgccgcccgatcatctggctcatcggcaagaacacgaacggcatcgtccgcctgctcggcttcgacccgcagcagaccgagtccgaggtgtccgacgacgagctgcgcgtgctggtcagctccaacaccaacctttccaaggacgaacgcacgattctggacgatgtgttcgacgcgtccgaaaccatcgtcgccgaggtgatgcgcccgcgtgccgacgtggtcttcatcgagggcgaccagcccctggccgaggccgccgcgttcgtacgcgaccagccgtactcccgttacccggtgaccggcaaggatttcgacgacgtgatcggcttcgtgcatgtgcgcgatctgctggacgtgcgcgatccgaacgccaagatcgtgcgcgatgtggtgcgcgaaggcatctccctgcccggcacctccaagctgctgccgagcctggaactgctgcgtaagcgcggcatccatctggccgtggtcatcgacgagtacggaggcacggacggcatcgtgacgcttgaggatatgaccgaggagcttgtgggcgatattcgcgatgagtacgatctgcccagcgagaagggcggcgaacgcaccacccgcaccgcgttcgtcaatggtgtggccacgatcgaggccagcatgaccattgaggacttcgccgatctgaccggcatcgaattggaggacggcccgtacgagacggtcgccggatacttcctgtccaagaccggcaagatgggtgcggtgggcgacgtgctgcattccgacgacggctacaacatggtcatcaccaaggtggatggccgccgcatcgaaaccatcgaagtccgcaaagccggtgccaccgatgcatcctcgcagccggatactgtgacgggttccgatgccgcctaggcttcttcccagtatcccgcgtcattaattcgttgattacggctctccaacaaaaggggccggccagcgaagtgttcccaacagaaatttcgttaacccttagaaacgtgcaattcacccaccgtgcgaaaccttagaaacgtgcaatcttgtactatacttaacccttagaaacgtgcaatcataagggaggagccatgtttcggcgcaaggcttacgacaagctagtcgaatggaagcggtcaagcggaggtcacaccgccatgttgatcgagggggcccgccgcgtgggcaaatccaccattgccgaggagttcgcgcgcaacgaatacaattcgtacgctctcgtggacttcaccaaggtgggagacgagtttcgtcgaacgctgctcgacacaaggggggaccttgactccttcttcctgtacctaagcgccatgttgggcgtgaccctgaccgaacgtaagtccctagtcatcttcgacgaagtgcagctgttcccgccagcccgcgagttcatcaagcacttggtcgccgacggccggtacgacttcatcgagacgggatccctaatctcccttaacgaaaacgtgaagggcatactgattccctccgaggaagagtccatgaaaatgggtcctctggatttcgaggagtttctgtgggccatgggcgaagaggcgctggctcagatgatcacgaactcgtttgcatcggggagccccttgccggactcgctgcaccgcaaggcgtcgcgcctatggcgcgaatacgtgctggtgggaggcatgccacagtcggtcacggcctacgccccgaatagggacatggcggccgccgacagggccaagcgcatggtcctcaagatctaccgcgaggatatcgagaaatacggcggcacggcggctaaacgaatccgagcagtgttcgacgcaattcccggtcagctgtcgaagcacgagaagcgcttggtgtacacgcaagtcgagaacggctcgagatcgcgtgatttcatgacggccttctcttggatgcgcgaagcggcgacggtcaacctatgcaccctcgccgaggacccgtcaattggtctggcgctcagcgccgacgacgcaacagtgaaatgctacatggctgacaccggactgttgtctaccatggcattctccgcctcgggctccgccttgccagaagtgtaccggcaagtgttgctgggagcggacggcgtgaacgagggcatgctcgcggaaaacgccgtcgctcagcagctcaccgcatccgggcacgacctgtatttctactcaaaatcctcgagcatccgcgaggagcgcatggagattgacttcctgatcatccgaccttacccggacgcagccatgaaacccagagtcagccctgtagaggtcaaatccggcaaacgctattccacggtgtccctagacaagttccacgcgaaattcacacaacgagccggcgaagaatacgtgctgcacccccgccagatgagtcaggatggcatacgccgcttcctgcccctgtacatgtcattctgcctgtgaatctcgttttccaacgattccacagaacatgaatgaactgcagaatcccctttcctttaccggtgggtgcagtttgcgcaacagctctcaaccgagcacaaatgccaataaggcgcgacatcattggcgacacgccaaacgcgccatcttcccgatcaaagacccgatgaccagttggcggccttccacagcgcggtcagccgtcggacaagggcgcgtagactgggagggacgttccttgaagatgaaaggaaggaacatcatgacacttgcatttgttgctgaatatttgacttgctgagcacgttggttattccagttcggcaccattgccgtttcacgggatcattgtggtttagcaccaaagttattgtggttcggcgccgtttgggttagtctcctttcaccatgtgatggacgcatggcgaaaggagtgccaacgatggtacgcagaatcaaggcgaagctcgtgctcaggcttcgtgagcaaggattgtcgcgcaacgcgatagccgtgggctacggtatgtcgaagcatagcgtgatcgacgtgttcgacgccgccgaccggcttaacgtctcctacgatggtgtggaggacaaaaccgatgacgaggtgtacgccctgctgtttcccggcaggggtgtgatcgagagcgcctacgagcagcccgactgggcgcgcgtgcacagcgaattggggcgcgtgggcgtcacgttgaagctgctgcacgcggagtacgcggactcgtgccgggtgaaggggttccgttcatgggctacgaccggttctgcaagctgtacgccgattacgtgctgcgtctgggcgtcacctcgagggtggagcgcaaggccgggcgtacggtcgaggtcgactgggccggggcgaccatgccgatccatgacacggtcaccggagagacgtcgaaggcgtacctgttcgtcgggtgcctgccgttcagccgttactcgttcgtgcgcgcgaccggcgacatgcgcgaatcctcgtggctggactgccatgtgtgcatgttcgactatttcggcgcggtgccggtcaggatcgtgtgcgacaacctcaagaccggtgtcgtgagccatccccgcgatggcgagatcgtgccggacgaccattaccgcaacctcgccgaacactattccacggcggtgctgccgggcagggtgaaacggccgaaggacaagcccagcggcgagaacctcgtcctgcacgccgaacgggccgtcgtcggcgcgatgcgcgaccgggaattccattcgctcgacgaactgaaccgggcgatccgcgactggctcgacgcgtacaacgccgcgcctttccagaaacgcgagggcagccgcctggcggtgttcgagtccgaggagcgacccatgatgatcccgctgcccgtcatgccgtacgagaccggcgattgggccggcacgaggaaagtcgccaacgactgccatatcgtttacaggcggaaccggtattccgtaccccaccggctgatcggcacccgggtcgagcttcgcgagaccgcccgcacgctcgagatctggcacgatggccagcgggtcgccgtgcatcggctgttcgatgccgttcagtcgaaccgttcctccacgcgcgacgtggacctgccgaaaaaggcgaactggcgggaatgggacgagccccgggtcagggcatgggcgtcgggcgtcggcccgaacgcggtcatcgtcatatcccgcatcttcgaatcatatgccaggccggaccaggccatcgaccccgctctggcggtgctgaggctgtcgcgccgctacgggcggcaacgactggagaacgcgtgcgacgtggcccgcagggtcgtgaacacgccccgccaccggcaattgaagacgatcctcgacaccggccaggaccacgaggtcatggaaggcgaggacccgaaagtcaagggtctcgacgtcgaaccgcccgcgggatacgtgcgcggcgccgactacaacgcgagggagacgaagcgatgaggctcgacgaacaaaaacccgccaccagctgcgcgacatgggatgccaggagcttctcgacgcgctcctgcatcaggacgacgacgcatgcgcgcccctgaacgcggaacaacgtataaaactcgcggtcgacgaggcgcacgccgcgttcacggacaaacgcatcggcggactggccagaagggcgaggctgcgctacccgcaggccgacctgcgcaccctcgacctgctcgacgaacgcggcatcagccgcgaactgatcgcctcgctctcagactgctcatgggtcacgcgacaccgcaacatcgtcgcccagggctactgcgggtccggcaagagctggatcgtctgcgccctggcgcgtcaggcgtgccgcaaccggtaccgttcccgctacatccgcgtccccgacctcgaggaggaatggcgtcaggccgccgacaagccccaaggacggtccagactgctcaaacgctacagcgcgtacacggtcctcgcgcccggtcgaatggctgttcgacccgcccgaggaacgcttccgcggcttcctgttcgagctcatggaacgccgacacgacaccggcagcaccctgttcgccacccaatacccccaaacggactggcaccaacgactcggaggcggcacccacgccgacgccatcatggaccggatcgtgcacaacaccacctggatagaaaccggcgactacaacatgagggaacacgcacccggccggtagccgccaaccagtctcgcaaacaggaacggcaccggcagtgcccaataccaagcacgccggtgccatcccacaataaccccagtgccgaatcggaataacatccggtgctcaaacctcccaataatcagttgcgccgggactcgatgaggcgaccagcgagaaggccatcgcgattctgcagaaccgactgagctaggagcaggaggccgcgctggtcctgaagcatacacactggaatgtgaccggaccgaacttcatcgccgtgcacaagatgctcgatcctgaggccgaatccgtgctggctcaggcggatgagaccgccgagcgtatcgccacgctgggcggcacgccggacggccgtaccgacgcaatcatgcgcaaccgcacgcggaagccgttcgacgtcgaaggccgcgccggcaccgaggcgtatctcaaggcgctgatcgagtactacgacgccttcatcgccgacgaccgcaaggccatcgccgagctggacgagctggatgtgatcagctccaacgtcatccaggatcacgtccagcagctcgagaaattccagtggttcatgcgtagccaccttgcatgacgcctcgcagccggccaataccggctgcatgaccgctgacttgcagtagcgtctctatgaggggagtcttccgtatggaggctcccctcagctgtctctgcgccaaccgtctcagccgtctccgcacgtgcacggttggaaaagtgcatgaaataccgtcttccatggttggaaaacgtaattgccgcacatgcgacgcgggcaggccagtgtatggtcattcggcttcgctgggacgttgcgtgcgaagtcggaaggccacatgctgtccagcgggccgcgctgagccagttcgcaacaacacaacaacgcgtgagggacgtccagcactatggcaacggacgcccctcacgctgcgacccctcggatcgcctgtcgattacttcgcttacttggcgaaggcgagcttgtattccttggcccagtcatcggtgaagaccttcttcaccgcatcccagtccccctgcccctgggcgtagttgagctccgcggagcc

SEQ ID NO: 2541 - DNA, 13291 bp, Unknown
  R50_10m  MAG No. k141_28165
ccacaccagcaagacaggaaaccaaccagaagaaggaacccgccgcgctgagcggcaacaggtgaataatttacacgcaaccacgccacaacgcaaatcgggcatgaaaaggtacgccagaatcgttgcaacgacggcgttctatcggcgtgtcgaaatcagcttgaatcacgccgttatcatcaggatacgccggctttttatgggctcacgtaacgaaatcagatgttcaccggcgtgtcgcaacaattcattccacgttcaactcccctcagtccgatcacgcggacagctcacccgcaattacggacgagcaaagctcgcgcccttatggctcgactatcgtctcgccttcgtctaaaaaaacagtccaccggactgttttttaaacgacccagcatcaaagagggaagccaaagggggattagaaggtcaggcgcatttggtgccagaccacgtcaccgtgagtggaatcggaaatgccctcgtcctcatatccgaatcgcgcatagaatccgaccaaccgatctttgcaggtgagcaccaggcctttacggccggctgcacgagtgtcttcaatgactttcctcatgagtgtactggcgcaaccgcgatgctgatacttcggcgcagtatccacgccgaaaatcatttgccagtcaccttgagggttgtgctgcgcggcatcctcgtacatgtcatcggtcaagtcgcgccgatcggtcacaaaaccgttgatgaacgccatgacgatctcgccatcaatcaatagccagaaacattccggataggtctcgattcgggcgcgcagggacgagcggtcggcggcctcggcggccgggaagcattcgaattccatggcggccagcgcgtccagatcgtcgatggtggcgtggcggattaactggggatcagaatcagtcatgtttttgtctttctcttaacactccgttgtgagcaactcccccagtcacgcttcgcgtgctggctcccctcaccttgaggggagccggatggatgtcagattacgtggtattcgcgtagcagggtggcaatatcggtgccgtcgagtttcttgagcaccttcttgaccacggccttttcaatgaagttgagcttcatatcggtgaccggtgcaccgtcacgcaatttgacggtggcgttgagcaggttgcgcacgtcatagacactgccccacacttcaggcacgccgcggtccacgccgagcaacgtgtagacagcttccataccggtgcgcatcgagtactcggtggtgaagatcgtgtcacgcggggtctcggcgaactggccaaggaatgcgaagttcacggcaccatcgggcaccacgtccgggcggtcgccggccgcgcgcggcatgaagaacgcggtgatgtacggcatcatgaccggcacggtgttggcgtggtgctttgcgagcgcctcgatcttgtcggtcggcacgcccatgtggtaaagccactcctcgcaaatctcttcaccggtgcattcggtcatcggcttcttcacatagttgccgggcttgtccgggaacaggccgtagacccatacgcacagctggtccttgggctggtcgcggaactgctgctggcggttcagggtccaactcatgagccagttggagtcctgcacagtgacgatgccgccggtgacgaccttgccggagaacgggtcgcgcttgcaaatcttctggatgtacggcggaatctcgccgtccagggtggtgatggtggcgctcatccacttggtggcattcggatcggagcagaacttctccggatggccaaagctcgggtcctggtcggcgatacgcttccacatatcccagccgccgccgggcttcaggtctgggttccatgcggcgggcgagttctgggaacccatggtggagttctccacgcaaccgccgttggtgatgaacaccagatcgttctcggtcaggtcgatggaggatttatcaccctcgtgatccacgtcgatgcgcacggcaagcttcttggtgggcgtgctggcagggttgcgcttgaagaaaccggaggtggcctgaatcttttggatggtgtcctggcctacgccggtgtgctcgcgcttggggccggctcccccgccaatcgcgaattccacgttctcaaccttggtgttgtagcggaattcgacgccatgcgattccagatacttgaccatcggcagaatcatcgactcgtactggttgtagcgggtgaaacgcagcgcggaaaagtccggcaggcctccgatgtgatgaatgtagcgcttgatgtacagcttcatttccagcgcggagtgccagttctcgaaggcgaacatggtgcgccagtacagccagaagttggagttcagcacctcatcatcgaagaaatcggtgatcggcttgtcatacaggtcttcgtccggggtgaagaacagcttcatgatttccatcgaagccttgtcggacaggccgaacttgcccttgagccccgcgtccttgccgaggtccttggtggcgcggcacagcgagtagttcgggtcctccttgttgagccagtagtactcgtcgagtacgctgacgccctcggtttcgatggagggaatcgagcggaacagatcccacatgacctcgaaatgattgtccatctcgcggccgccacgcatcacatagccgaggccgggaatatcaagaccgtcacaggcgccgccgggtaccgggtccttctcaaggatgtggatgttctcgccaggcatctgaccatcacgcaccagataacaggctgcagacaatgccgccagtccggtaccgatgatgtatgcatgcttgttgtccacgtcggccggcttcttcgggcgtgcgaaagcctcataattgccgctgctgtagtacatattccgcctccttggggtagagttgacgcttcgtcaactcttcttgaatagacatcatgtcacattattgccgaacacgccataggcaacgttcggcgttctgccgtattcgccaataccttgcgtctacggttttcgaggcctgtgttggctgttggctcataactattgaaggcatacaggcatactgaggatgctgggtgcttcaccgaaccggatgattgataaggtcccgctcaatccatgccatgaccaaatcggcaagtcggtttacctccgcttcggtgagttcacggcctttgggcagatgatgccatttttcgatgcatccgcggcagcatgtggcggtagcatgctgagcggtgaataccggatggccgcgccatggcgtctgcctgccgtcgttcttcggttcggctgcgcctatgcggtctcgcaacatttctcgcgcatgacgatcgatggtcgccttgcctttggtgcgggcataggctcgttctttgtcggtcaaagcgaatttggcgcggaactgcgaatgagacagccgttccagcatcgcggcaatccattgtcgctcgtcatcgttgttaccagtatccgccatctccatgcccatacgttccacaatagtcgcgcacatcgtatggtggcacatgccttagctccctctgatgaaggagtccccagcaaagccaggtgagggagaggccaggggcgaaacccgccaatcaggcggcaggcaagcagctggggccaaacagaatcttgatctcagcaaacaacgaagtatcccgcttgacgcggaaacgatcgccaaacgtgagcacctgagcgttacccttctcatccagcaccgcaagatgtacttcgcagtaaccaggatgattagcgagcacctgaccgagttgcatcatgcgttggcgctccaacgccaccggcggcagcgtgatgaccaacggacgttcatcctcggcttccaaggtcggaatctgcatttccgtggctctcagagaaacggtttcgtcgcgcaactccacttggccacgaatctgtacgatggcgtccacggcgagttcggcggcggccgcttcatagaccttgccgaagaacatgcattggatggagctttccatgtcttcgatggtcacgatggcccaggggttgcccttcttggatacgcgccggtccacattggtgaccaaaccagccaacgtgacctgctgtccttcacccatcgttttggctcgatcaaccagatgcgcgatggacatttcacgcagggacgcgagaatcgactgcataccggagagcggatgatcagacacatacaggcccaacatttcgcgttcgaagttaagcttggtcttcttgtcccattcctcaagatcgggtacggtcacggaagcgtcgcccatggcctccgctcccccatcctcggcatcggagaacaaatcgaactggccctccgcctgtttgcgcttcagactcaccaccgagtcgatggcggcctcgtgcacggtgagcagcgcgcgacggttcgggtcaatcgagtcgaaggcaccggccttgatcaacgattcgaccaatcgccggttcagcgcggtcaggggcacgcggcggatgaagtccatgaagttcacgaacttgccgcgcgggccttcgcgttcggcgatgatatcggccacggccttgtcacccacgttacggatggcaccaagaccgaatcggacgacgtcgccgactgccgagtactcgtacaccgattcgttgacgtccggcgagagcacctggatgcccatgcggcgggcctcgcccaagtacagtgcggtcttgtctttgttggtggcggcaccttgcaacagggcggccatgaattcgaccgggtagtgcgtcttcagatatgcggtccagtaggagatcagaccgtatgcggcggagtgcgctttgttgaaagcgtagccggagaacggcaccagaatatcccacacggcctgggaggcctcttcggagtatccatgctccttcataccggcgaagaacggcaccttctccttggccagcacttcgggcttcttcttacccatggctcgacgcagcacgtctgccttgcccagcgaatagccggcgaggattcgggcggcggactgcacctgctcctggtagatgatcagaccataggtctcgtcaagcacctgcttcagaggttcctcaagctcagggtggattggcgtgatcttctgcaggccattcttgcgcttggcgtagttggtgtgcgaatccatactcatcgggcccggtcggtacagagcgataagtgcggaaatatcgttgaagttatcgggcttcagggttttcagcagtgaacgcatgccgtcggaatcgagctggaacacgccgagcgtgtctcctcgggacatgagtttgtaggtttcggcgtcatcgagcggaatcttggtgtagtcgatggcgggtttgccgttggcctcgatgttcttcagggtgtcgtggatgatcgtcaagttggacaggccaaggaagtccatcttgaccaaccccaacgtttcgcacgtgtggtattcgaaggtggtggtgatggtgccatcggtgcgttccagcaacggcgaggtgtcggtgatgggcgcgctacccatgatggtggcgcaggcatgtacaccggtctgtcggatcaggccttcgatacccttggcttcttcggtgatgcgcttggcgtccgggtcggaatcgtagagttctcggaattccctggcctcggcgtagcgtttggctgtcgggtcgaagatgtcatgcaggctgatatccttgccgccggtggccgcgggaggcagcgccttggtgactttttcaccgaccgagaactcgtagcccatgatgcgggcggagtccttcaaggcctgcttggttttgatggtgccatagatcacgcactgggcgaccttatcggtgccgtatttttcgccgcagtattcgatgactcgcgcacgaccttcagggtcgaagtcgacatcgatatcaggaaggctcactcgctcagggttcaggaacctctcgaaaatcaggccatgcttgagcggatcgagctcggtaatgcccatggaataggcgaccatggcgcctgcggccgagccacggcccggccccaccataatgccgtggtccttggcccactgaatgtagtcggcgaccacgaggaagtatccgcagaactgcatctggcagatcacaccacattcgtagtcggcctgcttcaatacgtcgagcggcgggttgccgtcgtaacgcttctccagaccttcctcgacttttttaaggaacagggaggtctcatcccagccttcggggcaggggaatttcggcatgaacgcgccgtcttcgtggtcgtcgaacatcacgttgcagcgttcggcgatggcgagggtgttgtcgcaggcgtccggatggtccttgaacagttcgcgcatctcttcggcggttttgatgtagtagccggtgccgtcgaatttgaatcggtccggatcgtcaagacgggaaccggagttgatgcagagcatggcgtcctgtgcctgggcatcttcggcgtgtacgtagtgggaatcgttagtggccagcagtggtgcgttgagtttcttggctatggtcagcaggtcaccggtcacctgagtttcgatgggcagaccgtgatccatgagttcgatgaagaagttgtctttgccgaagatgtcctggaattcgccagcggcgcgcagggcctcatcgaactgaccgagacgcagacgggtctggatgatgcccgaggggcagccggaggaggcgatcacgcctttggaataggtggcgagcacctccttatccatacgcggataacgcatgacgcgaccttcgaggttggccacggacgaagctttgatgaggttgaccaggccttcgtcgttttcagcccacatggtcaagtgggtgataagaccaccaccggagacgtcgtcacggcgctgggcttcagtgccccaatgcacgcgggatttgtcttgacgtgcggtttccggggtcacataagcttcgatgccgatgatgggcttgacgccattggccacgcagttggtgtacatctcgtaggcgccatgcatgttgccatggtcggtgatgccgaccgcaggcatgccaagttcggccgcacgcttggccaaatcagggatcttcgacgcaccatcgagcagcgaatagtgcgtgtggttatgcagttgcacaaagttgttcccgtaatcagccatgcgccccaccataccgtgtggtctgggcggctgttcagcattcccgtcggcactccgcgatgagggcggcgcacagcatgatgacctgggcgacgagattgaaccacaccagcgcgccgatcaacgccgcgaacggtgcgagcagcggattgcgggaggcaccggtcagcagtcgcgcgccgagcagctgcagcaccgaaaccgtcagggaacccgacgacgcgccgatcagcgtgaatcgtccggctttgatgtgcgcgaccacacgcaacagcagcatgaacaaggcgaaattcagcgcgacgccggtgcagaaaccggtcagctccagcagcagaatccccggcagcgagctgctggcgatgccgctccactgcaacacgcgccgcaccatgccaccggacaccgtaccggccgcggtcgaaagaatgaacagtattgcgatggcgatggcggcaagcgtatcgcgtaaccttgcgacgacgatattgagctcgtcgccgcagtcgtcgaacatggcccgtacggcgtggcgcagcgagttcatccagccggtcaccgtccaccagaacatggccaacgtggccagaccggtccatgtcaatgtgcttgacatggtgtttagtgcggaagacgtcagaaacgagtcggccacaccgggaatgacttcacgcaccgcgtcgatcagcatctgctgccaatcaatgttgccgaccatgataaggccgaacacgctcaccgcaatccagacgccggcaaaaaaggcgaacagcagaccatatgccagaccattcgccagcagggggccgcgccgcgacacataccggtcgagcacgcgcccaggcagcgaacgcgcccacgcgtccgctcccctgtcaatcgcactcttcaacccatgcatagttcaactgtagctgttgttaccgttgttgaaacagcgtggcgcgaaatcgcatttagccagctcaaacgatggcaaccatcaacgcccccactcaattgttcagaatcggataccatatgagtattcaattcatccgtcggagttcaatgtcagcagtcctcaccaaccgatgtcttgctaatccgctggccgccctagtatctactgtttcttgtggacttcgttcaacagccaggcagagcgtacaacatactgcgtagtacatggcgcgaatcccaatgaccaccatcgattgatgacggccacgaatactcgtactcagccttactgctttggctcatttctgttcacttcacgctggagtaccgagacacgttgagcggaaataccggtaattcacgtacggttaccgaccattggcctgaacggtactcagcatccgcagtcacttggggtatggtcatgacggagagccatcatgaccgatctctcattattctgggatgaatccggcgaggctggaactgaatctaaatattaaaacgcatgatgcacacgttgcggaattagtccaccagaacttcggcatgctcggcaggttcagcgggttcgatgtgacgggcacgcatggcatcgagggcggcggccaggtcggccgggtactgggaccggaccgtggtccagacgcgggtgcgaggatggcggaattcgagcttcatggcgtgcagccactgccggtcaagtcccaaagcttcagacagcaccggattggcaccatacatggggtcgccgcacagaggatgcccaatcgaggagaaatgcacgcgaatctgatgggtacgtccggtctccagattcacggataccagtgtggcctcatggccgaaacgctccaacacatcccaatgcgtaacggccggtttgccggccggagtcacgcagaagcggaaatcggacactttggcgcgcccgatcggtgcctcaatggtcgctttgttctctttaagaccgccctgcacgagcgcatgataggttttctttacctcatgctcggcgaactgccgacgcatctcggtgtacgcaaggtcggacttgcacaccaacatcaagccggaagtgcctacatcaaggcgagaaacaatgccttcacgcccggccgcgccataggacgtgatatgcacgccacgatcacgcaacgatcccaataccgtgggaccggtccagccaaccgaggcatgcgccgccacgcctacaggcttatcgactacgacgacatcatcatcttcgtagacaacagccatatcagttgcgataggctcaggcccggcctgttcctccgccaaatcaaattcgacggtctcccccgcctgcaacgtgctggaccgcgcaacttcacgccctaaaacgcgcgcctgtccggagtcaaccagatcggcggctttagatcgtgaaatacccagcattttggccacggctacgtcgaaacgcttacccaccaatgcatcgggagcagggaccattcgactcattacttggcgtccgcctccggctcagactgtagggattcgtcggattgctcgataagatccttgtgggagaacggctcccccataagaatcagaatcaccaggaccacaccggcgactaccagatagatatccgccacattgccaacggaccagccatagttaaggaaatccaccactttgccgttgaggaagccgtcagcgtacataacacggtcaatcaggttgcccagagcgcctgcaaacgcgagagaaagcgccaccgaccatttcatggagatagtgcgcaccccagccacagcaagggccacgcaagccacaacggccaacagactgattacccaagtagcgcctgaccccatgcccaaggacgcgcccggattacgcaccaaggtgaaggacagcagtccgggaatcacgcgaatggtctgaccgttggataacgcggccatcgcccaagccttggtgagctgatcgacaatcagcgcagccgcggccacacatgcaaagacggccacgcgggtgcgcagccgtccctgttggttcgtcatacgacctgtacctgcctacgctcagttggtcttggacgaggtctggtcgacgtagttgttcgactcggaaacctgcgatgccagctggccgaggtactcggtgaggcgggcgcggtattcagtctcgaactgcttgaggctctggatgttgccctcgacgaccttggactgagcctgaaggttgtcgcgcacctgctcggcatacgtatcggctgcagagcgggtgttcttgtcgtacgcatcagctgcggaacgagtgttcttgtcatactcggcggcacgctgctgcacttccttctcgtagttgtcagcgtcatcgtgctgagacttggagtagttgtccgcatcctgacgagtcttgacggagtatgcgtcggcctcagaacgggtgttctgggagtaggtctcggcatccgcgtgaatctggtcacggtaagcgtcggcctcggagcgggtacgatccgaataggtgtcggcgtcggaacgagtacgagtggagtagtcgtcggcctcggagcgggtacgctcggagtagttgttggccttggtgaccaaatcgttgtacttgttctggctggcctcggtgatttccttggccttgttcttgcccttctccacgtactgatcgtgcagctgcatagccagggtcagcatggcggtggcgcgctcgggctcggtgcccggcatggaagcgacgccagcgatcttctgcagagaaccggtctcagtgctcggctcgaccttggaaacctgggcacgaagctggttttcacgctgcttggcttcttcgagctgacgagacagttcagcgatctgagcggactgctgctgagcggcggaaccctcctgctgagcagcggcgagctgacgggacagctcctcgttggccgcgcggaactgatcacgttcctgctgaatggcggcgatctgctggccgacggcttcctggttaccggaggcctgagcggcctgggcggtgagctgatcgatttgagcgttcagctgatcgacctgacccttgagctgctcattctgggaggacagcgcgcggttggattcctcggcttcgctgagcttggcagaggcaagctgtgccgcctgatcattgccagcctgagcggcctgctgggcctgagccacagcgttcttcaaaccagcattctccgactggagttgctgcacctgaccggtaagatcggagatcttcgcattaaggttggtcacgtcagggcccagagactgagtggcctgaccgccggctaccgcctgacgtccaagagcctcgacggtttccgtgacctgatcaaggaagtcatcgacctcgtcgacatcataaccttccttgaatcgaacagtctggaaggtatgctccctaatatccttcggcgtcaacagagccataaatcttgcacctcgctttggggcattgcccgcacttacgttggtctcaagtcagaatgctatcacgaccccatcgtttcagaacattcaacgtgggtttttatgccagatatatgcctccggcgggtcaaaaacggcctcagaacactatcagaacaacactttctagtaccaccaacgcaaaatacagcacgatgaagctgacatcaagataaatcgagccgagcggcaatggacgaatatagcgacgtagccagcgcagagggggttcggtaatggaatacacaatgttgatcagctgggccagcacaccacgtggataccagtttcgtgcgagaacggagacccagtccagaatcatgcgcacgaacagaaccgtgatatacgcgttgatgagccatgcaagaatgcggccgatcagagagaacactaaggaaagcatgcagacagactaacaaccgcgcatgaaaagtttgctcggagcgcaataagaatcggccgactccttgctgggagtcggccgaataccgatataacgtcgaatgcgaaaactactgaaccggtcagtcagcgaacaaatcgtgtgccgaggttggttttgtcggctcttcgaccttgatgttcacctgcgccgggctcaacaggaacacgcgcggagtgacacgctcgagggaaccacgcacgccgaacaccacgccggcggagaagtccacaatgcgatatgccacggcttcggccacaccggtgagattcagtacgaccggaacaccgtcacgcaatgcgcgaccgaccagctgagcatcctcatatgacttcggatggatggtggtgattctgttcacacggccaccggggaacggcttggtagtcgacgatgcggcaggcgcggtggttgatgccagcggcgtgaccgtatggtcggaatcgaatgcggacttcggagccggcttctgctcctcgtcctcttcgatgtagtcgtcctcatcgtccacaacgtcgctcatgcccagataggacatcgcgtttttcatgaacccagccatggatcagtcctttcagcgcaggaagtcagggatgtcgagatcgccagccggatcgttcacggcgatattcggatgagcggaagtcggatcatcaaaaggcaacgatgcggagtcaccgatagccggtgtgaatgccggttgggcagtggcagcgggctgtgcagccggtgccggtgctggagctggctgtgccacgggagtcgcaggatcggcggcggttggcacaaccggcgtcaccgtgctctgagtgtcgtcatcttgagcggcgacggggtcaaaaccagcagcaataacagtgacacgcacttcatcgccataagcatcgtccagagcaagaccccaaataatctgggcttcagggtgaatggccttgcgcaccagttcggtggcagcagaggcctcctgcaacttcaggtcggtcggaccggcgatgttgatcagcgcaccgtgtgcgccttcgatgctttcctcaagcagcggagagctgatggcgatttcggcggcctgcgtggcacgatcctctccccgtgcggaaccgataccaaacagcgcagtaccagcaccacgaagcatggagttcacatcgttgaagtcgacgtgaatataggagttcatcgaaatcagttcagtgatgccctgaacaccggcaagcagtgcgttatcagcggtcttgaaggcctca

SEQ ID NO: 2542 - DNA, 17017 bp, Unknown
  R50_10m  MAG No. k141_28377
gaacaggtgggcgagggcaagaggtccctggcctatgcggtggtgttccgttcaccgagcaagacgctgtccgccgaagacagcgacgccatccgcaaggccatcgtggctgaggccgccgaaatcggcgcccagctgcgcgcctgacccaaccgatcatccgaatcgaggagcgtcatgagccaaccggagcaggacaagccgaaatacgggcagtaccagcagcctgaatatggtgctatgtctggccaatacgggccgaattacaacccgtatatttatggcgctcccgagccggataccaagaaggattccgccgcagccgctggcatcaacggtggcgcggcgcaatcccagcaggccggccagccgtacggtcagcagccggcgtggcccggcaatcagcaggcgggcggctggccgtatgctcaaggcggccaacagtccggtccgggcgcatatccaggcgggtacccgggcatgcaggggcagtcgtatggtcaacagccgaacggtcagcctcaccagccgcattattaccacggcatcgacctgaacgatccaaaccagaacccactctacgggcactgggattcgtatgcgatcatctcctttatcctcgccctgttcttcccggtgccagtgctctcggcactgatgggcgcggtggcaatgtggcgcacgcgcaccttccatatgaagggcttcggtttggctgtggccgccgtggtgatcaacgtgctgtacaccatcgccgtcatctggatggccttcaatggctatgacgccatgagcctctaccaggaagccctccagcaactcaccggcggcaccggctcctcctccgactccatctccgcataagtagcgttcacataccaacacacccactgcataaatatgcaatagtctgcataatcgcgtatactcatcccaagacacatcagtgaaaagagatgagtatggcgaaatatacagtggccgtggccggtgccacgggctatgccggcggtgaagcgctgcgcattctggccgcgcaccccgacttcgacatcacctgcgtggcaggccattcctcagtgggggagtcgatggccaagcacatgccgcatattccccaactggccaatctggtcgtcgaagataccacgcccgaagtgctgaacgggcatgacgttatcatcctcgcactgccgcacggtgcttcgggcaagctcgcctcgcagctcgatccgaatgccgtggttgtggatttgggcgccgaccatcgtctcgaagaacaggccgcttgggatgagttctacggcggcgatttctatgagcattggacctacggcatgcccgagctcatcaccggcaaagccgcggacggctcatacacccgccagcgcgcggcgcttcctggcaccaagcgcatcgcaggccctggctgcaacgtcaccgccaccacgctggccctccagcccggcatcgccgaaggactggttgaatcgcaggatatcgtggccgatctggtcgtcggatactcgggtgccggcaagaatctcaagcgcaccaacctgcttgccgccgaggccctgcaatccgccctgccgtattcggtgggcggcaagcaccgccacattcccgagatcctgcagaacttcgcccacgcggccggcaagagcgcggccgaagccagcgaattcacgctcggtttcacgccgattctcgcccccatgtcccggggcatcctcgccaccgtgtccgcccgcatgacggacaaggccaaggcactgagcgatgaggagattcgcgccgtatggtccaaggcctatgaaggtcaggacttcatggtgctgctgcccgagggcacactgcccgccaccggcaacatcatcggatccaacgcagcccacctgcaggtcgtcgccgaccgcaaggccggccgcatctacgcttttgccgccatcgacaacctcaaccgtggcaccgccggacaagcggtccaatcactgaacatcgcactcggcctgccggaagacgcgggcctgaccaagatcggagtagcaccgtgagcgttacatttgcacaaggtttctccgccgccggcgtggcggctggtatttcatccgtcgaaggcaagaaggacttggccctcgtggtcaacaacggcccgctcgacgcggctgcaggcgtgttcacctcgaaccgtttctgcgccgccccggtgcagtggagccgtaaggtcgtcgccgacggtcacgtcaaggccgtgattctgaactccggcggtgccaacgcctgcaccggcgaggccggttacgcccagtccgtcaccaccgcggaaacggtcgccggtctcatcggcgccgaaccgaatgatgtggctgtctgctccaccggtctcatcggtgaactgctgccgttggacaacgtgttggctggtgccaagagtgcccatgaggctcttgccgccaccgccgaagccggcgccgccgcctcccacgccatcatgaccaccgacaccaagccgaaaacggtcgaactgaccggctccaacggctggaagatcggcggcatggtcaagggctcgggcatgattgccccgcagctggccaccatgctgtgcgtcatcaccaccgatgcggtcgtctccgccggccagatgcaggccgcactcgccgtggccgccgaacattcgttcaaccgcatcgacgtggacggctgcatgtccaccaacgacacggtcctgctgctcgcctccggtgcctccggcgtcgaaccggacaaggacgaattcaacaagctggtgcgtgaggcctgcgtctccctgtcccgccagatcatcggcgacggcgaaggtgcctcccacgacattcgcatcaccgtcaccggtgccaccagcgaagacgcggcacttgcctgtggtcgtgccgtcgccgcctcgaacctgctcaagtgcgccatctccggcaacgatccgaactggggccgcatcgtcagctccttgggcactgtgccgcctgaagtcgcgccttacgattcgaacaaggtgaccgtggacgtcaacggcgtgcgcatctgcgagaacggcggcgccggccgcgaccgcagcgaggtcgacatgaccccgcgcgaagtccacatcgacatcgacctgaacaccggctcggacgccgaggccaccgtctggaccgacgacctcacccacgaatacgtccacatcaacgccgactacgaaagctgacaaacagcccagtgggctgtttgtagcagccggcagcgatagcgtcgccggcgtcgcatataacgcaaacagcccagtgggctgtttgtagcagccggcagtgatagcgtcgccggcgtcgcagaaaagagaaaaattggctacagaattgaagggacctgggttccatttcgacgtgcacaccgatttgcgcgccgatcagaaggcagaagtgcttattgaagcgctgccttggctggaggagttcgccggccagcgtatcgtcgtcaaatacggcggcaacgccatggtcgatgaccatctgaagcagtgcttcgccgaagacatggtcttcctgcgtcaggtgggcctgcatccgatcgtcgtgcacggcggcggcccgcagatctcccacatgctcaaggccctcggcatcaaatccgaattcaaaggcggcctgagggtcaccacccccgaggccatggacgtggtgcgcatggtcctgaccggcaaggtgtcacgcgaactggtcggcctgatcaacgcgcacggcccgctggccgtaggcctgtccggtgaagacggcggcctgttctcggccatgcagcgcaggcccatcatcaatggcaagcccaccgatatcggcttggtcggcgatgtggtttccgtcgatgcctcggcagtcgaggatctggtggccgccggtcgtatcccggtcgtctcttccgtggctccgaacgaagaagatgccactgaagtgctcaacgtgaacgccgattccgccgccgccgctttggctgccgctgtgggcgcacgcaagcttgttatcttgaccgatgtggatggtctgtacgccgattggccggacaagaattctctgattggccggatcggtgtggaaaacctgcgcgatatgctgccggacctggaatccggtatgcgacccaagatggaggcctgtgtcagggccatcgacggtggcgtgccccaagcccatatcatcgacgggcgcaagccgcattcgattttgaatgagatattcacctccgcaggcatcggtaccatggttatgcccgatgaaggactggaaatgaggagctcttatggctactgagcatgaggaaaaactaggtacggaagacagcaagtggctgggagagtactctcaggtccacatgaatgtgttcggtacgccgttgcgcgtcatggatcacggccaaggtgcccacatctgggatgttgacggtaacgaatacctcgatttcctggcaggcatcgccgtcaattccctcggatacgcccaccccaagtgggtcaaagcggttgccgatcaggctgccaaggtggctcatatcagcaactatttcgcgtccgagccgcaaattgagctggcatccaaactggtcaagctggctggtgcacctgaaggctccaaagtctacttcggcaactccggtgctgaaggcaatgaagctgccctcaagcttgccaagctgtatggccgcaccttgcctggtgccctgccttccatcggcggcaagcccgcacgcattctcgcaatgactcacggcttccatggccgtacgatgggtgcgctgtccgccacatggaaacccggtatccgcaagccgtatgatccgctggtgccgaacatcgaattcgtgcgcgccggcgacaaggtcgccctgcacgacgcttttgcacagaccggtctcggccgctatggcaagggtccggtggctgctgtgattctggaacttatccagggcgaagccggcgtgcagccgttgggcgccgattacgtcaagttcgtgcgcgaactgtgcgatatcaaccacgcgctgctcatcatcgatgaagtacagaccggtatcggacgtaccggcaagtggttcgcattccagcgtgacgatctgtccggcggcgtgacgccggatatggtgactttcgccaagggcgtggcaggcggattcccgatgggcggcatgatcgctttcggcgagaaacttgcggctctgttcactcctggttcccacggctccacctttgccggcaatccgctgggtgcggctgcgggactcgccactcttggcgtgattgaagacgagaatctggtggccaacgccgaagctcgcggcgaacagctgcgcgatggcattatggccaccggtaatccgctgtttgtttccgtacgcggtcgtggtttgctggacgccgtcgagctcaagcatccctgctcccacgcggtgatgaactactgcctcgaacacgggctcatcgtcaacgcggtggctcccaatgcgctgcgtttcgcaccgccgctgattgtaaccgctcaagacgtggatcaggcacttgccatcctcaaggatgtgcctacggacctgcccgacgactgatttctcgccgtcactgccgacccaccgatccaaggagatcatcatgaccccagaacttcgccacatgctgcgtgacgacgacctcaaccatgaggagcagaagcaggtgctcgaacttgccatcaagttccaccatgaccgcttctacaagcagccgttcgccggtccgcaggccgtcgccgtactgttcgacaagccatccacccgcacccgttccagcttctccatcggcgttgccgagcttggcggctacccgctggtcatcgacaagtccggctcccagctgggccgtggcgagcccgtggccgataccgctcgtgtgctcgaccgcatggcttacggcgtggtgtggcgcaccttcggccaggaccgcgtcgaagaaatggccaagtactccacccatccggtggtcaacgccctgaccgatgacttccatccctgccagattcttgccgacttccagaccatcgccgagcaccgaggcggcgtcgacaacctgaagaaccagaccatcgcctacctcggtgacgcggccaacaacatggctaactcctacctgctcggcggtgccgtggccggcatggacgtgcgcgtggccggcccccacggctacctgccccgcccggacatcgtggccgacgccaagcgcgtcgcggccgagaccggcggctccatcctggtcaccaccgatgccaaggaagcagtgaaggacgccgactgcgtgttcaccgacacctgggtctccatgggcgaggaggccgaatacgccatccgttccaagccgttctgggattaccaggtcaacaccgaacttatggcattggccaagccggatgcgctcttccagcactgcctgcccgcctaccgcggcaaggaagtcaccgctgaagtgatcgatggcccgcagtccgtggtgtgggacgaggccgagaaccgtctgcacgcacagaaagcgttgctgacttggttgaccggcaaggcccgtggagacgaaagcctgctcgcatgagtgaaaccggtccgtccctgcagcgccctgccaccagggcggcgcggctgagtgccatagaacaggcgctcgccacgcatatcatcacctcgcaatcacagctgtccaaaatccttatcgacgagggcattgcggtgactcaggcgaccctgagccgcgatcttgacgagatgcatgcggtgaagacccggctgaaggacggcacggtggcctacacggtgggtcgcagcgtcgttgcttcagaaggtgaggatgtaggggagcgcggtgaggcacagatgtcccgcgtgctgaacggactggtcacctcggtggccgccgccggaaatctggttgtggtgcacacgccttccggtgccgcacaatacgtggcctcggtgattgacaggcagccgatcgaaggcgtgctgggcaccatcgccggagacgacaccgtcatggtgatttgcaccaatgacgacaccgccgtctcccgctccgactggctactaagcctcgcctccaaataaccaacacgccgtgcataaatatacagtcctctgtatatacttgcatcagtttgtttttcagaccttgaacgaaagggaaccaatggcagataacaagcgcattgttctggcctactccggcggtcttgacacctccgtcgccatctcgtacctgaaggagcgcaccggcaaggacgtcgtggccgtgtccctcgacgtcggccagggcggcgaaagcctcgagaccatcaagcagcgcgcccttgcctgcggagccgtcgaatcctacgtggtcgacgcccgtgacgagttcgccaacgaatattgcatgaaggccctcaaggccaacgccatgtacgaaggcgtctacccgctggtctccgccatctcccgtccgctgatctccaagcacctcgtgcgcgccgcccaccagttcggcgccgacaccatctcccacggttgcaccggcaagggcaacgaccaggttcgtttcgaggtctccatcgcctccatcgacccgacgctgaaggccatcagcccgattcgcgacctgtccctgacccgcgacgtcgagattgcgttcgccaaggagcacaagctgccgatcacccagaccgagaagtccccgtactccatcgaccagaacgtatggggccgcgccattgagaccggcttcctcgaggatccgtggaacggcccgaccaaggactgctactcctacaccgacgacccggccttcccgccggtcgaagatgaagtcgtcatcgagttcaaggaaggtgtgccggtcaagatcgacggacgtgacgtcaccccgctgcaggccatcgaagagatgaaccgccgcgccggagcccagggcatcggccgcatcgacctcatcgaggaccgcctggtcggcatcaagtcccgcgagctgtacgaggctccgggtgccgtggctctgatcaccgctcaccaggaactcgaaaactgctgcctcgaacgcgaacagcaccgcatcaagcgcgacatcgacaagcgctggggcgagctggtttacgatgcgcagtggttctccccggcaacccagtcgctcaacgccttcatcgaagacacccagaagtacgtgtccggtgagattcgcatggtcctgcacggtggccgcgccgtggtgaccggccgtcgttccgactcctcgctgtacgactacaagctcgccacctacgattccggcgataccttcgaccagaggtcctccaacggcttcatcgacatctatggcctgccgtcccgcgtggccgcagcccgcgacgtcaagttcggcaacggcatcgaggtcccgaagaacaccgtcgagtaattcttactcagtcgcccccgctgcgaggctgtcggcatagctgactgggagtggtctttgaaaggactgtcctcagtcacactccatgtgacagccctcgccagcgggggcaactgtatgtttgaacacattgctacgcttaaacacagctattttcacttttcaaggagccttcatgactgagaacaacgaacatctggccctgtggggtggtcgctttacgtccggtccgtcgccggaactggcccgactgtccaagtccacgcagttcgactggcgcttggccgacgacgatatcgccggttcccgcgcccacgcccgtgctctcggccgtgcgggacttttgaccgccgacgagctgcagcgcatggaggatgcgctcgacacgctccagcgtcatgtggatgacggctccttcgcccccatcgaagacgatgaggacgaggccaccgccctcgaacgcggactgatcgacattgccggcgacgaactcggcggcaaactgcgtgccggacgctcccgcaacgaccagatcgcctgcctgattcgtatgtggctgcgccgccactcccgtgcgattgccggactcctgcttgacctcgtcaacgccctgatcgagcagagcgaaaaggccggccgcaccgtgatgccgggccgcacccacatgcagcacgcccagcccgtgctgctcgcgcaccagctcatggcccacgcttggccgctgattcgcgacgtgcagcgactgatcgactgggacaagcgcatcaacgcctctccgtacggctccggcgcactggccggcaacacgctcggcctcgacccggaggccgtggcgcgtgagctcggcttctcccgcgtgaccgacaactccatcgacggcaccgccgcacgtgatctcgtggccgaattcgcgttcgtggccgccatgaccggcgtggacatctcccgcctgtccgaggagatcatcatctggaacacccaggagttcgccttcgtcaagctcgacgacggctattccaccggctcctccatcatgccgcagaagaagaacccggatatcgccgagctcgcccgcggcaagtccggccggctcatcggcgatctgaccggtctgctggccaccctgaagggcctgcccaccgcctacgctcgcgacctgcaggaggacaaggaggccgtgttcgaccaggtcgatacgctcgaagtgctgctgcccgccttcaccggcatggtcaagaccatgcacttcgacagcgagcggcttgaagaggaagccccgaccggcttcgcgctggccaccgacatcgccgaatggcttgtcaagaacggtgtgccgttccgccatgcgcacgagctctctggtgcctgcgtcaagctcgccgaaggccgcggccaggaactgtgggatctgaccgacaatgacttcatcgagaccttcgccgcgttcctgccggccgacaaggctccgggagtacgcgaagtgctctccagccacggttcggtcgactcccgcaacggcaagggcggcaccgcttacggtcgcgtgcgcgagcagatcgccgacgccaaggccgaggtcgaagaactcaagctcttccccgcatccacgtcggatggctccgcctacaaagcccccggcacgttctagtcccaatagagctccctcgtcagagggagctctattttgctgttgtcactgcaacggcatacactgagaaatcgtaacgaacgggagccgtgaggctgagaggaagtcgccagacttcgaccggggaacttgacgcgggtcatgccgccgtaaggaatcgttgttgcagatttgccgggttctccgatacagctttcattccgtttgcataattcagccgtgagacggtcgtgatggagccaatacatcacagcggtcgaacggtcgcatgattgggttcatgaatgggcgcaccacttaaggtacggttcgtttcgtgcacccttttttactatctgaaaggatattatgcaggtcaacggagagcaggtcacgctcgagacgccggtcagcgtcgccgattatctcgaagcgcacggattccgcgccgagcgtgtggccatcgaactcaatggtgagattatcccgcgcgataagcgtgccgacgccatgctcgacgaccagtgcgtcatggaaattgtgcagtttgtacagggtggatgaaaggaaaagctatgagcaatattaatccggttactgaagcatctgttgaggcgactccgctgccgccgcagcccgccgtcaccaatccggtcggcaccgccgcgccgattctgccagtggaagacaagccgctgaccctgggcggtcacgagttccagtcgcgattcattctgggctccggccgctacgacctgaacctcatcaaggccacggtcgaacatgcaggcacgcaaatcgtcaccatggcactgcgccgcgcgcagaccaccgagaacagcgtgctcgactacattcccgaaggcatcacgttgctgcccaacacctccggtgcgcgcaacgccgaggaagccgtgcgtatcgcccgactggcacgcgaagtgtgccacaccgacttcgtcaaggtcgaaatcgaacacgagaccaagtacctcctgccggacaacgccgaaaccatccgagccaccgaaatgctggccaaggaaggcttcgtggtcatgccctacatgttcccggacccgattgccgcacgccagctggaggaggccggtgccgccgccgttatgccgctcggttcgctgatcggctccaacatgggcctgcgcatgcgtgacttcatcgagatcatcatcgccaatgcgcatgtgccggtcatcatcgatgccggcatcggccgtccgagccaggcctgcgatgcgatggagatgggtgcggatgcggtgatggcgtacacggccgttgcctctgctggcaatatcccgctgatggctgaggcgttcaagcacgccatcgatgctggtcgtgcggcgtatctgtccggtctgggcaaggtgaccgagggacaggccgtgccgtccagtccgactacgggatatttgcactgacacttttattagctcccctctctgaggggagctggccgcgtagcggactgaggggagctggaaacatggagaaaacatggcattgactgatgaacaggtggagcggtacgcgcgccatctgattttgaaggggctgggcgtcaaagggcagaagcggttgttggcctccagcgtgctcatcattggagcgggcgggcttggctctccggccgccctgtatctggcggcggccggcgtcggccatatcggactggtggacggcgatgtggtggatatgagcaatctgcaacgtcagatcatccataccactgcacgtgtcggagcgcccaaagtggaatccgcggccacggccatccgcgcgctcaacccagatgtgacggtcgacacctactacgagctcgtcgatgccagcaacatcgccggcctcatcgaaccgtacgatctggtgatcgatgccaccgacaacttcgccgcaaaattcctcatcaatgacgcatgtgtgctggtcaacaagccgtatatccatgcgggcgtggtcgggttctccggccaggtgatgaccgtcatcccaggcgaaggcccctgctaccgctgcatcttccgcgatatgcccgccgcaggtgaaattccgacctgcaaggaggccggcgtgctgggcgcggtggtcggcgtgttcggcagtctggaggcgactgaggccgtcaagctgattgccggcgtgggggagccgctcgtggctcgtatgctcactgtggatgccctgaccatgaacatccgccgtgtgccgttgccgaaccatgtgcccgactgcccggtgtgcggtgagcagccgaccattactgctattgatccggccaactatattcagccggcctgcgcgatttagagctatgtggcacccctccttgaggggagccaagatcggaacgagaggggaagaacatgcctattgctttgcgtaatgcggtcgatgacgatgagagcagtgaagcatcgtaccgccgcatcacgccggcggaatttgccaagctcgacccgaatacggtcacgctgctcgacttgagggaaccagccgacttcgccgcccacccggtcgaaggtgccatcaatgcaccactcgaccctctggcccatgtgctcaaaaccgtgcccacagatcgaactgtcgtagtctattgtgctcaaggatggtggagcgaggaagtagctgaaatccttgccgatcgcggttacgatgtagcaagcctcgatggcggttttcagggttatctcgactatcttgaaacccaccacgattaacggttcccgttgtcgttcttttggatgagtgtgcacggacatacgtgtgccctacaatcggtcacggtattactcgatggattcttgaatatcgtcgggtaatcgtaattcacaacaagggattgcactgaaccaacccgaacggagggtcgaaaccgtgggacatctgctcacccgaacgcagattcaacgcctggtcgccaagcacggccgtgaggtcatcgagcatcgccacatgcagatcgaacgctgctactaccagcacggcaacgtcaccacgttcgaacattccgtgcgtgtcgcctgcctggctgtgtggatggccgaccgcgcgcacctgtggtaccgcgtcgacctcaaatccctgattcgcgcggccctcctgcacgattacttcctgtacgactggcacgactgggataacggcgaacaccagtggcatggcttcacccatggccacgccgccctggtcaatgccctgaaggacttcaagctcaacgatatcgaacgcaacagcatcgagaaccacatgttcccgatgaccctggtgccgccgcgctatatcgaaggctatctggtcaccttggcggacaaatgctccgccaccgccgagaccttctcgttcgaccggttcaacaagcgcgcgttgcccgccgcgaagccctacgccgagatcgaagcccgtcgatgatcaccacactcgaacattatttcctctggtttctgttctacagtttcgtcggctggatgtacgagtccattctcgtctcctgccaacagcaccgcttggtcaaccgagggttcctcaacggcccgctgtgcccgatctacggcaccggcgcgatactcggcgtcgccattctcggcaacgtacataacccgatcatcatcttcctgatttcgatggtgggcgccacgatactcgaatacacaacctcgtgggtcatggagcagctgttccacgcccgctggtgggattactcgaatttccgcttcaacctccaaggccgcgtctgcctgctgggcgcgttgattttcggtctcggcggcgtgggcgtggtacttggttcgcagccatatgtcgagcgggtcacggatatgattccgctgccgatgctgcatacgctggtcacggtactggccctgatcaccatcatcgacttggcggtcacggttacgggcatgctcggattcgagcaggtgctcgattccgtcgctcaggtggtgcaggatgtggcggcacgcgccggtggcacgtggcagcggggctccagtgcggtatccgacaggatgcgtgagttttcgcaggatacggttgagcgtctgcgctgggccgtcaatggcgtcatcaacgcacagcagaagcgtatgctcaagtccttcccgaagttccaggtgccggatcgtcaggacatcatcgactctttgcgcgaacttatgggcccgcgccgctagaataaggtgttttactgaatcgcgcggctcggctggtgttcggcactgtcgccatgttctgcgaaacttgactgtgcccaattgggcagtctcattcacaattcgatagggagaagcgacaagctatggctcacgtcaccgacttcaaggaagcgggtttcaacaccctgcttgaggaactggaatggcgcgggttgatttcccagtccacggaccgggatcgactcgcagaagcactgaacggcgagcccatcacctattattgtggcttcgatcccaccgctgcatcgttgcatatcggcaacctcgtgcagctcatcaacatgcgtcacctgcagcttgcgggccatcatccaatcgccctggtcggcggcgccaccggactcatcggcgacccgcgccagtccggcgaacgcacgctcaacccgaaggacgtggtggccggctgggccgatcgtctgaagaaccagatcggcggcattctggacaccgaaggcgcgaacgccgtacgtttcgtgtccaattacgattggaccgcctcgatgaccgtcatcgacttcctgcgtgacgtcggcaagaatttccgtctgggcaccatgctcgccaaggacacggtcgcccgccgcctgaactctgaggaaggcatctccttcaccgagttcagctaccaggtgctgcagggcaacgacttcctccacctgtttgacgaataccactgcacgctggaactcggcggctccgaccagtggggcaacctcacctccggcctggacctgattcacaaggtgcgcggtgtggacgtcaatgtgttcaccagcccgatcatcactgatgcttccggcaagaagttcggcaagtccgagggcaacgccgtctggctcgatgccacgatgctcagcccgtacaagttctaccagttctggatcaaccgcccggacgtggagatggaaagcctgctgaaggcgttcaccttcctgcccaaggccgaaatcgaacgattggtcgaggaatccaagaccaaccccggcaagcgcgaggcccagaagacgctcgcctgggaggtcaccagcttcgtgcatggcgaggccgctacccaggctgccatcgatgcttccggtgcgctgttcggccgcggtggcaacctcgaagacatcgacgaggaaacgctggaatccgtgctcgacggcttcaaggtggtcgacgagaacggcgagcacgccttccccgtctccaagccgggcgatcgcgtaatcgacgccgcccaggctgccggactgttcaagtccgcttccgaggcacgccgcgccatcaagtccggtggcgtgtatctcaacaacaaccgtatcgaggatgaggagcaggtgctggccgaagccgacttcctggccggccgcttcgcgctcatccgtcgtggcaagaaggcgctcggcgccgtggaaaaccgttaatcaacaacgaattaaggaaaacaagtaatggcagaaggtaacgagcgttccggcaagtcctacggcggcggccataaggggtatggcgatcgccgaccgggcaaccgcggcggcaagggtttcaagccgcgcggcaagggcggtttcaagccgcgtcatgacggtgaaggtttcaagccgcgccgtcgtgaggatggcgaaggctacgcgccgcgccgtgatggtgacggtgagggccacggcggctaccgcaagtcgtacggcaagtccggcggcttctaccggtgcagcaaacaggcgtgcgaactgtacatcgaaaattatcacgatatgttcggcctcgaatacacgatcctgcgctacggttcgctctacggcccccgcgccgaccgccgcaacgcgatcaaccgtttcgtggccgaagcgctggaaaagggcacgatcacctattacggcgcacccacggccctgcgcgagtacatccacgtcgaggacgccgccctcagcacggtggagatcctcggcccggaatacgccaaccagaacatcgtgctcaccggcaaccagcccatgcaggtgggcgacctgttccgcatgatcgaggaaatgctcggcaagcccattgaaatcaagtaccagcacgaccccaacagcgggcactaccagatcacgccgtacgccttcatgcccaaggtgggccgcaagatgaccccgcacctgtccaccgaactcggacagggcgtgctcaaggtcatggaagaaatccatcaggaactgcacccggacctcaaggagctcggcgggtacctgatggtggacaaagccgactaaccgacaccgctcaggagacgcctcatgaatatcatcgccattatccccgcccgcatgggttccagccgctttcccggaaaaccccttgccgacatccacggcatcccgatggtcggccatgtgaccatccgtaccgccatgtgcaaagagctgtcctccacatggatcgccacctgcgatcaggtcgtgatggactacgccgcctccgccgggctcaaagccgtgatgaccgccgacacccatgtccgctgcacgacccgtaccgccgaagccatgctcaagattgaggaaatgaccgggcagcgcgccgacatcgtggtcatggtgcagggtgacgaacccatgatcacccccgacatgatcgacgccgccgtcgaacccatgctcaagtatccgtccatcaacgtcgtgaacctcatggccgacctcgccaccgaggaagaatttgaagatcccaacgaagtga

SEQ ID NO: 2543 - DNA, 8248 bp, Unknown
  R50_10m  MAG No. k141_28413
attcaacgcgcaatcgtcctatctgccgttcaaaagtgaattcaccactctcccaagaagctactccattcaccacggctcgaatttcctcacgcaaataatgacgactgccatcgggcttcgcctccgcaggctccaccacatattcaatacgagcgccaacttccaaagcatagtcagttagcaaagacaccatatttgtcttgccgttttcaatttgagaaatatatccctgagaaacgttcatctcatcagccaactgcgtctgagtcatgccacgtcgcctacgcatctcaatgagctgatctagcaactcgtcaccgctatggtacaaatcataagccaattcgcgatagtcgtactcagctcgccccatcattctcaccgccattccaaaatattactatatctaatatatatatatatcgccgattatctctcacgaaacagtctctcgcccatcggacgcctgctgctcatatactgcaatcgctctatcgatttccttattttgggctttttgtattagctcatcatcgccactccgcacatccttgagatgcatatgcagccccccacaccacatcaattaaatccaacggctcagcatcgtaatgccgtatttgttcgcgcttgccaactctcagttcacgcgcatcgcgatgccagcgaaactcgaacattggcgcgtccccacgcttcgaacgagcgagaaaaatgacttcattgcctggagtcaggctgccggccacggcacgatccaatttctcctcaacaaaagcctctaatcgcatcttgtatttgttataacgccttgaatccagcaatccccaggcaaattcctgattagctgccatagcagcgaaccatctagcaacggcacgttgagcggactcaccatctacatgttcaataggcttcccccgccactgataattcacggcacgccctctcacacaacgaccgtccacaatcacccctccccggtcacgaaacacaaaccgcaacatcgcagtttcgactattgtacaggtacgtttcaagtgccacagccttctaaatagacagcgggaagagaataatttacttctttgccggtaaaatggtatgtcgatatctcgttgttttccggttgagcgagactctacgatgttggaggtgattggagttgcggtttgatgataggagacagctcgatgttgaaaacgctgctctgatcgcattgattgagtgctgcgaacggcctgatacgtggtcttcattggccaacgagtgtctagttgaaggcagtgctgtgcgtgtgctcaggcatcggatggatccgttgcataatccgcttcgtgaacacgaatatgtgccgacgaatgaacagggctcactgtttgaggtggaggacatgccatccgtcgaatacacggcgaaagcgaatgccgcgtggaatcaagccaaccagaaggtgacgcagtggcgagagcaaagtcttgacttggtcaccgtgttcgacgaccggttcccctcgcggctgcgatcggtcgtagacgtgccgccattcctgttcgccaagggttctctgctctcgaacgatttaggtgttagcgtcgtgggatcgcgcaaatgctcgccggagggtgccacgttcgcccatgacacggcttgcatgctgtgcgaacgtggattgactgtaatcgcaggactggctgaaggcgtcgactcgttcgcccaccgtgcaacattggaagcaggcggacgaacggtcgcattcattggcacgggcattaaccgttgctatcccgcatccaaccgtgaactgcagaaaagcatcgaaaagcggggactggtgctatcccagttctggcctgacagtccgccaaccaaacagacattcccgatgcgcaacgcgctgatgtcgggatatggtctggccactgtggtggttgaggcatcggaacattccggcacacgtattcaggcccgtcaggcgcaacgtcacggacgcccgttgattttccgtgacgtcgtactggaacgcaccgaatgggcgcaggaatatcgtaacaagccaggcgtgttcgtcgtgcacagtgtcgaagaggtcggtaaagcacttgataggatctcattcctcgacaacgatgtagacacattgctgggaaacattctcgacgcgaaggcgcaatatgcttgactctacgctgaatctaaatctgctggctgcatacgcccgctttgaacagagtatggggtggaggttgggcagctatgccaaaacagtgatataccgcagtgctaagcatcatgtctgtcctacctgcggcggtcccaagctggacagcgcatcgctttgctacagctgcactagtctgcgccaacaggctgaggctctcggcgtcgcacatctgatggcggatcgggtcaggattgccaactacgctattaaattcgatcagatgtaccgcgtcatggatggatacaagcgcaaccgccctgaatccaaggaggattactgcgagacgctgaaatatgtgcttggtgatgcgcttgtcgtccattggagttgtctaactcatacgtctgatggagtgatgccgagcgcatgggctaccataccgtcgaccacaaccagcgaacgctatggtcagccacacccactcaacggattggtctcgccgatgctgaataaaaccatcccggaggtgaaattgctggctaatgagcagaaacatcgagcgattgcaccatccacgttctcgctggatggctcgtattcggatgagacactaagacatgtactgctcatcgacgatacatggacgtcgggaggcaccgccgaatcagcctccatcatgcttaaacagtctggagcgcaacgagtgaccatctattgtctggagagaatcatcgatctggattattgctcacgcatgatcgggcagagcgtctctgacggttataagcagttgacctatcgtaatggatgctcgtgggattatgaccagtgcccgatgcggaacaagtgatgattttttactttttcaaattccagctgtctttacacggttcgtgttgcctttgccgtccacgatggcggtccagtctctccatcggggcttgaaacgatggataggtcatcgttgtaacgttggctttcggattcatataatgaacacgcacctgcacacgacggatacggcgtcaagctggtaaagcaagtacgagtcgtgccctgaccgatcgccattggcacacgactcattcgctatgcgtctgtcagtttccggccagttccagttcgcctggagtgggcgggagcatgggcgggttgcatgcgatgatatcggtctggccttgctcgcgggcctgctgcaccgtgcggatgaatttgtcgtcccaagtgtagacatgggtggcgtgggcgtacttcgcgctggcaagaatcgccgcgtcgcccggccggaggttctgaaccgccggtgtttcgctgaaccagccagcggcgtcggccgtcagatcgaccatgggcaattcacagtcatagcaccatttgatcagccgttgcttgtggtcacgtgcccgactgcgtgtctgtccggattggccggagcggatgacgaagttgccggacagttcgatcatcaccatcgagggcagcagcaattccagctccccggcgatgccgtcgttgagcagtcgttcggatcggggcaggaatgacgggtcggtggtgtcgtccttgccgagcgccacgttgacgatgacgttggtgtctaccacggcgcgttcgggatagcgccgtgaagattcgctctcattgattttcatcgcccgcctcccatggtggtgccgtggtcatgggtctcgcgcagcgtggagacgaaatcgacggagccgagagcgccagtgaagtcgaggctgatgatcccttccaggtcttcggcagtagccggggcgcggtggccgtcggcgatgatctccaggtcctcggcgtccacggacaccagttcgccgtcgtcggcgcgtacgaagccgcgcgcatcgacctccatgcccacttggatgcgtttgacgatcgggtcgagttcggggccgaatctcacgtcgacgcggctgcgggtgacgtggtcgaccagcccgagcgtgcggtgcgtgcgctgcaggatgaccttatccaccatgccgcgcacatgaccgaacgagcggcgtgatccacggatcagcagacggttgatgccagtgagcacgccgggcgtgaacgtgccctccgcctcgtgcgaggagacggtgatgttcgcgttggtctccttggccagatcactcaacgcggaaaatacgccggagaaccggaatgcctcgtcccgattcacgtcgtctcgtgtggccaggcgggtgatggtgtccagtgtggcgaacgagcgttccgttctctcgtccaccaccacgggtttcgcggcgaggtcgatgctgtgcagttccatgcgggagatgcgccagtcggacgcatccgctgcggacagtatccttgcgaatgcggacacagcctggctcaacgccttcggggtcacgtcccgcggggcgcaatccagtttgaatctgaagtctctgtcgcccatggcacacctccttcccgtatacgcagtatcgtcccgtcgtctgcgggcgggtcgccgtgcccagtattcctgtgctactgggtatcagtgtacgtggagtggatttcagtgtaaagcacgagcatgtctgacggtaatatgcccatggtccattcccgtacgcctcgtcgcaatagcacacaggcatacgcaacagagtgagcctctggaaaaagacaggatgcatcggctcgcatatcgcaggcagttatgcccatcatcggagagttccgacacccgttttacctaatattcggctatggatacgtggcttaccagtccgtcaacggtgctgcttatccggaaagcaaaaccgtgattttcgatgccgccaatgccacctccgaaactatgaagcgccgcggccgcaaaaaggcagaataaccaccaaggtacaggaattcgcgttattgcacgctatagggggctgctgcatactgcaatgcagcagccccttttactattgatgaacaatgtcgtcatatacatcggcaaatgcgtaatctgctatcgcactcagcattaatctcaaaatactatggcgtttccgcattcgtccgagtcaatcagtcgttaggaacaatcacgactttgccttcggccacatccttgagatgcttgccataggggctcttgccgtaacgttcggccgattcgaggagctcctccttggaaatccacccattttcgtaggcgatttcctccacgatggcgatgggcaggccctgggcgcgctgtacggtgcgcacgaactcgcccgcctcgtacagggaatccatcgtgcccgtatccagccacgcgtacccgcggcccagcgtacgcacgttcagggagccgtcctccaaatacatcttgttcaggtccgtgatctccagttcgccacgagccgacggcctgacccgcttggcgaactcgaccacacgctcgtcgtagaagtacagacccgtcaccgcgtaatgcgacttcggcttcttcggcttctcctcgatggacacggccttcttgtgctcgtcgaactcgaccacaccatagcgttccggatcgtcgacatagtagccgaacacacttgcgcccccgccgccttcggccttggcgacggccttgcgcaatgtggtgcccagaccgttgccgtagaagatgttgtcgcccagtacgagcgcgcacggctcgccgtcgatgaactcctctcccaagaggaatgcctgcgccaaaccatccgggctgggctgcaccttatagaaaaagtgcacgccgtaatgcgaaccgtcgccgaggagcttttcgaagttcggcaggtccttcggcgtggagatgatcaggatgtcacggatacccgcaagcatgagcacgctgagcggatagtagatcatcggcttgtcatacaccggcagcaactgcttcgatgtcaccgtcgtcaacggatacagacgcgtaccggaaccaccagccaagataatgcccttcatggtgttttccttcacttcctgtttcaccgcttgttaagttcgcgggtgacgtattctttgagggtttcctcccagtcggcgggcgtgtatccggccgcctcgatcttcgctaggtcgagcgcgctgtgcacggggcgcgggctgaccgggctggtcgcgttcgcgaaatactcggccgtcgagatgggcttgaccttgtcgccgttaccgttcgtcaaatcgaacacctcacgggcgatctccgcccacgacttgaccgcaccggatccggtcaggttataggtcccgtacggggcatggctgtcgagcagatggaagatcgcctccgccatgtcacgggtgaacgtcaagcgcccgtactggtcgtccaccaccgtcacccggttcagaccgtcgttcccgtcggcgacgcggtccgacaggcccatcatggtcttgacgaagttacgcccctcgccgatcacccacgaggaacgcaggatgtaatgctccggcgcgtttccgacggcgatgtcgcccgccgccttcgactgcccacacacgcccaacggggcgaacgcctcggattcggtatgctcctcggcggtcccgtcaaacacgtaatcgttcgacacgtgcaccagcgtgatgtgatgctcccccgccaccttggccaatagggcggggccttgagcgttggccttccacgcgaccggacgcccctccgcggtctccgccctgtccaccgccgtataggcgcccgcgttgatgatcgtcccgtacaacgaccagtcgtacttgtcgtacgcgttcggatcggagaagtcgaactcgtcgatgtccgtgtactcgaagccctccagaccatgcgcttccgcgtacgcgcggatcgcgtggcccagctggccgttgcagcccgtcaccagggtgcgcttgggagccatgggcttggcgtccttgagcatcgggtggtgcagatcggcctcggagcgctcggactcctccagcggaatcggccactggatgttcagttccggatccgcaaggttcacgaacgtgtaggtcttcttctgctcgagcgaccagtgcgcgttcaccagatacgtgtacaccgtgccgtcctgcagagcttggaagctgttgcccacgccgcgcggcacgtagattgcgcggctcgggtccagacgggtggtgaacacctggccgaagctctcgcctgggcgcaggtcgacccatgcgccgaagatctcgccggcggcgatgctgatgtacttgtcccacggctccgcgtgaatgccacgggtgacgcccttggtcgcgttgtagctgatgttgttctgcaccgggccgaagtccggcagtcccagacccatcatcttcgcgcgctgccagttctccttgaaccaaccgcggttgtcgccgtgcaccggaaggtcgaacaccagaaggcccgggatgttcgtctcctcgaccttcagttccttctcgaattcaaatgccatgatcggatcactgtccctgctgcttgtacctagcctcggtggcggccttcgccggctcccaccaggcacggttgtccgtgtaccacttgatggtctgctccaggcccttctggaaatccgtgtgcgtcggcttccagccaagctcggtctgaagctttgtgctgtcgatcgcgtagcggcggtcgtggccgggacggtccttgacccagtcgaagtcgtccgggctcttgcccatcacggtcaggatgtcacgcagcaccgtgatgttgttgcgttccccgtccgcgccgatcagatacgtctcgcccaagcggcccttggtcaggatggtccacacgcccgtggagtggtcgtccgtgtggatccagtcgcgcacgttctccccgttgccgtacagcttcgggcgcaggccctcaaggatgttcgtgatctggcgcgggatgaacttctccacatgctggaaggggccgtagttgttcgagcagttggagatggtggcgcggatgccgaacgtgcggtgccatgcgcgcaccagcaggtccgagctggccttcgtcgagctgtacgggctggacggatggtacggggtctgctccgtgaacttggccggatcatccagggccaggtcgccgtacacctcgtccgtgctcacgtg

SEQ ID NO: 2544 - DNA, 9002 bp, Unknown
  R50_10m  MAG No. k141_28574
actgccataagttgccgaaaatcccggatagaagggaagcgaagaacccgcatgagcgacaccgaagatctcgccgcgctgaacgatcgcctgatggccaagaaccatgcgctcgccgaagcgctgagccgcgccggcaaggaactgaccaaggcgaagtcacggctcgcccagctcgctcagccgccgctcaccttcgccaccatggtcaaggtcgattccacccgcaccgatgaagacggcatccagcacgcgtcggccgaagtcatttccggcacccgccgcatggtggtgcctgtggcctccaacgtcaacgccgcccgcctgaccgccggggccaccgtgatgctcaacgagaagctcgtgctggtcgagcagcgcgatgctgacaccgtgggccagattcgcagtgtcaagcaggtacttgacgacggtcgactgatcgttaccgacgcctccggcaatcccgtgctcatccgccgttccggcgcgctcgcgtatgcgggcatcaatcagggcgaccgtattatcgtcgatccgtccgtccgcctcgccatcgaagtgctgcccgccgagggcgacaaggatctggtgctggaggagaccccggatgtcacgttcgccgacatcggcggcctggatagtgagatcggtcgtatcagggacgccgtccaactgccgttccagcatcgtgcgctgtttgagcgctacgatttgaagccgccaaagggcgtgctgctgtacggtccgcccggcaacggcaagacgatgattgccaaggccgtggcgaacgccctatgcgagggtggttacgattcgaatggcgacggcgcaatcagtccggccgaaacccatgtcaagggcgtgttcctgtccgtcaagggcccggaactgctcaacaaatacgtcggtgaatccgaacgactgattcgcctgattttccagcgcgcccgtgaacgcgccgcggacggcaatccggtggtcgtgttcatcgatgagatggattcgctgctacgcacccgcggctccggcgtctcctccgatgtggagaccacgattgtgccccagttcctctccgaactcgacggcgtggaatcactcgacaatgtgatggtaatcggtgcctccaaccgcgtggacatgatcgatccggctgtgttgcgaccggggcgtctcgacgtcaagattcgcgtcggccggcccaaaaccaatcaggccatcgccatcgtggaccattacctcaccgacgacctgcctctggaagatggcgtcgacgcgcacgccttgtccgccgtgctggtgcatgacatctacggaacctccgaacgccgccatctatgcgacgtgcaggaggagaacggccagtggcatgcgttgttcctggccgacgtggtctccggcgcgatgctcaagaacatcgtggaccgggccaagacccgagcggtcaaggaatccatcgaaaccggcttggacgtggcactcaccgtgccgctgctcgctgccgccgtggaagacgaataccgcgagacccgcgattccatggccgacgtggaccccgaacaatggtcgcgcatcaacggcatggacccgatccgccgcatccgcaccgccgaatagctcaagctcaaggagcactacatgaccgttaaacgagtgatgggcaccgaaaccgaatacgcggtatccctgaacactccggaccgctacaatccggtgcaactgtccttcgacgtggtgaatggcgccgcggacagccacagcaaatccatccgctgggactaccggcaggaggacccggtcaacgacgcgcgcggcacccgtctcgaacgcgccgccgcccgcccggacatgctcaccgacgccccacaactcaacatcaccaacgtgatcgcccccaatggcggccgcgtctacgtggaccacgcccaccccgaatactcggcgccggaaaccaccgacccgttcgaagcggtccgatacgaccacgccggagacctcatcatgcaggccgccaccgaacgcgcccgcaaacagactggcactcccattgccctgcatcgcaacaatgtggatggcaagggctcctgctggggcacgcacgagaactatatgatggcccgcgcggtgccattcgacttggtcacacgcctgatgaccctccacttcgtcacccgccagatctacgccggctccggccgcgtagggattggcgagaacagcgagatcccgggctaccagctcagccagcgcgccgactacatccacgccaaagtcggcctgcaaaccaccttcgaacgcccgatcatcaatacgcgcgacgaatcccactccaccgatgcataccgccgtctgcacgtcatcgtcggcgacgccaatcgcatggaggtgccgcaggcactgaaactcggcaccacgagcatgctgctgtggctgctcgaacatgcggacgaggccggattcgacctgaacgccttcctcgacgaactcgaactgtctgacccagtcgaggccatacacaccgtttcccgcgacctgacgctgggggcaatcttgccgctggccaacggcggcgaaaccaacgcatggcttatccagctcaaactgcgccaagccgtctaccaggttgccgcactggtcgaaggtaccgacaccgccggcgaacccgcctggccggacaaatccaccacatccattatggcgatgtggcagcaggcgctcatcgactgcgcctccatccgccatgccgccgacgatgacgaacgtctggccatgaccggcgaggccagccgcatcgaatggctgctcaaatggcagctgctcgaaaaactgcgccgcaaaatcaccacaacgtccgcacccggcgtggccaacggatggaatgatccgcgactgaaggtcatcgacctgaaatgggcggcgctcgaccccgcggacagcatcttcaccaaactcgaaccccgcaccgaacgggtggtgagcgccgccgacatcgcacgcgccaccaccgaaccgccggaagacacccgcgcctggctcagggcaaaactcgtggcgcaattcggcgatgaggtggccgccgccagctggtcccgactcactgttcgcgacccgcgcgccgcagacgagggcgaggcggtcgaattctacggcaatgccggccatatggccgctaccgaccatcacctgttctccctcgacatctccgatccgctcgccttcaccaaggcgcactgcgaaaccgaactcaattcagccgaacacgccatcgatctgctgaagtcgctggccatcaacgccgaacgatagacttggtagctatggaagaaacacgcgaagagaccccacaggacctgcgcaaccttgcgctcaaagtcgccggcctgctcgaagaagccggccagcatgccctccacgaccaactcaatccgcgtaacctcgcccagccgagcaccgagaacgcggaccgtggcccccgctacaagcttgaagtggacaacaagatcatgcgcttcatgagcgccagaatcgccgacatcgcccacttcgacggcttctggaccacccgccccgccgaaagccgccctggccagcgttactggtacatcggcaagatcgacggtgtgatcaactacgtacgtcgcatgagcgaatggacggtgaccgccgccctgttcgaattcggcccggacaacgagcccaagccgatcatcggcatcgtgcacgccccggccctcggcctgacctacctggccgccaggggagcgggtgccgtgcgcatccacaaaaccgcggtcggcgagaagcgcgacaaggtcgtgccgtcgatgacctcctcgctggatggttctgtgctgagctacggcatgtccttcatccccagcgaatcgcagcgtgcgctcgacgtggcctcctcgctcgccggacgcccggccgacatcaagcgcgtgggccccgtctcgctcgacctgtgcaaagtggccgacggcacctatgacgcctacttcgagccgatgctgcacgtgtgggatatcgcgggcatcgccgccggcaccgtagtggtctgggaggcacagggcacgctgagccgttgggacggcgaacgcatccactggcgtcacgataacgatgtagtggcctccaatggactcatcatccgcgaactgcagcattacctgcagcagtatccgtggctcgactccatcaaccagcgataattttttgactcctccggctcccctcgggtgaggggagccgtcggccgaaggctgactgaggggagtttgacagcccaaaaagaagacaacatgccacaacaattcgaacaacctcaagcacagcaggccgcgacccaggaagacgacgccctcgccaccacgcaggccgccgcccaaaccgagtccaccgaccaagccgacgtgttggacgacatcctcgacgacatcgaatccgccttggaaaccaacgccgaggaatacgtcaacagcttcgtgcaaaaaggcggcgagtgatgccccaactgcgtgacagcggcacccgctccctgcacgccacggaacccgtaccatccgccgagatggacgggttctgccgtattttcggcgtcgaaaccgaatacggcgtggcggtcaccggtgccgaacgccccgtggacgccggccaggtggcgatgaccatgttccagcccatcgtctcccgttcccgctccaccaacacgtatctggccaatggctcacgtctgtatctggacgtcggatcccaccccgaatacgccaccgccgaagcgcgcgacccgcgcgaggccctggcccaggacctcgccggcgaacacgtgatgcgcaacctagccctgaaggcccagcgcaagctgcgcgaatcctacggcgcacacgccacgatccatgtgttcaaaaacaacgtcgactccgccggccacgccttcggctgccacgaaaactacctggtccgccgcttcgtgccgttggagaccatcgaacaccagctgctgccgttcctcatcacccgccagctgtacaccggtgccggccgcatgaccccggacggcttccagatcacccagcgcgcggacttcctggacgaggccgtctcctcgtccaccacccgctcccgcccgatggtcaacacgcgcgacgaaccgcacgccgaccccgactccttccgccggctgcatgtgatcatcggcgactcgaaccgttcgcaatggtccacatggatgaagcttgccgtcacgcaccttgtgctgtgcgcgatcgaagacgccttccgccatggcgttccgtccggattcgagcagtatgcctttgctgatccggctgccgccaatcgcacggtcagtcgattccttgacgatccgcgcgccgaactgacgctcgaatcaggcgaatccgtgtccgcactgggtctgcagcgccggtattatgcggcggtcaaggccttcatcgaaacccatggcgatgcgctggcaagttcgctgccggccaccacgatcgacacgattatgggggagtggagccgcgttctggacgcgctggagcgtggtgcatacgatgcgctcgccgaccgcgtggactgggccgccaagaagcgtctgttcgacgcgctcaaacgccgtcgcccggacgtcaccttcgcccagatggaacagcttgagctcgactaccacgacatcgccaacggtcgcctgtacggttcgctcgtagcccgcaaccagatgcgtgagctgctgacaggagacaacgtggaatacgccgtgcacaatccgccgaccgacacccgtgccgccctgcgtggccggttcgtggacgcggccctgaacgtcggagcccagttctccgccgactggacccacctgaccctgaccgcccccgaacgccgggaagccatactcctcgatcccttcgaggccgagcccaccctgggattcgagcagcttatggaagcgctgaactagtccggaataatacggttggacaacacgtcacagcaccacaacaaaaagaccccgaccatctcggtcggggtctttgtcgtcagtaatgctcgaagtaatcgctacgagcagaaggtcactcggtgacggccttcttcagcagggagccagcggagatacgaacgccgtaggaagccggaatgtcaatctgctcgccagtgcgcgggttgcggccggtgcgagcggcgcgcttgacgcgctcagcggagaacaggccggtgagcttcaggccttcaccggacttcatagcctcgacgaacacatcctggaaggcgttaacagcagcctcggcctgagccttggtcaggttggacttctgggcgatcttcgaaacgaggtcagacttgttgtatgccataaagcatccttcttgggtcaggggacaagcacttttgcttagtccatgttgtcatcaatgatactagcgcatgtttctgcgaaaacccgcgttttataagggttttcacatctatttccccgaagggggtatgaaaatagacgaatcagacaagattatgcttgtcaagccacttcatggccgccgcgcccagcggaatgcgcagccagtagaacaccacgcggtgcagcaaagtggcggaaagcgccacgccctgcggcactccgaccgccacgaacgcgaatgtcagcgccgcttccacaccgcccagaccgcctggagtgggcactgcggaacccaatgcataggccagcaggaagacgaacgtcgtttcaatcggattcgatgaatggccgaacgcttgcagggccgcccagaaagcgagcccagtggtggcgttctggaacagcgcgcccaggcagctgactgtgagctgtcggggctgggaaagcacgtccagcagctggttgatatacgtcttggccagcggcataagacgacgggtcacccagtggcgcaacggcggaatcatcatcgcaatggacagcaccacgaccacaacgcccagcacgataaccaacgtgtttgtcgggattgcgccggagaacatgttgcggccggtgaacaggccgatgatgaccagcatggagaagtacacggcgtaatacaccacgagcacggcgctcataattgcggtcgcctgggtgttgcgatagccggatttgcgcaggaactgcaggttgacgaacgaggggcccacgccggctggcatggatacggtggcgaagccgcctgccacctggctcatgaagacgcccatattgtcacgcttgtgccgcgccatcagggaaccgagcgaaatcgacgagccgatccagccgcagacaccgaacgcgagcgtcaccaccgccatcaacgggttggcgttggtcagcgcggtgatgatctcctcgggcttcagttgggtgaagaccacgaccacggccacgatgaccagcagcatggtgatcatcgaacgccaggagaatcgggccagcgtcaccggttcggcggattccaccgtctcctcgtcagccagcgcggtgatacgactcctcaggcccttgagcagctgcttgtcccaggattccagcgcgcgcgtgggggaggggaccgcgaccttctgaatgaacggggccaaggccgtcagagtcgtgtctccccacgcctcgcgggcggcctccaccgccggttccacgccgatcagcgcggcgaacagcactagcagctgaactttgtcgagcgcggtgttggccggaccggaagcgttgtcgccgttgagccagccggcaatcacggcggtgccgtcttcaagccgggcgagcgtgtccggcgtgatgcgccggtgcgtatagccgcgccggctcgccacggacaggtagcgcatgtaggccacggcatccgccttggtaagcgtgttcaggttggcgggcagttcgatggtgtgtgcatccagcaccagaatcgcggattcgtcggtatcggcgatgccgtagggtgcgggcgcgggcagtttgatattgtgcagacccagcagcatggcgaaatgatgctggacggcgtcacgcacggaacggtcacgtcggatggacacactggtgaaacgcacccagtcccacaactgcttcagatagccgacggtatgggtctgcgcgtcgatgacggaaacgatgaaacgacggttgtccgtggtatccagatcgtagatgcgcgagccttcggccagatcgtcgtccagcgtgacggccagtgaaccgtggccgacgccgggctcctgatgccgaatcagcgaggcggtgtccagtccgatgcctttcagggcggcgaccagatcttggccccacacgcccttgttctgcgtgccgaccacgaatcggatcagcatgcccactgtgcggccggcggccatcgacaccagcatgccggtgaccgaatgccacgacagcaccaccatcaccgcagcgatggcatacaggatattccagctccatttgaccgtggagcgggtgcggcgtggcccggcggcggtcaggaaggacgccatgccggcgtagatgtcgggcaacagcccggagccgtatgaggtggcggctgagactagtgccattggcagggtgaaatcgttcagactgctgattgccgtcgatacgacccacaccatgccgtagccggcgaacatggccagcgcggacaccgcggcctgcagccattcccgggccagtagcaattgagcgagcacgatgatcacgatgacgatggtggccagctgcgtcagcacggtggaggggaagtcagccaaccagttgatgacctgggctgcggtgtgtgcgtcggattcgacgccgcgcgtcatgccgcccagatacacggcgaacaccatgaccacggcggccatcaacagcgacagaccggcccgggtcagatcgccgaagtcgcgcgtgcggcgcggagcgatgtcgtcgatgtacggtccggaatcattgctgtcgtcggttgccgggctgtccggtccgctgacagcaaaactggccgaccggccgtcaccagaggcgatcggcc

SEQ ID NO: 2545 - DNA, 6265 bp, Unknown
  R50_10m  MAG No. k141_28609
cactgcgtgatcggtaacggtgatcgccactacaatgaatgagggttccgatcatgctgatatcaaacgagacatcgtgaccgtcacccgtgtatacatcgccagccccgaaggcgccaatggacgcaacgtcgtcgcctatggcgtgctcaatgcgttgacctccaaatacaagaccatggtgttccggccggccgtgtcgaaccatgacgaattcacccccatcttgctcgccgcctccaatgcggggctcggcgtgtccctgtccaccggcctcgacgtgcataaggtgcgcgccgacaaggacaccgcccgcggagacatcgtcggcgagttcaactacgccatggaggtctcccgcgcgaacgccgccctgatcgtcggcaccgacaaatcccacgtcaacgacccgaccacctacgaattcaacgcggacgtcgccgccgatctgaaggccggggtgttcctggccgtgtgcaccatggaccgatggccgcacgaactcgacgaaaccgtgcaactgtccatcgagggcatgcgcgccgcgggcaatacggtgctcggcatcttcgtgaccggctgcgagccgcgtcacgccttctccgtcaaggagaccctcgccaaatacggcctgccggtctggaccctgccgcaggtgcccttcaccgacgaatccaccaaggatctggcccttgagaccttccgcaagcacgctcccatcgacgaggtgctcgccgcgctcgatgtggacgtcaccgcgccggtcacgccgtacgccttccaattcgacctgctcggcaaggccaagagcaacaagaagaccatcgtgctgcccgaaggcgaggaggaccgcatcatcaaggcggccgattacctgctcgaacgtgagaccgtgaacctcatcattgtgggcgacaaggacgccatcttggcccgcggcagggaactggggctgaacagtctggggcgcgcccgattccaggccatggacgacgagaacgtgctcaagccgatggtggccaaactgtgcgagttgcgcgccaagaagggcatgaccgaggagcaggcccgcaagcaactgaccgacgccagctacttcggcaccatgctggtggtgctcggctatgccgacggcctggtttcgggttccgtgcattccaccgccaacaccgtgcgccccgccctgcaggtcatcaagaccaagccgggccagaaactggtctcgggcgcgttcctcatgtgcttcaaggaccatgtggccgtgttcgccgactgcgccatcaacctcaacccggacgccgagcagctttccgagatcgcgctgcagtccgccgagaccgcccgcgccttcggcatcgacccgaaggtcggcatgctctcctactccaccctcggctcgggcaagggcccggacgtggatctggtggaggaggccaccaagctgctcaaggagaaggcgcccgatctgccggtggtcggtcccatccagtttgacgccgcctggtcccccaccgtggccgccaccaaggccaagggcaacgatgtggccggacacgtcaacgtgttcgtcttcccggacctgtgcgccggcaacatcggctacaaagccgtgcagcgctcctccggcgccttggccatcggcccggtgctgcagggtctcaacaggccggtaaacgacctgtcccgtggtgcgatggtgcaggacatcatcaacaccatcgccctcaccgccatcgaagcgcagtgagcccggcttggctcccgccagcgggagccactgtaatgcttattttgtagcaagcaacgagtaatctaatcaacggtaacccgtgtctcacgggaacattcaatcacaatggaggatgcccacaatggcgaaaaccgtccttgtcatcaattccggctccagctcgatcaagtaccagctggttgatctcgaatccggcgaaggcctcgcttccggcctcgtcgagaagatcggtgagccggtcgacggccactacaagcacgagtacaacggcgaaaagcacgagcttgaagagccgattcacgaccacgagcagggtctgaagcgcgtgctcggcttcttcgaggagtacggcccgaacctgtctgaggctggcattgtcgccgtcggccaccgtgtggtgcagggcggttccatcttcccgaagccggccctcgtgaccgacaagaccatcaaccaggtcaaggatctggccgtgctcgccccgctgcacaacggcccggaggccaagggtgccgaagtcatgcgctccctgctgccggacgttccgcagatcttcgtcttcgattcctccttcttcttccagctgccgaaggccgccagcacctacgcgctgaacaaggaaatcgccgatcagtaccacatccgccgctacggcgcccacggcacctcccacgagtacatctcctccgtggtgccggacgtcatcggcaagccggctgaaggcctgaagcagatcgttctgcacatcggcaacggcgcttccgcttccgctgaggtctccggcaagccggttgagacctccatgggtctgaccccgcttgagggcctgatgatgggtggccgtaccggtgacatcgacccggctgtggtcttccacctgatccgcaacgcccacatgaacgtggacgagctcgatgccctgttcaacaagcgttccggcatgatgggcatgaccggctacggcgatctgcgtgaggttcaccgtctggtgtccgaaggcaacgaggacgccaagctggctctggatgtctacgtgcaccgcatcgtcagctacatcggcaactacacctaccagatgggtggctgcgacgtgatcaccttcaccgctggtgtgggcgagaacgacgacgtggtccgcaagatggtgtgcgacaagctcgctccgttcggtgtcaagctggacgaggagaagaacgccacccgctccaaggaaccgcgcatcatctccactccggactcctccgtgatcatcgccgtgatcccgacgaacgaagaactggccatcgcccgcaagtccgccgcaatcgccgaggctggcaccgatacctacggcaacaccttcgccaagtaagtaaccgccgttaggcatctcactaatctctagttgcaacactatgggggctgattccgattggaatcagcccccattcgtatatggtcatgagaccactacccctgcgtcatactcccctcagtcgcctccggcggacagatccactcagagaggggatccaggccctataacttggctcccttctctgaggggagctgtccgcgtagcggactgaggggagttccaccagaacacaggaccccttactgcctcagcatgccactccacataccgacgaaatcaggcaaggtcttgcgcgtggtggccacgttgatgacctcgatatcgggaatacgcagccccagcatcgcggcgaacgtggccatacggtgatcagcataggtttccatcacggcaccgtgcaacgtctccgccggcaccggttcgatacgcaatccatcaggcaattcctcagccgctcccccaacacgacgaatctcgttgaccaatgcctccagacgattcgtttcgtggccgcgcaggtgaccaataccaaccatgtctgtcgacttatcagcaaacaccagaatcgccgccaacgagggcgcaatctccccggccgccgtcaaatcgaacgtacccagcccacgcacggtgccgtcaccggtcacctcgcaatagcgcacgccgccgatggtcgggaacgatacttcggcacccatctgctccagatatccgggcaacaggccgcccggctgggtggtggtttcaggccaatgaggcacccggaccgtgccgccggcgatcaatgccgcgccgaggaatggcgccgcgttcgacagatcgggctcaacggtcaccttgctcggcagttgcattgcgcgcggttcaaccgtccatgtgcgggcggattcgtcggcctcaaccgcaccgccggcaccggtcacatcggccacggtcatgcgaatgtgcggcaggctcggggtcttctcccccgtgtgcgcgaggtgcagaccgccaggcagtttggaactaatcagcaacaggccggagatgaactgggaagaaccggacgaatcgatgctgacctgcgcctgggcagccggcaaggttgcaggcggcgtaatagtgaacggcagacggccaacctcgccgtggtaatcaaccgttgcacccagctgttccaaaccgtcaagcaccggcttcatcggacgtgcataagcctgttcgtcgccatcaaaattcactgggccatctgcaaacagggcaaggccgggcacgaaacgcatcaccgtgccggccagtccgcagaacacattgacgttgccatggaatcggccggatacaggaggagtaaccgttacggtggtgtcggttgcggaatccacgtcgcagcggacaccgagggcttcgagtgcgcccatcataaggtccgtgtcgcgcgaacgcagcaggccaatcagagtaacgggcttgctgccgagggcggcgagaatcaggtagcggttggatagggacttgctgcccggcaccgttaccgtagcgttcaacggctgtgcggcgagcggggcaggccagagattcgtgagtcgttcagtcataaggccaaatctatcaaacaaattattcaccggtcggcagcgatgcgggattcgatctgctgatcaggtgcggaagacggctgctcaaaaccgccttcgatggcctgcgcgtgcaacaactgagcggccgcgcgatcggcctcgatggcggcgatctggcgcgagaacacgatgaaccagccgaggaacgccagaccagccaacgcctccacattggtgagggtgttgtgacccatcatcatattgacccagaatgcagcgcatacgagcgcggtcaggtcggaggccaccatcactgctttggacaggcgtggcgcaagccacggcaggagcacgaacagcagcagcatgacgaacggcaggcctttggcgcatatattgtgcaagagattgtgtggcgtgtaccgaaacacgccgatgccgatgaatgccaggccggccaccatcagcaggaaggacagaatggagatgcgcagcatgaaatgtgggatttcgtagccgcgattcggatctctgttggtgcggtcgtgccagaggcgctgtagccgttcggtggtcaccagttcggagatggcgaagtagctgacgatgatgatgcatgtgccggcaagaatcagcgtggagttgaacatacgggccgcaaacgtggttctgtcgccgagctgcgaaaagttgttgtgataccagtatgggtcgtcggtggtcatgccggcggtgaccacgccggagatgacgaagaacggcaacagactggcaatagttttggcgttcatcatctccgcctgtacaaaggtcatgtaccccaccacgccggcgaaggcggcgcagacgctggagatatagccggagaagatggcattgcccatcatgtcgttggccgcaccgatgagtgcaaaagacgacaggaaaatggtcgaggcatacactaccgaaagggcgacgatttcgaaaatgcgacgaatcggcgcaaaccaaccatgtttgaggttcaatgaacgtgatttgcgcgcatagccaataatgaaggaaatgacgccgcatgccgccacgatgcccgaacataccatgaatcggcgttgcgtcagctgccagatggccggcgcgtattccatgtacaggttcatcgataccgcgccaatgatggcgcaaatcaagaaggagatgagtccggaggtttctgcacgctgatgacgtcccatgccgggcctcccctatctattcgatgccgcgttatctttcaacaacaaacaaaactccccccgaggacaacgctttactagcaagccagcgggatttggctgtcgccattctactgaaaatctgaaacactacaaaaaaaaacgattatgtacgggcttcttagcctttgcgactatcgttaccgccttgccgagtaccgttgttcatgcagaaagaaagcagtattggacacaatcgaatgagcgtggataacgcccgattttttgcgcactttcggattccgggtctgacgtaagagggcatggcccgcgtcctgtgtacgattttcattcgccaaaacaaaaaaccgcgattggaagccaggagacggaaccaagaccc

SEQ ID NO: 2546 - DNA, 5160 bp, Unknown
  R50_10m  MAG No. k141_28715
agtggaggtggattcggcgaacagattcttcttcaccgaactcgccttcgggaaagaacgtgaggacaccacagcactcgtctgcgcggaatcggcagaggcaaacggggctacgcatgcaaacatggcacccgtggcgataaccgccactgatgtggaaataatattcttaacgttcgtcatcagcgccttaccttagcacacatgggtcgatttcataacaggaatgtcttttcgaagatgatgtcgcgggtgtatcactcggcaggagaacgcaacgggcctcggataccgattggcatccgaggcctgcaatatatcaatcaataagactgcatcacgggatacgtaccacgatggtgagtttttcggtcatggcgctagcgagagccacgctgtagccgttccagccaccatggaccgcctgaccgttgccgacatacagcgccacatgatcgtagtgcgcgccgccattccatccaccggtgttggcataaatcagaatatcgcccggctgcagggacccgtctgtaactacgtggccaccaggaacattgacgtactcttcaggccaaccgtggaagttaataccacgggccgccaacgcttgactgaccaatgcggtgcagtccatgctctgtccgatcaaagaatacgcacggtcgatagaggcaccggcaccagcggaaaccgaaccactggcatcggaataagtaacagaagagcgagactcattacggctcgcggcgttggcctgcttctgggtcgcctgagcctcggcctccgtctgcttcttggcctcctcttcggcagccttcttggccgctgcggcatccttttccgcctgagattccgtctgcggcacatcgaggttctcaatgccgccccaatcagcattgtcctcaacgctcgtggcagtggcttcagtcgtcagatctttgcgcacctgggtgtacgaggggaaggacttggtggaagtcacagtaacaccctcagctgcagtcgctgtaggaacaaacataaacgagcaagcacaggagacaatcgcggcaacaatggaagaagctacagttttggtcttcatagaaccatcaccttacacggtgcgcattaactcgtacaggatggaagaaataaaacaccccggagctattgggatatatcggcgtgtcggcacaggtcagttcggactaatacgcggtcgcaacacttgaaatgtcatttcgcgcgaacgattgccgatagggcgacgtcacatccgaacagtaatcaccgaatgtaagccaatgaaatgaatcagtagtggacgtactggaacttaccggcttcggcggcgctgaacgtacgggtcgaaatcacacccaatcccttggcattggattcggagatctcaatggagccgtcggcattgatcttttccagaacggcaacatggccgtatgtgccatcggcattggcctggccaggagcgaacaccacagcatcaccgacatggcgaggagtgttgtccacccaatagcccagagcggaagctgacgccgcccactcgccaccattgccgaagttgccgctggaaggcagtcccagttcggcacgacgctggtacgcgtaccacgtgcactgaccccacggatagttgttggagttggtgccaacggcatggttcgggttgaagccagccggcacagcatcgccatcggcatccatgagagccgacaccacaggattgttcgcattattgcgattcatcagcttggcgtccaaggtgctgtctgaattgctcagcccccaaccgccttcattggtggactgtgcggtaacggaggacgaactcagatcagtacgtgcttcggaacgagaagccgcagtcacatcgctgatgcgcttaatctgcgtggtcgtcgtggccggatcagccacgaacgagttcgtggcgtctttattgttggaaaatgcgagagcacctgcggccgtgccgaccagagcggccagtgaggccgaggcaagaatatggctacggcgttcagcggcacgagcggcctcacgaatggaacggcgggtctggggagcgatttcgttgatcttctcggcaatggccggatcaagccccaaaacaacggcgtcgctaccagcggattgcaccgcacgcacagcacgaacggaatgagaacccttgccggaggcaaacaatgccttcgctaagctgaacttctggcgcgagaccgtggtcgctttatgcgaagcatgcttcatactacgttaactccttggatgggttcggcggggtcctttcaacgaccccgtatgaccggcacaattgagtactgtacaacgaacagaggtcaatcctcaatgcgatcccccaccatccgggcatgtcaaacgatttacgtaaccgtgcggcagggtgaaaaactgccttgtttccgcccgttcacgaacctcactatccggttatcggaagaatcactaactcatgtcattccgacacaccgtagccatgatgtgctgcgtacattctgcactgcattccgcattgccgctactaccgcccggcaccccggaattccgcagtagccccgcagcaatcccgcacaccgagcattatccgcgatattccccaacactggtctacccttgaaaccatgactatcacactgagtattcccgagtcgctgaagccagaagatggtcgcttcggctccggtcccagcaaaatccgccccgaacagatcgccgcgctcgatgccggcgccaccaccctgcttggcacatcacatcgccaggcaccagtcaagcaactggtcgcttcgattcgtgaaggtctgcgcgagttcttccacctgcctgaagggtatgaggtggcgcttggcaacggtggcgccagcgcgttctgggagattgcctgcgcttcgctgatcacccgtcgcgccgcattcggcacgtatggctcgttcagtgccaagttcgccgcgtccgccgcgaacgcacccttccttgaagacccggtgctgttccccggcgagccgggcacttaccgtctgcctgagctcaccaagggcgtggacacatattgctgggctcacaacgagacctccactggcgtggccgccccgattcgccgcgtgcccggcagtcgtgaagccggtgccctgaccgtcatcgacggcaccagcgcagccggcgctttgcccgtggacatcagccagaccgacgtctactacttctcaccgcagaaggccttcggtgccgatggcggtctgtgggtcgccatcctctcccccgaagccatcgatcgtgcggcaggcgtcgaatcaagcgctcatctggaaggcgcacatcgctgggtgccgccgttcctctcgctgaccacggcactgaacaactcccgcaaggatcagaccctgaatacgcccgccgtggccaccctgatcatgatggaaaaccagattcgctggctcaacaacaacggcggcctcgcctgggccaccacgcgttgcgccaagtccgcatccatcctgtactcgtgggccgagcgctccgaatacgccgctccgttcgtcgtcgatgcggacgcccgctcgaacgccgtggtcaccattgatctggacgagcgcgtccaggcctcccagatactgtccatcctgcgagagaacggcatcgtggacgccgccggctaccgcaagctgggccgcaaccagctgcgcgttggcgtgttcccctcggtggaaccggctgatgtcatggccttcaccaagtgcgtcgactatgtggtcgagcacctgtgatggcggtctatgcctcgcatggccgaccatatatgccatgcacattgatcggtctcaactgataccgattgaataaatcgtagggagaggtgtttgacgcccctccctactcttactacagtgcatgagtatgaagttcgcgcctctcattgaccctgccgtccgcaaacccgcgcccaagcccgtacgggtggacctgcgtaaggtgtttgccatcggtaccggtctatggattgtggcgttgattgtcgtgctgattctgctggccgtgggctacagcgtaatgccgttggtgattatgtgcgtggccggtgtcattattggcttgctactgctgatttgggaatacttcgaccgctgggactaccgccgcctcggacagtaataaagttcactgcgccaacggcaacgtcaggctgaacgtactgccttgcccgggcgcgctccatacggtcacatcgccatgatgggttagcgccacatgcttgacgatggccaagccaaggcccacgccatccgccgtgcgattgctctgttccgcaccccggtagaaccgctcgaagatgcgcgcctggtccttcttcgcgatgcccgcgccctggtcgatcacgcgaatcaccgcacggtcgccatccttgtctttggatgcggacacactgaccacaccattttccttggaatagccgatggcgttttcgatgagcttggtcacggcgctgtcgatctgatccgcctcaccattgatgactagatcatcgtcgcccttgatgttcagctgcacgccagccgcggccgcctgcggctccagtcgcgccaccgtggcctcgagctgttccataacgttcagtcggttggcggaagacggcgtaatcggctcctgtgcgcgtatgagcagcagcaaatcggacaccatatggttgagcttgctgcagctggaacgcacctggcgagcgtcggcagccacctgctgttcgtccagattgccggactccagcgaatcggcgagtttggccagagcttcagtggggcccaacaattgctcggatacattggtaataaacgagtcacgcacttgagcgaaacgaatcacgtcactgacatcggtaatcaacacgatgacgaactgctcgttgatacgccctacagtcaccttcagccagttggggcggtggacggactgcgtggcgacgtgatcgcccttgttctggtctgcgacgtaccgctccggagtatcggtggtcaagtcgaactggcgcttgccaccagacttgcgcgcctcgtgaatggcatccagcacctgctgctgggcgatggcgtcatctgacaccacacccaggcggtaggcagcgggattgcagcggaccacctcgtc

SEQ ID NO: 2547 - DNA, 3088 bp, Unknown
  R50_10m  MAG No. k141_28914
cgaacatcatatcgatgtatggctcgatctggtcgatcgcgtgatcgtgctcggccgacccgatgcaagttcgcccacgggcgcggtcatcgccgacggcaagccggacgaggtgttcgccgagatgggcgacgtgttggccgccggtggcgcgtgggtgccgggccgtgcgattcccgattactcgccgaagcgggagcctgcgcacgatgcgccggtgctcagcaccgagaacttaagctttggccgtggaaccgctcttggcgttggcatcaatctggatttctatcccggcgaagtaacggctctgatgggtccgaacggcgcgggcaaatcgaccttggccctgaccttggccgggctgctcaagcctatcgccggcaaggtgctcatcgccgacaacctcaagcccgcgcatgccgggcgtgagccgattgactggaaaagcaaggaactgctgggccgtatcggcatggtgttccaggagcccgaacaccagttcgctgccaatttcgtgcgtgacgaagtcgccatcggccccaagtcgatggggcagagccaagacgaggcttatcggaccgccgaccacatgcttgagcagatgaatctcacgcgcttcgccaaagccaacccgtataccttgtctggcggggagaagcggcgactgtccgtggcctccatgctggccgccgcacccaaagtgttggtgatggacgaaccgacattcggacaggatttcagtacgtggaatgaaatggtcaagctgatcgccgccatccgcgaccaaggctcgtgcgtggtcatggtgacgcacgatgaggcgctggtggatgcgctgggcgcacgacgcgtgatgttcgaggaggcgaaggcatgagtgacgtggtaaccgtcagcccgcaggaaacgcgcgtggagccggtcaaagcctcatcgccctcatggttcatcgcgcgcatcaacgcggtcagccgcatcatcggtgcgctgttgctgtgcgttccgatgttcatcagtctggatgtggtatccgcatccacggcgctcggcatcgaattcgtgctgctgtggattggtggcgtggctccgtggaccgtatgccgtaagacctggccggtatggatcgccgccgccggcagttttatctccgtgtttctctacggccgtacctcgggcgagatcctgtggcagggtggctggattgtgatcagcgagggatccattaatctggccatcgccacggctatcagggtggcggccattgccgtacccggcgtgatcctggccctgggcctcgatcccactgatttggcggacggtttggttgagattctgcacttctcaccgcgattcgtatacggcgggttggctggattgcgcatgtttacgctgctgcaggaagattggcgcgcacttggctcgtcccagcgttcgcgcggccttggcgacggtaacgccatcgcccgtgccctctcccaagcgttcggactgctggtgctctccatccggcgcgccaccaaacttgccaccgccatggaagcgcgcggcttcggctccagcgccccacgctcccaagcccgtatctcgcgtctgaagcctatcgactggatcttctacgtcatctgtctggctgtcccgctggcctccataggcgtagccatcggcaccgggaattggcacttcgcctttcaaggtgtctgaaaggcgacagactggcacagtgcctttcaaggtgtctgaaaggcttacgatgcctccgccagcgggagcgagccacgactgacgtaatgacccggcagtagggtagtggctatgcccatcaacgcccagattcttgataatccgaaatccgaccgcgttcgccgcatcgccgatctgacccgcgccaaaggccgcgaacgttcgggccgttttcttatcgaaggcccgcaatccgtgcgcgaggccgtcacttggcggccggacgtggtgccggacctctatgtggaggtttcgcaggcgttggaacatccgcgtatcatctcctccacgttggagaagatcgtcgaaacctcgcaggatgccacgatttatgtgcactactgcaccggcgacgtgatgcaccgcatcagtccggacgcccagggcatcgtggccgtcggcaatgccgagtccatgcacgccggtgccgatgacgtcgaacttggcaagaacggccggggcccgcagatcgccgccttctggcaggtgcgcgacccgggcaacgccggcaccgtgatccgtgcggccgatgcggccggctgcgacgccgtaatcttcgtggacgactgcgtggacgtgctgaaccccaaggtcatccgctccaccgcaggctccctgttccatctgccggtactcgccatgagcaccgacgaattcttcacctggacaggcgaccataatatgggcgtctgggccgccgacgtatacggcaccgaagaatgcaagccggaaagcctgcccgcagtactggcggacaaggcggcggtcgaggctccgaaagccgtgctgttcggcaatgaggcgcgtggcttggaaccggacatcctcacacgctgcggccgcatcgtctccatcccgctgtacggcaaggccgaatcgctgaacctcggcacctcggccgcggtgatgttgatgtcgctgtctatgtcgggtcatgttgaaagaatgtgaaaccggtaaaaacgctgtgaaacgctgagaaaacatcagacgaaagggttctcgtggcagaacaaatggtgttcgacgccgaccaggtgaccgctgaggttgccaagggcatcgagaaaatccagaacgcctccaacctggaggagctcaaggccatcaagacaacgtacgcaggtgccgattcggcgatgaccaaggccagcaaggccattggctccctgcccgtcgaccagaagaaggaagccggcaagctcatgggcaagctgcgcgccgacttcggccgtgcctatggccccaaggaggtcgagctcaaggaagccgccgagaaggccgcactcgccgctgaaaccgtggacatgacgctgccggtgaaccgcaagcctctgggcgcccgtca

SEQ ID NO: 2548 - DNA, 3015 bp, Unknown
  R50_10m  MAG No. k141_29149
cggtcgcggtgccggggacccgtgccgccatcgagaacacgtactccgcgagcaccgccacggacaatacggcgcaggacgccgcgatcaccggatgcccggcatgccgcaggccaagccggtcggaaagccggggcagagcagatcgtatctggcgcatgcgtccagcacctccttgcggctggcgactcccagcttgtcggccacgcggtgcacgtacgtgaacacgctgcccgtcccgccgctcctgcgacggatgcgccggcacacgtcagcgcccgtgattttttttccccccaacgccatatccaacaccagcgcatccggcctggtatgcgggttatggcaatgctcgatcgccaccgcgggcgaacccgtgcccccgcattacataaaagtccttggaaacggccgagatcatcgcgcacatcgcatccagggcgaacggatcattgtccaatacgggcgatacggatcgaccgcgccgcagccccgatcatgtcatcatgtcccatgccgctcatcgtggccacggtcgcagccggacgaaacctgctatcatgcgattacttgacacgatgttgcgcttttggccatgcgcaggttgaatgggattgcgccacgaaaggatatgccatgaacgatctgctgattatcgacatgctgcccacgtacgggctgctgttctacctgctgatctcggtattcgtcttcgtgggatgccgtggtctgcgccggaggacctcggatcgtggcctgctgcgttttgccgtaggcgcgttcttggttgtttccgcgctcggcgccgtgttcgctgcgctggtgtatatcatggcagcgcctttggcgcagccggatatggtcgacttctaccgcacgtaccagtcaggagctctgatcttcctgctgggattgttcatcatacaatttgtcttcggcgtcgctgccgtgtatcggggaaagtaacctggtatatcctgcgataaacgcattggcagacacttgctgcctatctgtaaacacaccctagataaggcttgcggccgttggccgagcacagtagtagtgtggtctgctgtgtcaacaggaggagtgtgaccaatgcggctgattgagacatggctggcggaccaggaacgcgcgtttgacttgttcgcgaaattcccggcggaggagacgggattcgagaacccagcggccggcatgaatcgtgaacggttcgccgcatatgtgcgagggttgcgtgatgagtcgcttggcgtcggcctgccggacggctgggtgccagccaccaaatacattctcgtcaacgatgagggcgactatgtgggcatcttcaacctgcgtcaccggctcaccgacttcctgcgcaacggtccgggccacatcggctacggtgtcgcccgcgaataccgcggccacggctacgcgaccgccgggctcaagctcacgcttgccaaggcccgcgagctcggcatcaaggaggcttacctgagtgtccacaaaaccaatccggcaagtcttgcggtgcagcagcattgcggcgcacgtatcgaccatgaggacaagacggaatactacacacgcatcgccacctgcacggagagcgatggcctctatgcgcgaggcgattgacggcgcctcttgcgtgtaaatggccgattatcaatcggttttaatcgatttcgcctcggtcgataaagtcgccgtcgaggaaccaataatcgtgcggatttccgcgtaacgccatgaacggcgtgagttccacgccctgtgtctcagctctgctcagcagataggcgcggataatccacggatactccagcacgcccgacttgagggtgatgatttgctccactctgctgccgctgacgccaaaatccctgccgccgttcggcggtcagacccagccggctcatgttctcctgaaattcgcggatagtcgccgcgcgttgctcactgttcaaagacatggcttcatgaatgttgcattggcgccttaatcatccatagttaaggcaccacgcaacatacgattcgcttacgcagccatccgacgatggttgggatagattgttcggcgaagcggtctatggcgtcggcggtgacgtaggcgtgggcggtgaggcgcaggtacagttcgccgccgaccgcgctggccgcctcggatacccgacgctccgcgtaatcggcaagatcgggcatgtaccggcgcacggcatcacagccccacagtcgctcgatctcgcgcagggactcgggcgcggcgatcggaccgcataaatcctgggtgccttgctcatcgaatcgctccgggaacgggtcagcgaaaccccacgagtcgatcagtggccacaaatcctgaccatcctgaccgccttcgggcggaatcaccagcaatgccgtgccacgcggcgcacacgggaacttatgaaaattgccgacccaccaatcggactgcagtccgccggccggatcggccagttgggcgggagcgtgcgcgccatcaaccaaaatgcggatgccgcggcgatgggcttcggcggcgatgcgctgggccgtaaacagcatagcggtggcggaagtaatctggtccaacacgatgaacgacgtacgctcgctcatctgcgcggtcacggcgccgaccacgccatcctcgtcggcgtcaatggtaactggtgcatcttcctcatccatgcgaatgagacgaatcgcctttcatcccaatgatttcgctctcatggctgatacccgcatgccgtcatgttccgtaccttggaatcagaagtcgagagtcatggtccaaaaccgaatggagcggaccgaagcagggagcattgaagatgggatttctcaagaacttttccgaaccgtttgcgttcgcgctggcattgtggccgtttgtgtccatgctgctgaccgtgccggtgctggcgttgctgtatcaccgcgacaatcgcatccgactgtcgtcggccatagtggcgtatggcacggtgctgtacctgctcggcc

SEQ ID NO: 2549 - DNA, 17084 bp, Unknown
  R50_10m  MAG No. k141_29156
ccgaatccggcatggccgcctggatctccgccaccacgccggaactcatcgccaagcgcttccacgagctcggctccatcgacatcgccgactgatagaaagaaaacatcaatgactgctgttgaattcattgagccgctgacccatgaggaaggcgtctcgcaagccaccaagctgttcgtcgatacctacggcgctgcgcccgagggcgtgtgggctgctccgggccgtgtgaacctgatcggtgagcacaccgattacaacgccggcctgtgcctgccgatcgctctgccgcaccgcaccttcatcgccctgaagccgcgcgaagacaccaaggttcgcgtcgtctccggcgtggctcccgacaaggtcgccgaagctgatctcgatggcctcaaggcccgtggcgtggacggctggtccgcctacccgaccggtgtggcctgggcgctgcgtcaggctggtttcgacaaggtcaagggctttgacgccgccttcgtctcctgcgtgccgctgggctccggcctgagctcctccgccgccatgacctgctccaccgctctggctctggacgacgtgtacggccttggctacggcgattccgacgccggccgtgtgaccctcatcaacgccgccatcaagtccgagaacgagatggccggcgcctccaccggcggtcttgaccagaacgcttccatgcgttgcaccgaaggccacgcgctgctgcttgactgccgctcggagctgaccccgctggagaacgtctcccagcaggagttcgacctcgacaagtacaacctcgagctgcttgtggtcgatacccaggctccgcaccagctcaacgatggccagtacgctcagcgtcgcgccacctgcgaggaagccgccaagattcttggtgtggccaacctgcgtgtgaccgccgacggcatctccaaggccgatgaccagttccaggccctcaaggaaacgcttgacgccctgcctgacgagaccatgaagaagcgcgtgcgccacgtcgtcaccgaaatcgagcgcgtgcgttccttcgtgcgtgccttcgctcagggcgacatcaaggctgcgggccgtctgttcaacgcttcccacgattcgctggccgccgactacgaggtcaccgtccccgagctggacatcgccgtggacgtggcccgcaagaacggcgcctacggtgcgcgtatgaccggcggcggcttcggcggctccatcatcgctctggttgataagggccgttctcaggaagtcgctcagaagatcgccgacgaattcgaaaatcaaggcttccacgcaccgcgcgccctggccgcgtacgcagcgccgagcgcttcgcgcgaggcctaggacaacccggtgggttgtccggcggatgcggtcgaggtcgagccaataggcgaggccgaggtaatgctgggtcggccgtaggtcgtccgtaattgcaggaccgcgtgcgcagcgccgagcgctttgcgcgaggcctgagccattgcaagctccctctgacgagggagcttcgttttatcccgcaccaccaccatgcccgccggcgcatccggcaccacttattcccataacccccataacgctcctgaaaccaggcatttcgaccatccgcataaggtgatgctcggcctgtacatcggcgcattcctcggcatgctgtccgagacatccatgaacatcgccctgcccgatttgatggacgagttctccgtatcctccggtaccgcccagtggatggtcgtcggctgcatactggccattggcgtggtgatgaccgcgatcggcggcgcactgttctttaccatcggcgtcaactcgggcgttgtgctggtgttctccttcatgttcaagagcggcaaacgatacatgaatcggtaatgaacataatggcgggtgtcttccctatacttgggtagtcacccgctttttgtatacgaccagggagagccatgaacaaggcaatcatcaccgtcgtcggtcaggacaccgtcggcatcatcgcgcgagtctgcacctacctgtcccagcacaacgtcaacgtgctcgacatctcgcagaccatcatcgacggttacttcaacatgatgatgattgtcgactacgccaacgcggacaaggacttcggcgcgatggtcggcaaccttgaggacctcggcgacgacatcggcgtgcgcatccgctgccagcgtgaggaaatcttcaccaagatgcaccgtatttgaggcgaccggctcagcaggccgcctcacgcgaggaggtggaaagcccggtgggctttccgctgacggagccatccttatccctctgatgagggtgaccgccaaactagtcttcaaatatcctgtaaggaacaaaccatgctgaacatcatggaggtccacgagaccaatcagatgatcgagcaggagaagctcgacgtccgcaccatcaccatgggcatctcgttgctcgactgcgcctcggacgatgtcgacaagacctgcgacaacatctaccgcaagatcactacctatgccaaggacctcgtttccaccggcaaggccatcgaacgcgactacggcatcccgatcgtcaacaagcgcatcaccgtcaccccgatctcgctggtcggtgccagctcctgcaagacgagcgaggacttcgtcaagatcgcccacgcgcttgacaaggcagccaaggaagtcggcgtcgacctgatcggcggctactccgcactcgtctccaagtccatgaccccggccgaggagttgctcatccgctccctgccgcaagccctttccgagaccgacatcgtctgctcgtccgtgaacgtcggttccaccaagaccggcatcgacatgaacgcggtcgaactgctcggccacatcatcaaggacgttgccgagcgcaccgccgacaacgactcctacggctgcgtcaagttcgtggccttctgcaacgtgcctgacgacaacccgttcatggccggcggcttccacggcgtcaccgaaggcgacgcggtgattaatgtcggcgtttccggcccgggtgtggtctcccgtgcattggacgaggccaagggcaaggatttcgagttcctgtgcgaaaccatcaagcgcaccgcgttcaagatcacgcgcgtcggccagctggtggcacaggaggcatcccgtcgccttggcattccattcggcatcatcgacctttccctcgcgccgaccccggccgtaggcgactccgtcggcgaagtgcttgagaagatcggcctcgaacaggttggcgcaccgggcactaccgcggcgctcgccatgctcaacgaccaggtcaagaagggcggcatcatggcctccagctacgtgggtggcctgtctggtgcgttcatcccggtctccgaagacaagaacatgatcgacgcggcaaccaatggctgcctgaagatcgaaaagcttgaggccatgacctgcgtgtgctccgtcggcctcgacatgattgccattccgggagacaccaccgcagccaccatttccggcatcatcgccgacgaggccgcgatcggcatggtcaaccagaagaccaccgccgtgcgcgtgattccggtggaaggcaaaggcgtaggggagatggccaacttcggcggcctgatgggctatgcgccgatcattccggtgaaccagaccagctgcgaggccttcgtgacccgtggcggccgaatccctgcgccgattcacagcttcaagaattgattcggtagggtatctgctttcagagaggtacatttggcccctcgcggagagctatctgctttcaaagaggtacctatatgcggaaaccccgggtatgagcgttggaatatcaacactcatacccggggtttctcgattgcggtacctctttgaaggcagatagcattctgcaaacgctcgaatgtacctctttaaaggcagataccagctcgaattacctttctggaggtctattcccgtttcgaggggctgattccgacctttctggaggtctacttccgtttcgaggggctggtatatatgaagaccccgagtacaagcattgatatttcaacggccatactcggggtctcgtcctttgacagccccttgaagcggcagtagacctccggcggatgccaaatccgcccctcgaaacgcaggtagccttatattcagcgttcatcactgcgcgaagctcagtgtttccgctctcgcgcctgtcggcgttcgttcggcgtcgctactcgaaggcccaccgggccttctcctcacgctccgcccgcaaaattgagctggcgccaggcttcgtagatggcgatggatgcgcagttggtgaggtttagggaacgcagggacgggcgcatgggcagccgcacttgttcggccacatgagggccctccatgatgtccatcgggtcggggatgtcgccgggctcggggccgaacagcaggatgtcagtcggcttgtattccacctcggtgtagagcttggtggcgtgcgcggtgaacgcgatgatgcgcgaattgggcatcgactccaccagattgtcgaaattcgggtgcaacaccacgtgggccatgtcatggtagtcgaggcccgcacggcgcagcttggtgtcgcgcaggttgaagcccagcggctccaccagatgcagaatcgtgccggtcactgcgcacaggcggatggccgaaccggtgttgccgggaatacgcggcgagtaatagcacaggtgcggcgtcacggtttcggtggcggcggccttctcggcggaaagcatcgcgtccaccacggagatggggttgccgtgtgcgtcggtcaccagctcgtccggcccgtaattcgacttgcgatagccgtattcgaacattttctcgactttggtttcgggattggctggattcggtgtgctctgggggttgtgttttgcctcgttcgtcatagctgctaagaataagaacgatgaacgacacagcaatttctttacggctcggcgcatggtgggaggccaatgcgcgtgacttgccatggcgcttcggacgggccacgccgtggggcgtgctggtcagtgaggtgatgagccagcagacgcagatgagtcgtgtggtgccgtattggcacgattggatggcacgctggcctgacgcctgtgctcttgccgcagcacctaaagccgatgtgatcaccgcatggggccggcttggctatcctcgccgtgcgctgcgattgcgggaatgcgcccgcgtggtggcggaagaatatggcgatgagctgcctcgcacctacgatgagctcgtcgctctgcccggtatcggcgactacaccgcctccgccgtgctgagctttgcattcggtgagcgcattgcggtgatcgatacgaatattcgccgcgtgctgagccgcgtattcctcggcaccgaatctcgcgggggagcggcgagcccggccgaacgcgcgctcgccaaccgcatgttgccccaagacagggttcgtggggacggtgccgattgcacggaccatgcataccgatccggcgaacacactttcctgcagcgcagcgaacctccatcggtcacatggaaccagtcggtaatggaactgggggcagtgatctgcacggccaaatcgccgttatgcgacacctgcccgattgcggatgattgtgcatttctcaaagccggccgccccggactgggggagcgtcgcacccgcccacgccaacgattccaaggcacggatcgacaggtgcgcggtctggtgctcgccgcgctgcgcgagcttcccgctggagtcacgttgcccagggaagatgccgacaagctttggaaggaccagattcagcttgccgcctgcatcgccagccttgacgatgacggcctgatcgagattctggacggcggcctgcgattacccagctgacattgtgaaaatggcgggctccccaagcgtgtatgggtgtggtgaccgtagactggaagggttatggcagtgcagaggaacacatcaggcgcgagaacggcacgcggagccggcaccggggccaatgggccatccggcgggcccgcccgaaacgaccgttccggcaagccgcgcaagcgcaggatcagcaaaaagcagcaggccatctatcgtcgtcggcgtatcgtggccggcacggtgttgctgctgataatcgcgctgattgtattctgcgtgtacagccttggccggggtatcggtgccgtgaacacgatgattcaccatgacgaggtgtatgcgatttcccgcgacgccacgccggctccgaagaaagtcagcaaggtcaaggattgctcggccagtgatgtgacattgcagctttccgcggcctcccaatccgtgccggtaggaggatcgcttgatttcaccgcgaccatcgtgcacgaggggtcaggcaactgtttggtggacggggccgattccggccgtgtgctcaccattacttccggtcaggaaacgatttacaagtccgatgtgtgtccggcggattcacgtctgctgctgatgtccaagggtgataaggacgttcagaaggtcacgtggaataccgatgcgaacgccacgctcaccgaatgcacggatgagtcggattgggccaaggtcaatgcgggaacgtacgtggcgcagctgagtttgaaggatcatccgaaggtgaagagcgatccggtgacgtttacggtggggtaggacctgcggttggtgtttggacgctgggtctctccctcagtctcgctccgctcgacagctccctcgtcagcgggagctaaaaatgtcctcgcatatcagtattcttttgactttgcatgaggtgtgtcatattgcgggcatgccgtcgacaatgaagcgtccgcataggcatatggtggccatgccggcgctcccaggggaattaccacatattagcgagcgataaggaacgtccattggctactgagtctacgacgaacaccaccaccatcatcgcacgcgccgaccagcatgacattgatctgcacaaggcgtcggatcgcgtgaacttcggttccatcaaggaacccatcgatgtgccctacctgctgggcgtacagaccgacagcttcgattggctgatcggctccgaccgctggaagaagcgtgtcgaagaggatgaggctaacggcaccaacaccgtggcccacacctccggtctcgacgaggtcttcaacgagatctccccgatcgagaactttgcacagaccatgtccctgaccttctcggacccgtacttcgaggagccgcgccacaccgtgcaggagtgcaaggagaaggattacacctactccgctccgctgtacgtgaacgccgaattcgagaacggcgacaccggcgagatcaagtcccagaccgtgttcatgggcgacttcccgctgcagaccccgcacggcaccttcatcatcggcggtaccgagcgagtcatcgtctcccagctcgtgcgttccccgggcgtctacttcgaccgccagcaggaccgcacctccgataaggaagtcttcggcgcgaagatcatcccgagccgcggtgcatggctcgagttcgagatcgacaagaaggaccagccgcaggtgcgcgtggaccgcaagcgcaagcagtccgccatcgtgttcctcatggccatcggcatgaccaagtccgagatcgcccaggccttcaaggactacccgctggtgctcgacgccctggagaaggagaccctcgagacccaggacgaggccctcgtcgatctctaccgcaagattcgtccggccgacaccccgacccccgaggccggcaagaacctgctggactccttctacttcaacaccaagcgctacgatctggcccgcgtcggccgctacaagatcaaccgcaagctgggtgtcgaggccgatttcaacgaccgttccctccaccaggaagacatcatcgccacgatcaagtatctggtggccctgcacgacggtgcggcgaccttcccgggcaagcgcaacggcgaagacgttgacctgcgcgtggacgtcgacgatatcgaccacttcggcaaccgtcgcatccgtcaggtcggcgagctgatccagaaccagctgcgcaccggcctgtcccgcatggagcgcgtggtgcgcgagcgtatgaccactcaggacgccgaggccatcaccccgcagtccctgatcaacatccgcccggtgaacgccaccatcaaggagttcttcggcacttcccagctctcccagttcatggatcagaacaacccgctgtccggtgtgacgaacaagcgtcgtctttccgcactgggccccggcggtctgtcccgcgaccgcgcctccatggaagtgcgcgacgtgcacccgtcccacttcggccgtatgtgcccgatcgagtctcctgaaggcccgaacatcggtctgatcggctccctggcgaccttcggccgcgtcaacccgttcggcttcatcgagaccccgtaccgcaaggtcgtcaacggccatgtgaccgacgaggtcgagtacatgaccgctgaccgcgatcttgaccacgtcattgcccaggccaaccaggagctcgacgagaacggcaacttcgtgcagaagtccgcccttgcccgagtcggcgaagaagaggcggtcgatgtgccggtgagctccgtggattacatggacgtctccccgcgtcagatggtctccctcggtgcctccctgattccgttcctggagcatgatgagggccaccgtgcactgatgggtaccaacatgcagcgtcaggcagtgccgctgatcgaatccgagcgcccactggtgggcaccggctccgaatggcgcgccgccaacgattccggcgacgtcatcaagtccgagaaggacggtgtggtcacctacgtgtccgccgacctgattcgcgtgatgaacgacgacggcaccaccagctcctacaagctggccaagttccagcgttccaaccagaccacctgctacaaccagcgcccgatcatccatgatggcgagcgtgtggaggccggctcggtgctggccgatggtcctgccatccagaagggcgacctggccctgggcaagaacctgctcatcgccttcatgccgtggaacggctacaactacgaggatgctgtgatcatctcccagcgcctcgtgcaggacgacaccctctcctccatccacatcgaggagtacgagatcgacgcccgcgaaaccaagctgggcgccgaagagatcacccgcgacctgccgaacgtcggcgaggacgctgtggccaaccttgacgagcgcggcatcatccgcatcggcgccgaggtcgaggccggcgacatcctggtcggtaaggtcaccccgaagggcgagaccgagctgaccccggaggagcgcctgctgcgcgccatcttcggcgagaagtcccgcgaggtgcgcgacacctccctgcgcgtgcctcacggcgagaccggtaccgtcatcggcgtcaaggagatcacccgcgaggatgccgaggaggacggtgacgagctgcccaacggcgtcaaccagatgattcgcgtctacatcgcccagcaccgtaagatcacggtgggcgacaagctctccggccgccacggcaacaagggctgcatctcccgcatcctgccggaagaggatatgccgttccttgccgacggtactccggtcgacatcatgttgaacccgctgggtgtgccttcccgaatgaacctcggtcaggtgctcgaactgcacctcggctggatcgctcactccggttgggatatctcccttgacccgaacatggaagccgagtggaagaagctgattccgtccggtgccgagaaggccgagccgaacaccccggtcgccaccccggtgttcgacggtgtcaagcctgaggtcctgaagggtctgctgtccaccacgctgccgaaccgcgacggcgaccgtctggtcggccccgacggcaaggccaccctgttcgatggtcgtaccggtgagccgtacaccaagccgatttccgttggctacatgtacatgctgaagctgcaccacctggtcgacgacaagattcacgcccgctccaccggcccgtactccatgatcacccagcagccgctcggtggtaaggcccagttcggtggccagcgcttcggcgagatggaggtgtgggcccttgaggcctacggcgccgcctacacgctgcacgagatgatgaccaccaagtccgatgacgtcgacggccgcgtgcgcgtctacggtgccatcgtcaagggcgataacctgccgccggcaggtatccctgagtcgttcaaggtgctcctgaaggaaatgcagtccctgtccctgaacgtcgaagtgctcaacgccgaaggcgtggccatcgacatgaaggacgaggacgacgatccggccagctccgctgacgacctcggcttcaacattggcgcccgccccgacgcggccgccaaggaagaccagaaggccgaagagcccgaataccagtgatccctcgggctgcatgcggtcaatacgccgcgtgtagctccgccaacgtgaaataaataacgtacagagacctttccggtttgcactacccctcagtcagccttggctgacagctcccctgacaaggggagcttgggaaggtctcaagaacagaaacggattaacaagtgctggacgtcaacgcatttgacaagattcgcatcggccttgccaccgccgatgacatccgtggttggagccacggtgaggtcaagaagcctgaaaccatcaactaccgtacgctgaagcctgagaaggacggtctgttcggcgaacagatcttcggcccgactcgtgactgggagtgcgcctgcggcaagtacaagcgcgtgcgcttcaagggcatcgtctgcgagcgatgcggcgtcgaagtgacccgcagccgcgtgcgccgtgagcgcatgggccacatcgagctcgccgccccggtgacgcacatctggttcttcaagggtgtgccttcccgcctcggctacctgctgaacgtcaccccgaaggatctggagcgcgtgatctacttcgcctcctacatggtcaccgaggtgaacgaggacgagcgccacaacgatctgcccggcctgcaggacgagttcgattccgagatcaagcgccttgagcagcgccgtgactccgacatcgaagcccgcgccaagaaggtcgaagaggatctcgccgcccttgaggaggccggcgaggccaagggcccggcccgcaccaagctgcgtaacggtgccgagcgcgatatggccgccatccgcacccgctacaacgaccagatcgcccgtgtggacgccgtcttcgacaagttcaagaagctcaagcccggcgacatggtcgacgacgtggacctgtggcgcgagatgcaggaccgctacggcgattacttcgacggctgcatgggcgccgaagccatcaagaagcgcctgcagtccctcgacctggagaccatctccaaggaactgcgcgaggagatcaaggacgcttccgaacagcgtaagaccaaggccctgaagcgtctcaaggtcgtcaacgccttcctgaccaccggcaacaagccggaggccatggtgcttgacgtgatcccggtcatcccgccggacctgcgcccgatggtccagctcgacggtggccgctttgccacctccgacctcaacgacctgtatcgccgtgtgatcaaccgtaacaaccgtctgaagcgactgatcgagctcggcgcccctgaaatcatgctcaacaacgagaagcgcatgctccaggaagccgtagactccctgttcgacaacggccgtcgtggtcgcccggtcaccggtgcctccaaccgtccgctgaagtccctgtccgacatgctcaagggtaagcagggtcgtttccgtcagaacctgctcggtaagcgagtcgactactccggccgttccgtgatcgtggtcggcccgtccctgcgcatgcaccagtgcggtctgccgaagccgatggccctcgagctgttcaagccgttcgtcatcaagcgcctcgtggacctgaactacgcgcagaacatgaagtccgccaagcgtctcgtggaccgcggcgacgccgaagtgtggggcgtgctcgaggaggtcatctccgagcaccccgtgctgctcaaccgtgcacctacgctgcaccgtctgggtattcaggcattcgagccgatcctggtggaaggcaaggccatccacctgccgccgctggcctgcgccgccttcaacgccgacttcgatggtgaccagatggcagtccacctgcccctgtccgccgaagcccaggccgaggcccgctcgctgatgatggcttccgacaacatcctgaagccggctgacggtcacaccgtgaccatgccgtcccaggacatgatcctcggtctgtactacctgtccaccgtgctggaaggcgccaagggccagggccgcgtgttctcctcgctggaagaggccgaaatggccctcgaccgccacgagatcgacatgcaggccaaggtgctcatccgcctgcccgagagcttcgtactgccgaagaactgggagcccggcgaggtcaaggtgctcgacccgcgcgaaggtgaggacgaggtcgtcaaggaagagcgcttccacgacggcaccgtgctgttcgccacctcctacggccgcatcctgttcaacgagactctgccgaccgactacccgttcgtcaacgagcaggtggccaagggccgtctgtccaagatcgtcgacgacatcgccatgcgttactccacccagcaggtggccgccacgctggatgccctgaaggatcttggcttcacccgtgcaccgtggtccggcgtgtccttcgcgttctccgacgtgaacgagccgcccgagcgcgacgagaagatcgccgagtacgaggccaaggccgacaaggtcaacgccaactacgagatgggtctgctgaccgaggaagctcgccgtcaggaactcatcgacctgtggaccgagtgcaccgccgaggtgtccaaggaagtcgaggagaagttcgacccgacctccaacctggccatcatcgtgcagtccggtgcacgaggcaacatgatgcagatcaaccagatcgcaggtatgcgaggcctcgtggccaacccgaagggcgagatcattcctcgtcctgtgaagtccaactaccgcgacggcctgtccgtgctggagtacttcatctcccagcacggtgcacgtaagggtctggccgataccgcactgcgtaccgcagaatccggttacctgacccgtcgtctggtcgacgtctcccaggatgtcatcgtgcgcgaagaggactgcggcaccaaggccggtctgcccatccgcgtcgccgagcgcgacaacgacggcaacctggtgctcgtcaaggccgccgacggtggcccgtactcccgtctgctcgccgccgacgtcatcgacccggccgacggaccgaccgtgctgtacaagcgcgacgacgccctgtccatggacgtgctcaacgacctcgtggcccacggcgtcgaggaagtcaagtgccgttccgtgctgacctgcgagtccaagcgcggtgtgtgcgccaagtgctacggctggtccctggccaccaacaagctggtcgatgtcggcgagaccgtcggtatcgtcgccgcccagtccatcggtgagcctggtacccagctgacgctgcgttccttccactccggtggtgtggccgcggcatccgatatcacccagggtcttccccgtgtcaccgagcttttcgaggcccgcaccccgaagggtgaggccccgatcaccgagttcgccggcagcatcaagatcgtggagaacgatcgcggtcgccagatcatcctgaccccggacgccgattccggcgcgccgaaggaagacggcgtgatcaagccgatcacctaccaggtctccaagcgcgtgccgctcaaggttgccgacggcgaccacatcaaggtcggcacccagctggtcgaaggttccgtggaccccaagaagatcctcaccatcctcggcaagcgcgccgcccaggtcaacatcgtggaggaagtgcacaccgtgtaccgctcccagggtgtggatatccacgacaagcacatcgaggtcatcgtgcaccagatgacccgccgcgtgaccatcatcgactccggcgacaccgacctgctgccgggtgagctggtggacaatgcccgcttccgcgagatcaaccgcaacatcgtcaagaacggtggccgtccggccgtcggtcgtccggcgcttatgggcatcaccaaggcgtcgctggccaccgactcctggctgtccgccgcgtccttccaggagaccacccgcgtgctcaccgaagccgcgctctccgagaaggtcgatgacctcaagggcctcaaggagaacgtcatcatcggtaagctcatcccggccggtacgggcctcgcccgctaccgcaacgccgtggtcgagcccgacaaggccatccgcgacaccatctacccgaacttcggtctgggcggcgatggcgatctcggcgacgcgagcttctccgatgccgacctgtccgacctgaacttctcgaatctcgagttcggcgatctgaagctcggcgacgacttcaacccggatgatttctactccgatcagggcggtcagcctgacatcgaggagtaagcgagagggtcctagaaaggatgtcctttctaggacccagatcttgcgttaatcgcaataagatggcccggaactatatcagttccgggccatccgtatatttgccattgtgattttcctgttgaacaagagcaggcagccgctcgttgcttgattactcaggcctgtttttcggtgaactggaagaactgatcaccaatacgcaccgttgaaggtgcactgagcttgagcgttgtgcccttggtgacttgggtctcctggccattggtgatgatgtaggtgccgttcaacgagccgtagtcctcgatccacagcgcgccatcggtgtcgacgctgatggcggcatggttgcgggacgtggtgcgggtcgggtcttcgatatgctccgccttggcaccttgcggcacatccatggaaggcttgcggcccagcaacgtgctcttatcgatcacaatggtctggccggtgacatcgttatgcatcaggtacgtcttcttcggtgccttggacgtgaacgaggaggagagcacggtgccgtcccaatcctcgatgtcgttttcggcggcgtgcggtgtggtgtctgccgaagcggtggcagcgggctcagcggcggcggtagcggcagtggcggcaggctctgccgcaaaagcggtattggccgcggtttccgcagagctgggctgcccatagtcgttctgcggttcggctgtgccaactgcggaatccggggtgccttccaccggatcgtcggaataccaacccagttcaggtgctggagggtagggaagtttggccatgatgatgccgtcctttcactgacgaaaagccagagcggcgttgattgccgggtcgccgagctggcccagccattcgatcagtgccggataggtgttgggattacgtgcgatgcaggcgcgtagttcaggcgcgtactgggcaatctgggcgattagcatctggtcggtggtggtcagggcctgttcggcggtgaagccataaggattggtggccacaggctcctcgaatgccgcctgagctgcgggctgctgggccgcgtactggtcggcagcgggctgggctgcggcgtactggtcggcggcgtaagcgtctgcaggctgctgctcggcagcctgcagggccgcctgttccggagcctcctgatcctgaaccgggccgccgaatgcgtcggcggtgaacccgtactgtgccagggtttcgcgggcacgctcatcgccgaattcggcgatccaacgcttcaagccggggtagcaacgcggatttacggcgacgtttgcgccgaattccggattctcgtaggcgatttttgccaacagaatcgggtccgcgttcggatcctgtacggcagcgaccgcagcatcataatcaaccatgggattacctccttatgctcgctcggttatgccgaacgtatggtccgtagtgtttgcaatgttgcgtcttcaatggcgccaatgtcctcgccctcgtccagtctaaaagcgctgaacgcgtgatgttcgggttcggtcagtggcatatcggccacaatcacagtgatattgtcggttccgcccgcatcgagcgcggccgccaccaaggcgtccacggcttcctgcggactggaatgcgctgcggcgatggccgcaatctgttcgtctgacacttcaccgtgcaatccatccgaacagatgatgaaacggccggtcagatcggcaacatatacgtcgggcactatgccgtccggatcgcccaggcattgggtgatgatgttgcgtggaatggtcgcctccgcctcttccggcagcatctgaccggaatcgatagcctcctggcgttgggaatgatcccgcgtgatgcgggtcagcgaggaggcgtcccacacggggatgatatccgtggcgggggcatcggcatccggcagcgggctgagatggtaggttcgggaatcgccgacattgaccacataggtctggtccgagaaatccggggagtcggcgtcgtcaaacggagctgcgctgtgggcattgatggcatctgcgtaaggctggggcaaaaccaggccggagcaggtcgtaccggccacgccgccgagacggtcacccaaatcaagaatgtcgtgctgagcctgtgccagggtgtcgtcgatgtcatggcgggtgcgcgagggcatggaagccagctgcgcgaaatgctgggcagccaactggcttgcctgctcgccgcctttgccgccgcccatgccgtcgcagaccatgaacacgccctgttgggcgaatccggtgtcttggttgttcttgcgcctaagacccacgtcactggtcatcgcgatacggatggagcctgtggtcatgacgtcttccccttcttacgc

SEQ ID NO: 2550 - DNA, 12523 bp, Unknown
  R50_10m  MAG No. k141_29157
gttatttgcggtcatgccgattccctcctgttccgggtgcgttgtggttgggttgttccggtcgcgcccgaactgctgtgtgaaggcccaaccgttgtattgatgatgacaacgatatcatatgaattacgcatgcaacaatcgatttatcggcgttttgcggtggtaacgtgctcacgcctgcgcgggcgctgctgtcgcggcaggcggcgcggtggtttcgcgcagtattagcggagtgtccggccgtacgaatgccggttcgattgacttgccggcaatggcatccaaaaccatgtgcccggcagtcgctcccattgcgaacgggtcctgatgcagcgtggtcagtcccacggcggcggacagggtggaatcgtcgaagccgatgatggaaatgtcctgaggtacccgccgcccgtattgacgcaggcgatacagcacgggcgcggccatttcatcatcctcaaaacagaaggcggtgatgctgggggaggcgttcagtacggcgttcaatgccgcgttgctttcgccaagaccgcgttgaatgctcaggggcgttagctcgatccccggatgggcggcagcggcatcaatgacgccctgcaaacgagcctcggcactgtagcgcatattggtttcggtcggtgcgctgccgacgaacgcgatatgccggtggccgagtgcaatcaggtgctcgatagccgaacgtgtggcggcgtaatcatcaatgctcacgcctgcgtcgaacccatcggtggaggggatgttgatgccgacaatcggcacgtgcatatgcttcagtcgctccacctcagccggttcgatgtcgaaggagctgacaatcaccgcatccgcattgcgccgcacgggcaaatccgcaaagaagtcgtggcgctcggcggcgttgcgcatggggtagggcacagtgtcgtagccggaggggcgcagcgccgagtcaagaccggcgaagatgttcgaattgaaccaactggcgatggtctcgctggcaagtagtgcgatacggaacgattggccggattttagggcggcggccgagcgtgagactgagtagtcgagcttttcggccgcggccatcactcggtctcgagtctcgggaagcaccagatccggcttggcgaaggtccgggacaccgtggatacggaaacgccggcctcgcgggccactgcctgaatgcttgccttggtcatatgccgtcgctccttcgccgtcgcgaacaatcattgtcatgacaacgataacatgcccataacaagtcgtcgtcttcggctatctcgattacgaggggctgatttagggtgtcccggacatctacttccgtttcaaggggctccttgccggtgaaaccacaagtgcaaacgactttgtgccaacgtcattccgccgttctcgcgctgggtctacttgggcgccagccccttgaagcggaagtggatgtccgggaaaggccaaatcagcccctcgaagccgatttagaccaatttcccattgcggaatcgatcaccgcttctctcggcgcatcacggcggctagggactgcacgcgtggcaggtcgaagacctcgtcggtatgcaccacgtggcctgagctgtccgccagcggcacgcgccagttcgaatactcgctggaagtgcccggctgattctgggaacggcattcgcccacgccgtccaccagcgctgcctgcagcagcagcgacggcgtatcggtgagcatggcgtgcatcgcttccacgatctcctgcacatggccttccacatcatccgccacggtctgcgagatatagccgttctccaccagacggttcatcatggccgtgcgttcggccatcgccgaggcggcgaacgcctccaccggctcgctcaggagatgcagctcctcgcgcagcttgacgtgttcgaagttcaggtagccggcggtgggtggcagatcgtgcgtggtcaccgaggccaatgcctgcttgcggtagtcctcgggtgcgcggtacgggtcgccggcgttcggcgaatcgtccacgcggttgaaccattccacgtcagtgccgagcacgccgtgatcggccagaatgcggcgcacgtaatccggtacggtgcccagatcctcgccaaccaccatgcctccggcgcgcgtggcctcgatggccagtactcccaacatcgcctcgtggttgtacgtcacgtatgcgccgttgcgggcaccgagcccctgcggaatccaccacaggcggaacaggcccagcacatggtcgatgcgcaccgcgcccgcgtgctcgtacatcgaatgcaccatctcgcggtacacctggtagccggtggcctccagatagcgtgggctgaacggcggctggccccaatcctggccctgctggttatagaagtccggcgggcagccgaccgtgacgccgccggaggcgaagcgttccggattggcccaggcatccgcgccgagcccgtgcacgcccacggccatgtcttgcatcagacccagtgtcatgccgtggtccagcgcctcctgctgcgcggcgttcacctgctcggcagcaatccactgcagccagcggttgaactcgaacaggtcgtggtgctcctcgacgagctggcgcacggccgggtcgtcgatggtcttctcgaagaaccaacggttctcgccccacggcgcgccccatacctcgaagcacaggcaccaggtggcgaaggaatcgaggtctgggccggcggtggtcttgaaatgctcgaattcgagctcgcgcttgttgttgcggcccgcgtcgaagatcaggcgcagcgccgggcgtttggccgcccacgccgcgttgatgtccatcgggttcgattcgtcgttgcgtgcggccactgaatcatgcagcgcatccacctgcgctcggatatcggccggcagcgtgccgtattcggggatgtcctgcgggcggatgtacgtcacgttgaggaatcggcgcgattccggtagatacggcgatggctcaagcggcggaatcggcgcgccggcgtgaatcgggttgatgagcatgaagtcggccttggacttgtcggccgcgtccgccagcagcagcttcagatcgccgtaatcgccgatgccccacgattcgcgggaccgcacggaatacatctgcgtcatccagccccaccgctggtgctcggcgaccgcctccggcacgggaatgcgcgcgggggcggcgatgatggccgccttgccctcgcgcccgtccaccgtgacggtcagtgtgtggtagcccatcggcaaatcgggggcgatggtcaagtccggcttgccggaattgaggtgcggcagcagggcaaagtggccaaacgcggtgccgtcctccagttcgatggagacggtgatgtccgcgtccgacgggcaattcagggtcaggcttgtcggcttgccggtggtggccacgatggtgggtggtagcaaacgtttgctgttttcggcctcaagttcggtcatggaacgttttatggcctcgtcgctggatgcgtccacatcgagggccttgagcacggcgaccaaggcctcgtcgctgatttcggtgtaggtgccgagctggtcgatgaacgaggtggaaagcccgcatgctttggccagcttgaccagcggacgggtgagtcgttcagcgctttccgtacgctgcgaggcaccggaagcggcgtcgttggtggtgtctgcgatggtgccggtgctggtcgctgcgtcgttgccgtgcgcgtcggtcatgatgactccttgcttgcagatcgggtactgctagtcgtttgcattgctgttcgagggccgctctgcgttgaggttccggcaatctgacagaccaatgttcgagctgttctgtctttaccgtaactcatattgacaacgattgcaatacattcggtgagttgggcaattagcgggctatccgagcacggcgaacgactgcggggagagcgtcagctgcccgtcgcccacgaccggttcgccgatactaagcagcctagcggcgtcaagtgcaacgtgctctctgatgaagacattgccttcggcgtcggcacgtccagtagttctcccgtaggctgggcttgccgatttgtttattgttcatctgaagttcctttgcgcgttcgctggattactgctgtcaaatgttttgcggccatatcgtaaaggcgatcggaatcctgcactcgcgtgaaggattcggcctcgaaggcctcatcgattgttcctgaagcgaaaggaagaatagtgaagaatcagttgaaggcagtcggtgcggcagttgctgcgcttgccatggtggaggcgctccccggtatggcccttgcgcaggacggcaagggtgttgacgcattgtcccagcacggtggcgcccagcgcattgcgggtgtgtacggtaacgccacggcgaaaaacgttattctcttcatcggcgacggcatgggtgattctgaaatcacggttgcccgtaattacctgcatggtgccaatggttcgttcgatggccttgacaagattggccagccgaatctgaacactgcggaagccggcaccggccagtacaccactttctcgttgggctccagctccagcgatggcaagtatccgaaggcaggcggaattaacgagaacgctggcgtcgtcactcccgtgaccgactcctcggcttctggctccgcttgggctaccggcaccaagacctacaacaacgcggtcgacatcgacatcaacggcaatcctcagctgaaccttatcgagctcgccaaagccaagggtcttgccaccggtaacgtgactacttctgaaattcaggatgccacgccagcggtgctcgagtcgcattctaccgagcgctcgtgctacggaccgcagggcaagaccgacggctcgtccaataacgcggataagcagtgccgcgccgaacagctcaaggagaacggcggcatcggctccatctccgagcagctgctcgacacccgcgctgatgtgaccatcggcggtggctccaagtacttccggcagaccgcacagggtggcgattatgcgggcaagaccctgtgggagcaggccaaggaacgcggcttccagaccgtcgagaacgatgtggacgctttctccgcgttgcggtaccaggagaaccagccggtgctggctctgctgggtgatggcaacctgccgacgcagtacaacccgtccgttgcgaccaagcgggatcccgccaaggatgagaacccggtggagtgcactaccaatgcaaagtggttgggcaacaagaccgctgccggcaattcggcttctttggccgacatgacttcgaaggcactggatctgcttcaggccaacccgaagagccagaacggtttcttcttgcaggttgagggtgcgtccatcgacaagcaggaccacaacggtaacgcttgcggtcagattggcgagaccgatgacctcgacaaggctatctccgctgcactcgagaagattaacctgaatgacacgctggtcatcgtgaccgctgaccatgctcacaccagccagattgtggaatcccagccggcttacgcgctgagcaccgtgctcaagaccaaggacggcagcaatatggtggtctcctacggcacgtctgcgagcaacctgtactccgatggcaatgacaccgaaggcacggcggattcgagcaaggctcagggcaacatgagccacacgggcacccagctgcgcattgcggcttccggccccggcgcatcccgcgttgatggtttgaccgatcagaccgataacttcttcaccattgcccacgcgctgggcctcgcatctgaaaccgccgatcagcaggcgctgtcttcggacgctaaggttgcggtgaagaatgagaacggcaagtttgtcgccgacctcaccggttttaatggtgacgcggtggtctcctacgagctgaaggaccagtccggcaaggtgcttgatgcgtctaattcctccacgcctgtttccggcgtgagggttgccaccggtgaaaccaccgctattgcgctggataaggtagctgagggtggcagctacacgctgaccgttaccggtcgccagtctggcaagactgtgcctctcgatttccagggaccggctcagggctctggcgacaagacccctgatggtgttgtcgctgagggccaggtccagcaggataagaagaacgagggcatcggcaaaaccggtaccgctgtgcttggtgtagtgatgatggcgattgctctgattgccgctggtctgaccatcaagttcgctcgcgaacgtcgctgagtctcgagagcagtcagcgggcggctgtgaatagtctgctcgtctgctgccgtgagttggccgcattccgcacatcgatgcggagtgcggccattttgctgtgtcgattgcagttttctgtaatgattggctgcacctgttgcatagacgataccttcagtatgggtgccgaaagtatcgtcacccatacacgatgaaaggggtctcctatgcatacagtgggacggcaaatacgaagtttcatagttgtcatcgccataattgcgtctatgctggtgaatccaatgacagccaacgccgatgaaacagataccgctggctacgtcttgattggtaacacccgtgtatctcgttcgttgggtgtccagaccgaagaacagttgacggagcggctgcgccaaggctatgtgagcgtgacctttaatcaatatgcccaaccaattgaggttgagccactaaacaatgaacagactattcagccgcgtaatagtacgagagttccttgtcggtcgaacgatgtgtgcttgacgttcgtgaacggctccaatcgtggattctacggttctggtgtgcgtgcaggagcatggagcggtgtgaagaaaagcgacaacgggaaatggttcacccgattccgcgtaagtctcggtggctccacatactctaccggtgtactggggccgtatacgataggtaactggaacactgcagcttctattacgcaggtgacgatttactagcaaatattgctgtcctatgatgagcttgacgattctatcgtcaggctcgtttgttattggaggctcggtgaagaagacgtttggcgtatgcgagacagtagtgctggttgcatttctgttgcttgggatgctgccacagtggaccgcagattattggagcactgatgccgttgcgggctatgtcttggttggtaacacccgtgtatctcgttcgttgggtgtccagaccgaggaacagttgacggagcggctgcgccaaggctatgtgagcgtcacgtttgacgatggactgacagaggtgtcgccgttgtcgtatggggagcagttgcaggccggcaacacggtgtgcccgccgtatttccgctggtggtgcggtatcggttagccggcgttattgattagccaatggtattgaccggcactgaagcgtgcagtacccactgtccgcgttcttcccgcacgttccaatctccgtgcatgttctgcacgcgttcccgataatatgcgagtccggaatgcctcccttcgagggatactccgtcttggcgtggatgatccgttatgtcaatggtgacgcggtcctgagaaacggcaatcagcattacgtagcgctgcgttgagtcggcatacttggcgatattgccgaacaattcccgaagaaaatcggcaataaacactgtatctgagttgttcagcgtatcgatagctccggtgatgatgacgtcaccggcgtaacccatacgctgcaatcgagcgcgatgcttcgcgatgtcgtcagataggtgtcgccgagatgccacagtcacgtcaagagccgactttggaacttgcggcggttcttcctcaagcgtggcgatggcctgtcgggtgtgctgcagcgcatcatcggcaatcgtgcgtagggcctttagctcagcggccgatactgagccaggcgctaagcggtaccggtcaatcagcagcatcatgtcggtgatgtcgttggtggtgtggtcgtgcaagtctcgcgcaatgcgaacattgcgctgccgtgcgcgccgttcatgctcgttaaggctgttgtgcgccgctgaacgtatgcagatgccgatgcaaatcgcggcaatatccaggccagaaaaggtcagcgaaccgccttgtcccatcacaccatacggtgcaataacaccgtagccaatagcgcacaatgcaaataatgtgccgcagaccatgccggctattgcacggaagtagctgattgaagcgatggctacaagcgccagaatatacgacgtaaacggcgtggaaatcggcgcaaacatttcggcggccagtagcgcgagcagcccataagcgccttgctcggggcgcgcggtgaaccagagcgccaacgctgtgcgcaatgcaaacaaggccaatcccagtgcggtgactcctgcgatatgcaatatatacagcccctccgcaaggttgagcagtgcgaacgccgccgccacgcacgacagatacgggtggggaacacggctacagaacattgcgctctcctgcatctggcgacaacagatgattgcgccggcaatactccaacgcctccagccatgtgccgacgtgcagtttgcgcttgatattgcgcctgtgcgacgacactgtattggccgtgatgcccatacgcgcgccgatttgcttggtgctgaggaactccatgctcagggcgatgatattgcgttcgatgtcgcttagtgcaggcgtatctggatcgggtactgccgatgataggtctgatgacgaggccgatggcgagtcagatggcaaagacgctgtggagctcgattgacgcggcgactcggcgtggtgggccgcctctcgtaaggccggtgcaagcgtttcggtgagattcgccttgtccagcagcgtgacgattccggcatctgcagcggcctgccggtacgtctcaagacggtatgacgtgagcccgatcagcgcaatgccgggcgctcgccggtggatttcggtagcaatctgtggcccggtaacgccgtcaagtgccatgtcgatgagcagtacgtcggtatggtggctgacggactgacattccataatcgccaccgccggagaagtagtgctccatacatcaacgatgcggccatggataggggtcgaagacaccagccgagcgatgcaatccagcgcgcaggcgtcgttatccagaatgcctatgcggaaagccgctggtggttcatgtactgattgagtcgcgtccgacatgactccatacagtagccgttccgccctgtcccagtcaccccttgcagttttctgcataggcgggtttggcctcaaacgcaccaatccatcaccctcaatcgcctctccaaaaaacttgagccagacacgctcaactttttgtggggaatttgggaatagaacttgccaaatggaagttgagtgatgtaggctcaaattttggaaggttcaagagacggccaaacggaacttgggcgaagaacgtaagaacaaacgaaaaattaaggagcacacattatggcacgcgcagttggcatcgatcttggtacgaccaattcctgcatcgcgactctcgaaggtggcgagcccaccgtcatcgtcaacgccgaaggcgcccgcaccacgccgtccgtggtggccttctccaagtccggcgagatcctcgtcggcgaagtggccaagcgtcaggccgtgaccaacgttgaccgcaccatctcctccgtcaagcgccacatgggcaccgattggaccgtcgacatcgacggcaagaagtggaccccgcaggagatctccgcgcagatcctgatgaagctgaagagggacgccgaggcatacctcggcgagcccgtcaccgacgccgtcatcacctgcccggcatacttcaacgatgcccagcgtcaggccaccaaggacgccggcaagatcgccggcctgaacgtcctgcgaatcatcaacgagccgaccgcagccgctctggcctacggccttgagaagggcaaggaagacgagcgcatcctggtcttcgacctcggcggcggcaccttcgatgtctccctgctggagatcggcaaggatgacgacggcttctccaccattcaggtccaggccaccaatggcgacaaccacctcggtggcgatgactgggatcagaagatcatcgattggctggtttccgaagtcaagaacaagtacggcgtcgacctgtccaaggacaagattgcgctgcagcgtctgaaggaagccgccgagcaggcgaagaaggagctctcctcctccacctccaccagcatttccatgcagtacctggccatgactcctgacggcaccccggtgcacctggacgagaccctgacccgcgcgcacttcgaggaaatgacctccgacctgctgggccgctgccgcacgccgttcaacaacgtgctgcacgatgccggcatctccgtgagcgacatcgaccacgtggtgctcgtcggtggttccactcgtatgcccgccgtcaaggacctggtcaaggaactcaccggtggtaaggaagcgaaccagtccgtgaacccggatgaggttgtggctgtcggtgccgccgtgcagtccggcgtcatcaagggcgaccgtaaggacgtcctgcttatcgacgtgacccctctgtccctcggtatcgagaccaagggtggcatcatgaccaagctcatcgatcgcaacacggccatcccgaccaagcgctccgaggtcttctccaccgctgaagacaaccagccgtccgtgctgattcaggtctaccagggtgaacgtgagttcgctcgcgacaacaagccgctgggtaccttcgagctgaccggcatcgccccggctccgcgtggcgtcccgcagatcgaggtcaccttcgacatcgacgccaacggcatcgtgcacgtgtccgccaaggacaagggcaccggcaaggagcagtccatgaccatcaccggtggttccggcctgccgaaggacgagatcgaccgcatggtcaaggaagccgaggctcacgaggctgaggataagcagcgcaaggaagatgccgagacccgcaaccaggctgaggccttcgcctactccaccgagaagctcgtcaacgacaacaaggacaagctctccgacgacatcgtcaaggaagtcaccgacaaggtcaacgctctgaaggaagccctgaagggtgacgacaccgagaaggtcaagaccgctcagaccgagctgatgaccgccgcccagaagatcggccaggtcctctacgcccagcagggtgctgagggtgccgcggctggtgccggtgcggctggcgctgacggtgccggcgcttccgctggctccgcctccggttccgacgacgacaccgtcgaggccgaggtcgtggacgacgatgacgacaaggacaacaagtgatgtccgagttcaacaaggacgactacctgaacgacctgccggatccctcagatgctgaggctgccggccaggccgctcaggcctcttcaggggctgacgcctccgccgagtccgactctgcgcaggattcggctgcccaggctccttccaatgaaggagccgacgcggctcctgccgcagctgagggagagaagtcggatgccggagagaagactggcgaaggccagtccgattccgaagacaccctcacccccctcggcaaggccaagaaggaagccgcagactacctcgaagccctgcaacgcgaacgtgcggagttcatcaactaccgcaatcgcacgcagaaggagcaggagcgcttccgccagcacggcatcatcgacgtgctgaccgcgctgctgcccgccctcgacgacatcgaccgcattcgcgaacacagcgagatggacgactcgttcaaggccgttgccgccaagatcgacaaggctttcgagaagttcggcgtcgagaagttcggcgaaaagggcgaggacttcgaccccaccaagcatgaggcaatcctgcacaagccggatgccgatgccgacaaggaaaccgtcgacaccgtggtggaagccggctaccgtatcggcgaccgcgtaatccgcgccgcccgagtagtagtagcctccccgcaaaactgataacggccagctcgttaacgagctgacattaccttggctcccgctggcgggagctggcagccgaaggctgactgagggtggtcaaacattgaatataaaccaccctcagtctcgcttcgttcgacagctcccgatgttttatgcgacgtgcgcaattgcgcactgctatgaacagcccactgggctgttcatccagcgggagccaaccataaagactcttcaagaaaggagacatgaatggctgaaaacgaatggctcagcaaagacttctacaaagtccttggtgtctccaaggacgcttcggacgacgacatcaaaaaggcgtaccgcaagctcgcccgcaagtaccaccctgacgtcaacaagaccaaggaagccga

SEQ ID NO: 2551 - DNA, 9701 bp, Unknown
  R50_10m  MAG No. k141_29160
aggtcgccgccggaatctcgtatcctccgctagcagggctttcgaagaaattcgaaagcccttttcttttgccgaaaacagcttcctttcaacgattccgaacggcttggactgtcggaatagtttccttgtagtgtcttcagagggtgttcggcccgacgatatcggtggcacgttacgtggtgcatccggtaggccaaatcggtgcaccactctatgtctgaagggagccactcatgacattcgatgatcgatcggcgtgccatatgagaacgtctccgtcgattccgacggtgtttacacttttacatcttcctacaccttcttacacttttccttcaggtcgaaaagtgttggaagtattggaattattgggattgaagaccattttcctttacacttttgctcttttcgcgggtctattgcacaagggatcctcaaaatgcgttggaatccttggaatctttgggattcagggatccggaggaatgcgatgagcgggcgccgtaggattcggttcggtcgtgtccagaacctctagggacggaaaacgcaggtatgtggaggcacgctaccagccgccggtatgggcctatgccaaatggcccgatttgccgaagcattattcgagacgattcgacgccgactacaccgcaatggcggaggcctggctcgctgacgttgaacggcatataagactcggcgactgggaaccgcccagaatcgtggtgagcaagacgagggcgacggcgggaacatcatcggggctatcctcgccggccatgacggcagacggtcacgcatctatcacactgcggtccatcctgaagcgcgcggcatgggtgttggctcacttttggccgggcatgcggtcgaggcgcttcgcgcactcgggttgccgaaggttgccgtcggcgtatatgcggacaacaaggccggcaacgacttctgggagcagcagggctttgcaatccgagacgacctggtctatcgcgagctttccttgtaaggtgttcacccgcaatccggcttttgcggtcggtcattcactcgtttcgttgccgcacgcacatttcatgtcgacgatctgttgactctgaatcgtgattcaaatgatccgggccgtatggcctatggattcgatgtcggttcgcttcaatcgcacagacgtctgatgcacacaagtccgcaccggatattgaaacactcagtcttcgatgacgctgggatcggcgccacttttttgcgtggcggccgcttacgaaggtgcatatgccgtcggagacggtagccttcctgccgtatgacttcctcatagatgcaagcagcagaccatgggactacggtctccccggttctgctagatgtatagattgtttttaagaaaacatagaaagtatgggagatataggtaatcgtgacacctcttgtcggcgtgaaggtatggaaaagcgcaagtttccttctggcgggctttgagcggcgaacagagtggtacactcattctgggaattggtagaaagccttgctgttgctgggtttgtgggtttcggtagatagagtctccatgatgtgcgcagacctcatgatgcgacgggctcgcctgttcgggccgctgctcgcctccggctgcgaggtgctgatctcgggggaggggacgcgccgcgtgcgattgttcgacggtgagcgggccttggtcgggaacgccacggccaaacgaagaagggaattcacggagacgcgtcttttggcccacgaggccttacgacgtatcggccatgacgggcccatactcaaaggttcggatggtgaaccgctctggccatccggcatcgtgggatcgctgtcgcattgtccgtcgctgtgcgtcgccgccgtggcgtcggcggaaagaatccgtgccgtgggagtggacgtggacgattcggacggattgtccgacgggatcatgcggttcgtgttctcttccgaagagctcgcatcattgcgtatggcctcctcggtggaacgtagggcggccttctgcgcgaaggaggccgcctcgaaggcgttgtccgcattggacgggacgggggacttccgtaaggtatccgtgagcctgaaggcggatggaacgttcgccgctgtgagacgggatgtggcgtttcgcggccaatggcgattctacgatcggctggtatccgcgatggtcgccgttccctcggagaccgtctgaggggcgcggacccctcgaatgagcagccggagcagaaaggaataggccgcatcgtcatcgtcgacgggcgtatcatgttcgggtcgtgtctcgaattggacgaatccgtgcacggcggaccatatggaccatgcgatgaggtgcgggtcatccctccggatctttcccgcggcctgcccgtagcgcaccagctcggtcatggcggcgaggcatgcctccgaagcctcgcccgcatgccatcgccacaacagggcgtagatgccgggcgacgccttggcgtgcccgcggtatacgactcccgcatcgtagagtctttgcaggggatcctcggtggtgacgcgcaggagcttctcccgtaacgtctggaaactgtcgtcgatgagagcgttgatgacggcctgcttgtcgccgatatgccggtagatgctcgcgggggacacatccgccttttccgagagaagccggatggtgaaggcgtcatagccgtcctcttcgatgattcgtttcgaggcgtcgagtatgaggcccctgatctcggtggtgggcgtccgctggctttttgtcgttttccgaatagtcctcatatgcttctccgcatcatcccgccgttacggatgaaaaacgccatccggcccgtaggtccctgcaccgtcccatgatgggtggggtcgaaggtccagccacgctcttggaccgcgtctcgatgggtgtgatggctggtcccaccgcattgagattgccaccgagccaagacatgtcggggaacgctggccggcgcgggcgtggaacatgccgacgctctggctgccgtgaccggggaagcatgccgcgatgtcaccgatggggttgcgtgtgtcctccgctatcgcgccggccgtcaggagacggtccgtcatatccgtgtccttgatccgtgggatccgtccgtcgtctttcatgatggatgttcctttctattgggggagattgcctgaatcgtgtttgggaagtgcgatccagcagagcagcgcgaacgccaatgcgagggcgcaggcgatccagcatgccgcatgcgtggcgctcatgaaactggtcgagacggactgctccacggtctgtcggatacctgccggcaggtgcggaaggatcgatttcgcggccatcaccgaatcctccgctgctttcgcgatggaagacgggatctgcagtccggacaacgagtccgagagctcgtcggggtagacggaggagatcgcggaccccatgacggcgacgcccagcgtgccgccgatctcacggatcgtgtcgttgacggccgatgcggcgccggtcgagctttccggaacggtgctcatcagggcgtccgtggcgggcccttggatcagggcgatgccggccgccatcagggccatggtgggtacgaccacgaaccagtagctgcaatgggcgtcgacacgcgtgaccacgaacatgctcgccgacaggaacagcagtcccgtcgagacgaccgaccggtatccgaaacgtttcgccaattgcgtggcgagcggggcgaccgccgccatgaccaccgcgaagggcagcgtcgcgaccgccgtctgcaatacggtgtatccacgcaatgcctggaaccattgggtggtgatgaagatgaagccgaacaggcagaagaacgcgacgcagatcgcgcaggtgctgctcgtgaacgtggcccttcggaacaggccgacatcgatgagcggggcgtgcgtatgcccctcgaccgccgcgaacaccgcaagtatgatcagggccgcgcagatgccgcctatgacctgccaggagaaccagccgtaagtcgggcgttcgatgatcgtccacaccagcaggcccacgccggccaccgataacacggtgccggggaaatcgaacctctcggaacggtacgcccgtacctcgggcaccgccaccgcgatgcaggccagcgccaccacgccgatgacggagcacacccagaaaatggaattccacgcatagtgctccagcaggacgccgccgatgatcgggcccagggcgatgccgacccctgatgtcgccgcccacaggccaacggccaggctacggtacctggagccttcgaagatgacgatgattgatgacagcgtcgccggatagatcagcgcggcgcagacccccaacaccacgcgcagcgtcaccagctgccacagggcccaggagaaggccgtggctgcggagaccacggcgaatcccgccaatccgacgagcagcatccgtcttcttccccatcggtcgctgagtttgccggcgggcaggagcagcgccgcgaaggacagcgtgtaggcgtccaccacccattgcaggtccgtggacgaggcgttcaacgcgtcgctcatcgtgggaatcgcgacgttgacgatggtgttgtccatcacgaccagcagcaccgccagacacagggcggtgagggccagccccctgttcccggaccgtgcgtgtctccggaccggcatgggggtgggaatcaacgaacgttcagattgcatatcaatgctctcctactgtgtaacaatgttatctacaaatgaaacaatactcctctccgtgggggatcgccaccatccgtcaacgaggcatggaagtgctccgcgtgcggacggacccaccgtcggcgccatgaaccatgccgccgcccgtggcgcgggaacgggaaggccatgcggcgtcgcccggggtccgcaaaccccatggcatgttccgggcccgggaatgccacggccgatgggtcctccaaaatcagcgccgtccgcttccgggcggagagttcgtgcggtcgctttgatgacacggccgccgtcccgtcgggactttcggcatcacccgattaccggtccaaccctcacggcgggaccatgacccgtcgaacttcaatgaggaaagcgccggccgaccctttgccggaaaacgcgaaccgtcggcatgccccgctgaagcgacgccgacgatggtttcggatggtgggcggtcccgatcgcccgatccttctcgatccaccgcccggcgatcgccgaacgcccgtggcggctcacgatggttgcaggcccatgcccatccaaggcgttggccgcatcctgcaaaaaaccgggtccatcgtacgcccgaacatgcgaatctccgtacgccggcgtggatatcccgcataggcgggatatccgtcggggagattccactgacagcgtgaccagtcactcatgcgccggcgggagacgctaccatgaagacgcgaatcatgtgagtcatcacgcaaaggagcatgacgtgaactatctggaacatcgccgacagcacaaggacgcgctatgggaacagctacgggaaccacatcaagccccacataggaagcgtaccgataaagcggctgacggcatcgcaggtgcaggccgcgttcaagtcgtacataattcctgaagcggaatagccacatcgcacactggttttctctgaattccgagattctttctctgaattcagagataaatctcgggattcagagaaaaccgttcaagaatgatctgcgtatctcattcaacgtactgccgcataccgcacgttgcgtccactgccgaccttcttagcgcgtccttcaaggactagttttcgcaactggtagtacgcctgattcccctcaagatgcagcaattccatcacatcgtttttgctcactgatttctgttcatgcattaacttgatgatcagttcgggataccgtaccctatcgatgtctgattggcgaacgtaatccatcgccctaccgctgcgccgatacactttcgcacccaacatatacgtgcggcgagctccaacgccagcgctttcaacaagccccgcctccgtcagctgccccaatacggtgcgcagacgctggtcactcatgtccagggagcccgacaacacatcaaagccacaacgacgttcactcttgagcttgtccaaaataagcagaccatcgagagacatggacttgccgctgcgctcacgttcctcggccagcagctccacaaacgccttgtcgggcacactacgaggcaacagcaccgacactccacgcctgttggacctcgaataatcaggcagaggacgaccatagttcaaagcaccctcgaatatacggtcgatgccgcgccccgtacgttcggcgagaccggttcgcttcaacgcatccatcaggcagggattgcgaccatgcggttcggcggtaagcagattatggatgttgatgccctccacgaacccgtcgggattggcgatggtaagccccgcatcatccaactgcacgcgcacacgtcccagcagggtgtagtcacgatggccgaaggcgttcaccagcgcctctcggaacgcccgatggtcgaattccggcaccatcattgagaacagaccgacggatagctcgacgcttggattccaaggagagaacatgtcgttgatttgctcgatggtcttcagcaatggtccggcatagtcttggttgactttgatatccgtaccagacatgacttggaaagacgcccgatgagtcggaacgaagcgtttcagagactcccccttgcccagcagcagcaaaccggtcagcgtcggcatggtcttgccatcgacggtcaccgtcaattgcagggatttctccagctcctcatcggtcagttccaacaaattacggtcactggattggtaggtgccgataatccggcgcagacggtcgcgttcaaggggatcgaaatcatcacgggtcgcatccggcaccggctgcgcggaaaagtccaaacgtcccaaatcggacaggcgcgtggcgatctcgtacgggtacatcggcacgctctccggcgtaccatccaccttcatacggcgtcgcaacaccttgcccgacttggtcgagaccacgctgcgggatttcggcacatcgatctgcatcaccggcgtcttctccgtcccgacgatctgcgcacgagcggaaaccggaggaaccgtacgggagtagggagtagagtggcggcgtcgaccgacgcatgttctcgccataatttcaatcccgaaaaggagcctcgtcgcaaccatgacatcacatcttgccgaagcaggacgcacgttggttccccgcaaggaagacagatacggtctgctctcccccgccttggtggtgctgacgttcgtcgccgggctggtggacgcgctgagctacctgtcgctggggcatgtgtttgtggccaacgtgaccggcaacatcgtgtttcttgggttttcgatcgcccatgcccaaggcttcgtctggtggacgtcggcgctgacgctcgtctccttcatggtcggcgcgcttatcggcgggcgcatcatccggcgattcgaggagaaccgggtcaagcatctgttggtttctacctgcgtgcaggcgtcgttcgtactcgccgcgctaatcggcgtctatcttttgaaccagctcatcaccggccccgcagacgatgcgtccggcgtctcctcgattgcacggcttgcacagaccacccaggcctcacaggcctcacagccgagcctgaacttccccaccgcacggcacatcgacctgcacatcatcctgctgatcgtgctgctcgccccggcaatgggcatccagaactccaccgcccgcaagctgtcggtgccggacctgcccaccaccgtgctcacgatgacgctgaccggcgtcgtcgcagacgcttcggcacacggccaccagcagtcgaagctcgggcggcgtgcggtcgtaatgctggcgctggcgtctggcgcgctgaccggcgcgcttctgcaggcgcacggacacgagaacatcatcttgatggtgatgctcgggtgtctgctggcggtcatcgcgatgatgattccgcacgtccattcggatgcgccgtgggtcaccggccggcaatagcctctggcgcatactttcgccatatgagacaaaaacggccacgccacagcgcaaccagtaggaaacgcccggcaatctcggctctcctcgatatgttggatacccgttgtttgaaacaggccctccgcaagatacaaacaggggcagtgagaaggagaggtaaatatgactgacgcacagcaggcgaacggcaaccagcccgaatcccagaaccaagcagaagcgacggcacagccgcacaacaagcgagtgacgaagtgggtcgctatagtgattgccatcgtggcggtggcgattatcgccgcggtcgcggtgttcggcacccgcgcatacagcgcgtctcagtacgatagtgcagtggccgcctgcgccgccgcctcggaagacgtacgtaacgccaccaacgactacaacaacttggtcaatggcgatgctgcagaagccgccgctctggccaaggcagacgtctcggacgcctccgctctcgacgcgctgtccaaggaactgaccgtggaactgccgacgtacgaaggctgcgtggccgacgacaccaagggctaccaggccgcgaccaagaaactcgaacagcaggtcacgtggtaccacgagcacaccacgtcgctgcagaaggctgttgacgccgtcaacgcggtcaagaagtaagacgaggtcggtctccctcacgttttcaggatcggacagcgctcaagtcgcggcaacgcgcgatgtcggccggtcctgcacggcccgaaacggcagaaatcccgcgccccttacgttcggacgcgggatttctgccgtttttgagtcacggattgggactatagcccagtctttgccccagagttgtctattcaggattaccctctcggccgtatctcatgagcaggacgtgtaaaaacaaaaaaccctcgctaatccgcgagggttattggctggggtgcctggactcgaaccaagaatggctgaaccagaatcagctgtgttgccaattacaccacaccccaatttggcttggcgcagcaactccgaagagttgttcgtcgtacccccaaccggatttgaaccggtgttggcgccgtgagagggcgtagtcctagaccgctagacgatgggggcatattcagtttttcaaccggctacgtggcgaaccgcgcaacaggtagatatattacgcgctaccctgctctcacgcaaatcccggcgtgtcgcgccattttccgccgttctgcgggaacaccccatgcaacgcgaaagcgggcatccgtatgtacggatgcccgccatgcgtcacgctcccatcatccgccggcgtgcggtggacgacgcatcacagatgcgcccgcaggcccttgagacgggcgacggtgatcggcttgccgacgatctccatcgattcgaacagcggcggggagacgcggcggccggacatggccacgcgcaccgggccgaaagcgaggcgcggcttgtagccgccctcctcaaccagagccttgttcagggtctcatgcaggttgtcggtcttccagtcagcttcatccacagcctcaa

SEQ ID NO: 2552 - DNA, 5703 bp, Unknown
  R50_10m  MAG No. k141_29264
gcaacaagcaccgcgaccatggcaatgcccaaagtacgggcgagcgggagccgggccttggcttcgttctcccccgttgccgaatgtgacattgcgccgacattctttgacggcacctacttctcctctacaccggacggcagctccacacataacgacaccacgaacatacgtccattgatgggccattctgtgccgaagtggcgatatctctataacacgaccttggtcgtgcttgatctgctgatgaccattgtggccacgtacatcgtgttcctgctccgacctttcgcttatacctatgtgcagagcattggtcccggcgaatacggcgtttttagcttcctgctgttgacctgcgtatcgtggctcatcagtctgtattccgcacgctcctatgaacggcacaccatgggtgagggctatgccctgtacgccaagctgttgaacgctgcgttcatcgatttcattatgctgtgcacgttggggtacctgttccacctcaatcttccccggtcgttgaatgtgttcattccgctggtttcactggtattggttattatcgagcgttggattatgcgccgcgcgctgcaccgcaaccgcatgaatggcgaattcaactacccgactgtggttattgggtctccggaaggtatccaccggacggtcgaacaattgcgccagtgccgtggcctcggctacgcgccaattgcggtgtgcccagtggcttcagtcaagaacgaggatgacccggattcggcgcagcatttggtgtcggtgcccttcactcctgccaacgatgctgaggcacgactgaaggtgttgccactcaactcgcatttgccgcaaaccgcgaagcgtatgaaggcacgtaccgtattggtagctgatgtacttacccgtgattctgagaccatgcgtacattgtccctggccgtggaatccatgggcattgaattggccctcactacctctgtggctgatttgagcggcgctgacctgcatttccgcaacgatccgacgatgccagtagtcactgcacgactgacgcagtactcaaccgttacccgcatcctcaagcgtgtgtgcgatatcgtgctttccggtatcgccattatcttgagctcgcccatcatgctatgggtggcatacaaggtcaagcgggaagacggcggccctgtgttctattcgcagacgcgcatcggcatttacggcaagccgtttaccatgtacaagttccgttccatgcgcactgatgccgacgagatcaaggcgaaactggctaaggaacgcggcattgaggatcgttttatcttcaagctcaaggacgatccacgcgtgactaagatcggtcactttattcgtaaaacatcactggatgagttcccgcagttctttaacgtgttcaagggcgatatgagcttggttgggcctcgcccgccgctgcctgaagaagtcgcgcgatatgacatgctgtattccacgagactgctggttaagcctggtattactggaccgtggcagatttccggacgcagcgatttgactcaggaacagtcagagtatgcggatgtgtcgtatattcaggactggtctattacgggagacatcgtgattctgttgaagactgtggtggcagtgtttaaggggactggatcgtactgagttttctttgggaatgttgaaatgttgagagggcgtcagcttcttgctgacgcccttcttttgtctctccctcagagcccgtggctgacgtcctcgtcagagggaacttttactgcttgttgatggagcagacggcggtgtcggtggtgacgccggaatcggtccagcccataggagtttggtcgatggtgaggccggagacagccttggtggatgtggccacgtcgaaggaataggtgacggattcgccgggcgctatcgtggcgatgctcgcatacacggttttaccattcagtgtttcttgacgactccccgtcactgaaccaccactggtcttaagatttgagatagagcccccggtgggcgcataaatcaaagttttttccacaccttgtccgccggatccaagaatatagctcgttagagcaccaatctggctgttctcaagtgtatttgtcatcttatattccacatgataggtctgggaaccatcattaccacaggtggaacgagtcaccttcgaagtacgatgaatataccatcccatctttgacggattctgctcagtcacatacactcccatctgcggatgctcttcactgctcggagtctgtgcagtaaagcctgcatcactaatggtcttttcagcagtttcgtcgaatgcgtacatggagaagtgacggccttcggccatgctgcccatgagctgggcgaccttggtgagtttagatgctcctatacattgtcaagcgtttgggtgtgtggttttgggttggttgtcgagtgtatccactggatggcccgttgctcgagttcgggaaggtcgcgtgcgccgcgttcgatctcgctgatgcggctcgagggcacgcagagcgcctcgccgatctgttgctgggtgatgttccggctgacgcgtagttcgcgcagcttggcgccgcgttcggccggggtcccgcgtccgacctcgccgttgcgtatgctgatgagcgcccggtatgcctcgcgggcgatgaaccgtttgacgcagcggatgatctcgagcttgcctttgccctcgcgggtctttttggccatgtagtcgcgggtcggcttgtggtatcgcaggcggacgatggcgatgcggtgcaatgccatattgccctgccggttgccgcctttgttgagcctgtgtcggttggtcctgccgctggacgcggggatggggcagacgccgcagagtttggcgaacgcggcctcgcttcggatgcgttcggggttgtccccggcgacgatggccagggtcgcggcgatgacggcgcccgcgcagtacatgtcgagcagcggcctggcgtgttcctcgaggatcaggcgcatgcgttcctccaggagaccggcctgccgtttgagcgccttccatgccttggcggcggatttcagcgcggccagcacgctccgctcgaccaggccgccggccggtctgcattcggcgagcctgttcatgcgggtctcgctcctcaacccccggtaacgttccctgatgggttccggggcggtgacgagcagcccgttcgtcgaattggagatcgcggtcatcgccgacaccagttgggatcgctgcgcgttgaggtggcgcagtgcctcgacccagccgtccgagcttttcggcaggctcgtgccgtcgccggccatgacgctacgggcagcggcgaccgcgtcgaggggatcggacttgccgtccctgcggcgcacgcttcgcctggggcgcagcacctcgcgcacctcgtatccggcggcagtgagacgacgggccagggccgctccgaacgagttcgtgccctccacgcccacggccgcgaccctgcccggcccgggcagcatgccgatcagcctgtcgtatccgtccgggtccgccgtgaacgtctcggcgcccagcggcctgccccgctcgtcgagcaatgcgatggtgtgcgtgtccgtgtgggtgtcgatcccggcccacaccacttcgttcggcggcgtcatcgttgtcgttcctttccatgtgttcggatgcctcccgggggcttgcggcgcagacaggacgttgacggggcacgctaccatggttcttgcgggatccgacgggagcggccacgctcctatgaggtcatgcatccatggcccacgggtcggcggccatgggcgggacaaatcaaaataaggacagccaccggaaccgatggcgtcagtcaaatgtggggtcaccgcccaagccgtcatccaccattatcaccgattagaaaccggcataaccattatcaacgtcaaatcaacattgctgaacatactaccgactgtttgttctgcgacttgagcaaatagggcgtcctgcatggagactgggtaatcgacatacaccttgttcaacaaaaactcagcagtgttatctcccgtaagcaccgttccatcaggaaatagtgacattaccactgattttcgtaagttcctgcaaaaatacaggatcaaccatgagcacgccgtccagctgagtattgctcccccacggcgtgcgctgccaaatcgcgcgcataccttcggcactgcgtgaagtatcagggtatacggccaaatctcgtatatcgaacgacatgttcaatggtccccactgccggaagatgcgctgctcgtcttccgtaggatcaccagcaccatatggaatatattcaccattcgaacggaaatcgccaatattgattttgccgttgtcagtagtcaccacacctacggaaccgatcagaccaccggacgaacgttcctccgaagtggtcatagccatcaacgcatacgtgcgcggctgatcggaaccgaggaagttcggcagaatctggaacgtgccggatagctgattgaccttgtccgccatcttggtcagctgcgtattgccggcggcataggcgttcttcaccatgccgatatgggccttcggcagctgctgatacttctgcacctgctgctgcagtgactggttcgcggtggcaatattcttctgggcttccagaatcggctgcagattcagctgaccgtcgcctgagctgagctgtgcgctcttcagcgtggaaagcacgtccatgaactgcggcaccgaatcactgaccagcgaatcccccaccgaagtcataccctgcactatggtgatgtcaccgccgtacaccggcgccttcgaggcgatgttccacagcgtgccgtgcgcaatctcgttcgcagccgcggtctcggtctttgcctggctgatctgctggctcaccgtatcgaggttgtcgaggtactgaggtcggttacaccgcccagcagctgcatcgcctgttcctcatgcgcctttacctgcttggcttcggaatacagcttcaaaccgaagaatccgctcacgcctagcagcaccacaagtagcgccagaatcaacaccactcacggccagatgcggtgccttctgcgtggaatacttgttgcgtgacttgccctatgaacgctcatactaacttccaaactggtcttattgacttgcaacctcttgcaataaccaaccgcctattatgccccggtcttgtgcacaaagcgtgttcgtcccccgcttctgcacatattccgaaccgactggaccacccctgggtatagcgtattggggtgctttgagaggctgctcggccaagcacgcgaagacgacggtcgccgaatacatcgaatacgcattgatatgcgaggcgcatatatcactgaacagatacgccaccgacaccgccaaggcaacaggccgggcaacagaagtgggggagtgcgtgaacggagctcagggaatcaagaatcgtcgcggcgaattgcagcgggtgctcagtcgcgaagaatcgtatgtggatggcaaactgagccgcgcggcatttatctccatcgcaatcctgacctttattaccttcgtgggtaacttcacgcagctgcagctgagttccgcgctgccgattatcgtttccgaattccacatctccgtaaccaccgggcagtggctcacctccgtgttccagctggtca

SEQ ID NO: 2553 - DNA, 4756 bp, Unknown
  R50_10m  MAG No. k141_29515
aggtcctggcgaaactatcccgattcgccacggcccaggaaatcaccgacatcctgcgcgagcgcggcacgcgcatcggcacggccaccgcctaccgcaatgtgcagatgatggcctcccaaggcgagctcgacgtaatccacgtcaacggcgaggccctctaccgcgagtgctcggaccagcatcaccaccatcacatcgtatgccacgaatgcgggcggaccatcgaaatcgagattcccggacttgagcagtggatcgacaaagccaccaagcagttgaagtaccagaccatcgcccacgaactggagattttcgacctgtgccccaagtgtgcggcgaagcatgccatcgaaccgcctctcagcgtcggcacctcaccaaaggatggaccactgacgacgccagacgatactggccgtcggcgctcgaacaaataatggcgcagtcccgacgctactggccttcagcatcggtgcccttccaatccttggcgcaatagcgacgatataagctccactcgcatcgttagattgccaacgcttggcgcagcaccgacgccagacacgctcatcgtcgtcgttccaccaatatttggattggtaccgccaccacctataccaggcgtcgacactcggccaacaatcggcccgttaccgacacaaaactgcatgaggtctcattgctcttaatagcagcgatgggcctgataatcactttcaccaactttcgccgctgccgtctgccgccctacagtcgcagacgaacaaacgctgaaaggaacaacaatgactatcaagaccatcgatgagcatgcttacgagatcgttaccgaagagggcaccttcgccgtctgcaaggacacgctggccaagttcgacgccaccaagcacgagcacggcgtggccgcctgtggccgctgcggctgctgcttcaccggcgactgctgcgacgacaccggctgcgagcacaaccacaccgaagagtgcgggggcaaggcttgcctgcacgcttgccacgagaaccgcgaaggccacgagtgcgccttctgccaccttgccttcgacaccaacgagaagtgccacgatgagatcctggccgacctcaaggaactcaaggccgagctggctgtctgagttttaggtttccgatttctcctgcggattgactcctctcagggaggggagccagattccgacacgaaccaccgcgcttaccgtatgatgtctacgggcgcggtggttttgtttttctcgatgatggcgcagatttgctcgggcgcctccttgcagccgcgccggacccatagccagataatcgatgagacggcggagaccagaatttccagcgcataggcgcgcggaatgccgccgtagctcagctcggcacccacacgggccgcctgcccaagcagcatctgcttcaacacatccttgacccggtcatacatctgcatatcgttgcccgaacgggacagtgcgtcgaagaacgcatactcacgcttgacatagcgcaacgcctcggcttcgtgttccagtcctacaatctggtggccaacctcacggccaaggagaacgtggagctcgcctccgaaatcatgaaagacgcgcaggaaccgacccaagcgcttatcgacgtggggcttcaggaccgtatcaacaacttccccgcgcagctttcggcccggacatgcaaataaccggcaccgacttctttaatcagaacaatctcgctgacataaccgtcatcagcgattatggcctgaccaaagctgacgaaaacattattcgcagcgcgccgaagtggccaaggcgatgaggggcgggtccgtctccgagtccgcgccgatctactacgaggagatgtcgaaagtggccggcaaggagaacgacaaacagtcgattaccctgatcgccactgatgacgcctacaatttcggcgactacatcaccctgcgttcgcgcaccgggcacaagccgcaggtgctcaccgaccgtggtgcgatcatctccgaacgtatggcggggatgatggacgccaaggtaggcgacacgattaccgtcaccgattcgagcggtaccgagcgcaaggtgcgcgtggacggcatcaccgaaatgcatatcgggcatttcatgttcatgacttcgggtggctataagcgcatgtccggcgaacagtaccagtcgaacgcctatatggtgaggctcaagaaccatgagacctccaatgtggagtcgcgtagcgccaagctcataaagttggacggcgcgaagggcattgtgcagaacacgacttcgaagaaacaggtggccacaatcgtcgacttgccggatcagatcatggaagtgctgattctcgcggctgagctgctggccgtggtgatcctctacaatctgacgaatctcaacgtctccgaacgtatccgcgaactgccgaccatcaaggtgctcggcggactcggcgtgctggtctaccggcggttgaagacggtcgacatgctcggcgccctgaagtcggtggaatagcagcggaataacaaatgggatcggctttgaagccgatcccattcaattattcgctcactgctttctgagccttctgcgctttctgctccttttggcaatcagggcatagtccgaagacctccagggtgtgggattcgacggtgaagccgtggccgtcggccactttgcgcagccaagcctcgctgggcggatcgatttccacggttttgccgcaccgcttgcacaccaagtggtggtgatgtccgtcgtcgccgcataggcggaacagctgctggccgtccaggcggatcgtgtcggcggcaccggcatcggccaaggcgttgagctggcggtacacggtggccaagccgattttcgagccttcgtcctccagcctgcggtgcaggtcctgagcggagatgaactcctcacagtcggccaaggcggcgcgaatcgcgtccttctgcttggtctggcgttcgatatgttcaaccatcgataaggtcacgccttctttttcaggtcgtcccagcagccggtggcctcaaggtcagcaaccgtggcatcagggttgtcggtgagcacggtgatgtggcccatcttgcggtcgtggcgcacttcggccttgccgtagtcgtgcacattccactccgggtgggtggcgatcagcgcgcgcgtcggctccacatgctggccgagtacgttgaccatcacggccggcgagagcagcttgggcttgggcatgggccagccggcgatgccgcggatgtgggcgtcgaactggtccatcgagcaggcctcgatggtgtagtggccggagttgtgcgggcgcggggcgagctcgttgacgatgacctgatcgtccttggtgatgaacagttcgatggccagcgtgccagccagttcgaagcccttggccaagcgaatcgccagttcatgcgcttcgcgagccacatgttcggacacttcggcgggggcgatggtcatgtgcaggatgttgttgcggtgctcgttacgcacgatggggaaggtgacgaagtccttgccgttgccggagaccaggatcgaagcctcgaatgcgaagtcgacgaagccttccaagatgctcggcgggaagccgccaccacggtcggaacgggagcggatcttctccaagtcggcgtcggaacgcagcacgagctgaccgtggccgtcgtagccgccggacacggtcttcagcacggccggataatgaatatcatccaatgcggcgtcaagctcatcgaagttgttgacggcgcgccacggtgcggtggcggtgccgtggtcgttgatgaaccgcttctcatgcacgcggtgctgggtcacgcgcagcaggtcggtgccctgcggggtggcggtgatgccgcgcacctcgtcgatggcatcggcgtccacgttctcgaactcgtaggtgagcacgtcggactgcacggccagatcatggatggcggttttgtcatcgtattcggcggtgatctggaagtcggccacctgaccggtcgggcagttcggcgtcgggtcaagcacgccgacgcggaagcccatgtagcgggcggacaaagccatcatgcggccgagctggccgccgccgatgatgccgatggtcgatcccggcatcagcatcgaaacacgaccgcctgtttcctcagacaagctgggcattggattcagccaccttttctttcagttcgttacggtaatcctcaagcttgtcggccagttcgggctcgaaggcggagagcatctgcacggcgagcaggccggcgttggtggcaccggagttgccgacggcggtggtggccaccggaatgccgccgggcatctgcacgatggacagcagcgaatcccagccggacagggcgtgggagcgcacgggcacgccgattacgggcagtgtggtctgcgcggcgatcatgcccggcaggtgggcggcaccgccggcaccggcgataatgaccttcaggccattggcgcgggcgttgtgcgcgaactcggccatgagctcgggcgtgcggtgcgcggagatgacctgcttgtggtaggcgacgccgaactggtcgagaatatcgcaggcgcgcttcatggtctcccagtcgctggccgatcccatgaccactgcgacttcgggcttggattcatttgccattatcatttactccctagttattgagaataaggcccactgtacgcttgggcgctttcttcggcaacgccttgcggttttccccggg

SEQ ID NO: 2554 - DNA, 12147 bp, Unknown
  R50_10m  MAG No. k141_29712
aatttcttgggagttgttcccatgcgcgttgatcatacctagttcggcgttggtttctccaagttcggcgttggcctgtccatcagctgaggcagaggcaatggcttcggacttgcccccgctggcgggggctgtcagcgaagccgactgggggtggtcagcctcggtcaccgcgttgtagtgggagtgggcacctggccctagaccggcccaatcgacgttgcgccaatagccgaggttgtgctggctctcgtatccggggcgggcccagttggagacctcataccattcgaggccggcggcggcgaacaggtcgtcggcgatttcgtatttggctgcttcgtcatcgtcattgggtttgggcagagtgccggccgcgatttgacgacccattttcgtggtgggttccacggtcagtgcgtaggcggagatgtggttcacgccgaggtcgatggcggtcgtgaccgaggtgcgccaatcgtcaaggctctcccccggtgcgccgtaaatcagatccacgctggagcgcaggccggccttattggcggcattaacgcctgcggccacgttggccggcgtatgcgtgcggtcgagggttttgagcacgtgcggcacggcagattgcatgccgaaggaaacgcgggtgaagccgccggcagcgagctcattgatgtaatattcgttgaccgtgtccgggttggcttcggtggtgatttcggcgtcgggcgcgatgctccagatcctgcggatggcatcgagcatggcgaccagatcgcgggcggcgagaatcgtgggtgtaccacccccgaagaacacggtggagaccggtggctcctcgatgccgtggtcgagctgccactgcttggtcagggccatttcacgaatgaccatattggcatagttgccgcgcgaggcccccgcaccaagatccgtagccgtgtaggtgttgaagtcgcagtaaccgcagcgccgcaagcagaacgggacgtggatgtagacctcgaacactagccctcggtcttctgagcggcgcggatcttgtctttggtgtcgcggtcgttggagtcctcgccggtggacagggcggcgatgaacgcctcctgcggtacctccacatggccgagcatcttcatacgcttcttgccggccttctgcttttcgagcagcttacgcttacgggtgatgtcgccgccatagcacttggcgagcacgtccttgcgcaacgcacgaatgttctcacgcgcgatgatacgcgaaccgattgcggcctgaatcggaatctcaaactgttggcgaggaatcagactacgcaatttcttggtcatcatcacaccgtacgaatacgccttatcgcggtgaacgatggcgctgaacgcatcgaccttctcgccctgaataaggatgtccaccttgaccaaatcggcggactgctcgccatcctcatggtaatcgagggaagcgtagcccttggtgcgggacttgagctggtcgaagaagtcgaacacgatttcggccagcggaatgcggtagtgcatctcgacacgatcggtggagatgtactccatcgtgcccataatgccgcgatggtcctggcacagatccatcaccgcaccgataaattccttgggtgtgatgatgtcggcggcaaccatcggctcgacgatcttcttgatcttgccgtccgggaattcgctcgggttggtcacatgatgctggctgccatcctcggcggtcacgtcgtaggtgacgttcggggcggtctggataaggtcgaggccgaactcgcgggagagtcgctcgttgacgatctccatgtgcagcagacccaggaagccgcagcggaagccgaaacccagagccacggaggtttccggcgtgtagatcagggcggcgtcgttgagcttgagcttgtcgagcgcgtcgcgcagttcggggaactgggcgttgtcgatcgggaacaaaccggcgtagaccatcggcttggggtcgcggtagccgggcagcggctcggtggccgggcggacggccgaggtcagggtgtcgcccaccttggactgactcacatcctttgcgccagtaatgatgtagccgacttcgccggcgccaagtgccttggtacgggtcatatcggggctgatcacaccgatctcgatgggatcgtgggtcatgccaatgcccatcatgtggaccttttcgcggtcgtgcagttcgccgtcctccatacggatgtaggtgacgatgccgcggtagggatcgtagacggagtcgaagatcagcgcgcgggcaggggcctcggggtcgccgtgcggggcgggcacgtccatgacgatctggtcgagcaggtcggccacgccttcgccggttttgccggagacgcgcagcacgtcgctcggctcgcagccgatcagacctgcgatctcctcggcatgcttgtccggctcggcggacggcaggtcgatcttgttgagcacgggaatgatggccagatcatggtcgatggccatgtacaggttagacagggtctgcgcctcgatgccctgggtagcgtcgacgagcagcaccgcgccttcgcaggcggccagtgcgcgggacacctcataggtgaagtccacgtggccgggggtgtcgatcataccgagcgtgtattcggtgccgtcaaaggtccatggcacgcgcacggcctgggatttgatggtgatgccgcgctcctgctcgatatccatacggtcgaggaagcgatcgcgcatctcgcgctcgggcacaatgccgcttaactgcaggatgcggtcggccacggtcgacttgccgtggtcgatgtgcgcgatgatacagaagttgcgaatcaccgactgatccgtggaacccggctgattgtgttggacgaccaacgcattcctcctcttggcatatactcaaacttcacctagtgtagccgagggactgtattcggcgtggcattgcgcgggtttttccggggctcatgctatcctctaccttttgtatgtccttataacacacatcgtttggagtaaacgtggcaaacattaagtcgcagaagaagcgcgtgctcaccaatgagaaggcgcaccttcgcaacgtggctgtgaagtccggcctgaagaccgccatccgcgccacccgcgaagccatcgccgccggtgacaaggctgccgccgaggccgcctacaaggttgccgcccagaagctcgacaaggctgctggcgctggcgtgatccacaagaaccaggccgccaaccgcaagtccggcctcgctgttgcgatcaacgctctgtgagcataagcctcttaaggttttagcaagtcccgcaagtcatctggcttgcgggactttttatatctccgttcaaagaggtacattggcggtcttgcgaaatgacatctccgttcagaaaggtaccgaatccgagaaagcccaagtataaacgccgtcattgcaacgcttatactcgacgtttcgtgcttcaggtacctctttgaaagcagttgtcattttgcagaaggccaaatgtacctctttgaaggcagttagccctgaggcggtcttgaatcatcctgaggcttgtcttcttcgtccttggtggtatcggcgtgcggatggatgaccgggcgcttgagatatcggctttcgctgggcaggtagacgcgatgacgctcgacggctccgggcaaggtgacgttgaagccgaccgagagcaggcgcagcgccaccacgatgatgacgatcagcacgtcgagcagcatttccgagcacatgtcgaaccaaccgtagtgcacaccacgccatacaagcacggtcagaatgcaaccgatgaacgagggcacggcatagaggtgtttgtctcgaataatcattggcacatcgccgatgaagatgtcacgaatgaggccgccggccagtgctgtgaacatgccaaggaatacggctgtcatgcctgaggaaccgtaggccagagcctttgcggtgccgctgactgcgaatagtccgaggcccagagcatcgatgacagtcatcgtccatttgagtttggtgatctccgggtgggccaccaccacgataatgccggaaaacagcgtggtgagcacatagcctttgtcggtgatgccgaccggcggcagggcaccgagcatcacgtcgcgcacaagaccgccgccgagtgcggtaagccatccgcacagcatgatggtgaagatgtcgtagcccttgcgaatggcggcaagtccgcccgacaatccccaacacaggattgctaaatactcgatgaccacaaaaacgatgttgttctccaacaccacctgcatgagccgctcccctctggtaccgcttcggttcgtctcagtccgtcttcgttttctgttcccgttcatccttattcggcgctacagcccgtcgtacccgagcctacaacaggccttgcctgacgcaattggactagagaacaaaccgaataaatgctattgccggttcgactccacactttttttcttacagcgtcgccagcgcgccaaactttgagcagccaccgacgttagtccttctcatttgtcggaggttggccaaagtttggcacggcaccgacgatcacgcgctccagtgtcgttgccgtgccaacttatgtacagctaacgacgctaagcccctttttaccgtcgtttgatcgccagaacctgacccgttaacgacgctaaggtgtctcagcgacgtcagcagtccaaaccttgaaccattactgacattgaacatcccccagcgtcgccagaagctcatgtcttgtctcaccaccgatgcaacgccgtcgctgcctctgccaccggcttcagtttcgagcaatgctcgaagcctgacggcaaacggtaggctgaagcatagtattccgtcatgtcactcatcttgctcataggtttgctcctgttctcatctggatgaaccataaccaacccccgcaacacgcagaagacctaaatcatattatttgttgcgaaatgttgctaaatccatctgtacctctctagccaagaacatttccaatacgccaagaccccttggaattgttgacattctaaggggtcttagtcggaaacaaaaggtgctagttcagcacaccttccacatccagttgtgcgggtcctcgacttcgccgagctggatgccgagcagctcgtcgcgcagttcgcaggtgagcttgccggagccgccgtcggcgacggtgacgtcgaacttctcggacttgaagcgaccgatcggggtgatgatggcagcggtaccgcaagcgaacacctcggtgacttcaccggacttgatgtcctcgagcagctggtcgagggcgatcatggtctcgaccacgtcgtggcccttgtcctgcagcagctgaatcagagagcgacgggtcacgcccggcagaatgttaccggtcagggacggggtctccacgtggccatccttgtgcacggccatcatgttcatgccaccgagctcttcaaggtaggtcttggtggcggcgtccacaaagcacacctgctcgcagccattctcaacacccttgtactcgccgagcagggaggcggcgtagttgccgccgcacttggcgaaaccagtgccgccagggccggtgcggaaccacttgtcttcaacccagatgctcaccggcttgacgccgcccgggaagtacgggccggacggagaggcgatcacgcagtagtcgacctcctgcggggcgcgcacgccgaggaacggctcggaagcgaacatgaacggacgcatgtacagcgtgtactcgcggcgggacggcacccagttggcgtcgcgcttgaccagcgcggccacggaaccgaggaagtcgtcaatcggcagctcaggcaggtacagacgcttggcggagttctggaaacgctcggcgttcgcatccgggcggaacagccaggtggagccgtcggcatgacggtaagccttgaggccctcgaagcactcctgtgcgtagtgcagcacggaagcacccggatccatcttgagcggcgcgtacggttcgacgcggcggtcggaccagccttcgcccttggtccaagtcatgtgggtcatgttgtcggagaacacctggccgaaagccggcttgtcgatgagggactggcgcttctcatcggatgcggggttgtcgttcggcagtacggtgaacggttcggtgagcttgtcgagtgctgccggatcgtggtgcgtgttttcagtcatcactagctacttcttcttgactttggcggcccgaaagccaccatatggggtgtgtgctgtgcgcttgtggcgcgaactctgttgcatacttttgcacacccatgtgttactcgtgtggcagagttcacatggtgaaaaaacgaagaagcccacaccgttctcaacggctgcgggcttccacgtttcagttatgttctgaattgttcgctatcgaagcgaccgactcacttggcgtcggcagccggagcagcggcggcgtcagccggggcggcagcagcttccggagcggtggtggactcggtggcatcctccggcacctcgacggtgacgacggactcttccggatcctcgacgtccagctcgacgccctcaggcaggacgacatccttggcgaacaccttggtgccgtcggtcaggccttcgacgctgaccacgatcttctcgggcaggttggtgacgtcggcgcggaccttgagctcctgaatgtcgacgaacgccacggcagcacccttcggggtgccttccacgaacaccggcacctcgacgtcgatcttctcgccggccttgacctcgaggaagtcgatgtgctcgatgatgcgcttgaccgggttcttctgcacgtccttgacgacggccatcttggtgttgccgtcgaaggcgatggtgaacagggcgttggtgtgacgcagggccagggtggtctcgcgcatcggcaaggtcacgaaggcgggctcttcgccgccggcgtagatggtggccggaatcttgttggcaacgcgcagacgacgagcaacgcccttgccgaactcggaacgggcctcgccctcaagcttaatggtggtagccataatggatactccttgtatcttcgtttcgtactgtctcgctcagacgccacgacgcgccgaaagacaccctacaaggagtgaaatacgccgagtcgataacggaatctgtgtcatgtgtcagcatgcacacttccctcgccaaagcaacaattgtcaagtatacgccaaccccggactttgcgtaatgatgcttcgatgacactgcatataggccgtcccagctacgtcaacgtacggtttccgcgaaataatccctaactttgtgaagaacgtacgcttacccgttctcatcatacggttttcacgaaatcgttcgccatttcgtgaaaaccgtacgctcagcgacactcagtgtacggtctttcacgaagttggggatgatttcgataataacgtacgatggtgagtaccatatcgggaggttgatatgactcgttcggacgacgtcatcaatgaggatggccatgacgtcatcgccgcacacactcgcgttgtcaggggcatggctgcggcacttgccgcgatagccgccacaggagccggcgtcacagccgcggccgccaacgtcatgttcatgttcgcgctggacaccaaggccaaacgttcgatgttcaacatgccgcacgaggagacgccgaaaggcatcgaattcgacatgtccgagcagcttgaggccggccggtggttcgaggaggccaagcaatcggtcacgctgcgcagccatgatggattgaaactccacggctggctgttggacccggattgttccgacccacagccgcatctatacgcgatctgctgccatggctataccggagagcccgcggaaatggccaaatgggcgcatcgctattcgcaactcggttttacggtcctgctacccgcgcagcgcgcccatgagttgagcgaagggcgttacgtgggtatgggattgctggaaagcgacgatctgttgggctgggtttcgctgatcaccgcagctgatccggatgcacgcattctgttgcatggcaattcgatgggcgccgccacggtgatgatggcggccggcgatgcgcgaatcccccgcaacgtcgtcgctgcgatttccgattgcggatacagttccgtggtctcacagtttacggataatgccgaggcgatgttccatttgccgcactcgttggccgtgctgctggtcaaagtggccagtcatgtgtctaaacgcaaggctggataccggtttgaggacgcctcctgtgtgaaggcattacggcacgcgactattccgatgatgttcattcacggcggagcggatacttttgtcaatccgaagtatctggacatcaattacaacgcctgcgccagcatcgaccgcgagaagctgctgattcccggcaccgaccacacgatgagcgccagcaccgatccggaccgctattggcgtcgcgttaacggctttgttaagcgggtgtttgggctgtagtagatatagagcttggctcccctctgtgaggggagccaagaatggttacgcgagcagttccttgacggcggcgatgacggactgcagactcttcttcgcgtcaccgaacagcatctgggtgttgtcctcgaagtagagctcgttctggataccggcatagcccatgccgcggccacgcttcatgaccacgacgttctgggacttgtcgacgtcgagaatcggcataccggaaaccggggtgccaggacggcgagcagccgggttggtcacatcgttggcgccgacgaccagagccacgttggcctgcgggaactgcgggttgatctcatcgagatccacgagctcctcgtagggcacgttggcctcggccagcagcacgttcatgtgaccaggcatacggcctgcgaccgggtgaatggcgtaggagacttccacgccatggcccttgagcagttcgccaaggtcagcgagctcgcgctgggcctgagcctgagccagaccgaagccgggcacgaagatgaccttctgcgcgtagacgagctgaacggccagatcgtccggcgtggtctccttcatggtgccttccagaccgtcgccagcagcggcggcgtcagcaccaccgccgaagccaccggccaagacggagagcagcggacggttcatggcctgagccatgaggatggacagggtcacacctgcggaaccgacgagtgcgccggccacgatcagggcaacgttgtcaatcgccagaccggacatagccacagccgtaccggtgcaggcgttgagcacagagatgacgacgggcatatcggcgccgccgattggaatcacgaagaccaagccgtagcacagggcgaacacggtggtcagaatcgaccacagcagacgctgttcgggctggacgcacagcatgaccagcgaggcgacagacagcacggcgaacagaatgttccatacgcccttgcccggcaggttcagcttcttgacccacttgatgccctgcagcttgccggcggcgatgagcgagccggtgaaggtcacagaaccaatgagaataccgagaccagcggtgatgagcaccacgatgtccggggtgccttccttggtcaggatgtcgttcagggccacgagtgcggcagcgccaccacccacggtgttgaacacggaaaccagctgcggcatgtcggtcatcttcaccttcttggcggagacgacaccggccacggcaccgatcaggatgccgacgaccagcaccaccacggcgacaatgttcacgaagcccttggcgaaaagcacgatgaacgccatgagcacggccacgaccatgccgaacgcggagatctggttacccttgcgggcggtcttcggagagttcatgaagtgcaggccgaccacgaacaggacggcggagaacaggtagacgaaccatgcgacgatgtcgatggcgccaacggttgcggaggtcattacttcgactcccccttcttctcgttcttgctggacttgaacatctcaagcatgcggtcggtgaccacgtagccaccaacgacgttcatggtgcccagcacggcggccaggaagatgaacacgtaggccagtgggctattggcttcggctgccacgatcacaacgccgacgatgacgatgccgtggatggagttcgcgccggacataagcggcgtgtgcagggtggcgggcaccttgccgatgacctcgataccgatgagcagcgcgaggacgaacagggtaatggaaacgacgagagtaggcatggtattccttcttccttacttctcggacttctcggcatcggcagcagctgccggggcggcggcgcggccggcaaccaccagcgcgtcgtcgagttcttcggtgagatcctggccgagcttgccgtcacgcacgaagtgcacgaggatgtcggccacattgcgcgaaagcaggttggatgcggtggtggcgacgccggaggccaggtagggagcgccaatcagcttggcaccgccctcggtgacctgctcgccgacggcggagccctcgacgttgccgccgaggtcggatgctgcgcagtccacgatcacggcaccacgcttgagacccttgacgccggctgcggtgagcagcaccgggggcttacggcccgggaccttggcggtggtgatgatgatgtcaaagccggcggccttctcatcgacggcagcctgctgctgagcctgctcttcggcgctcagcgcgcgggcataaccgccctcgccctggcccttggagaagtcaagtcccagatcaaggaacttcgcgccgagggactcgacctcgccctgggaggcgggacgcacgtcgtacgcggtgacgaccgcgcctagacgcttcagcgtaccaatggcctgcaggccggcgatgccggcaccgagcaccagcgccttggccgggcgaatcgtgccggcggcggtggtcatcatcggcaggaaggagccgtaagcatcggcggcggtgatggctgccttgtagcccatcacggagttctgagaggtcatctcatccatggactgggcgctggaaagcttacggggtagcttttcgatggcgatgcccaccagaccggccttctcgagcgcggccacgtaatcggcatcggtgaaggaaccgagcatgccaatgacccactggccggccctgagcttggccacggtctcggcggacggtcggtccacaaaaccgagcgcgtcggcttcggcgagcacctcgtcgcggctggtcaccttcgcaccggccttttcgtaatcctcatcggtgtattcggcggcaatgccggcaccggcctcaataatcgaggagactccgctcctcttcagccgggtgacgatatccggcgtcagcgcgacgcgggattccgtttcggacgtttcgttcaaaacgccgaacaccacggtggcttctgggttttgcgccatgagagccctttcttgttctacttcaaaatggacatggttatccgcatagaaagtgtagtcggaaggtaaagaccatgacttgagattccgccaatcgaaacagaaacgaacccgaaattagtgagaaatacgaatgtatccatgtgcattgcggatgaattgctcggaagtcgtccaacaatcacccggcatcgatcagcaaccaaccgctcagtaattatcgacaatcaccgtttcgtagctcacggttactcaacaatatcgggacctgtgcaatattttgccacgcactcccctaacccgccagaatcctacggttgcgtaaggtgacgagttcggtttgggcgattacaatttgaactttgagaagcgttcgcctcatggctggacgacactgaaaggtttacaggagcaagacttgtcggttatcaattccttcacgcagcacactatcaatctcacccgtaaggcgctcaggttgggatccgacttcgtccacccggtccacgacgacaccccggacgagcccgattacctgtccaatgccgacgtgccggtcgagaccaatatcgctttgcctcacagcgacgattgggacgacggccacctgaccgtcaccgacatcgaccccgccaccgg

SEQ ID NO: 2555 - DNA, 3209 bp, Unknown
  R50_10m  MAG No. k141_30071
gctgatcggcattattctgctggtcactctggtggtaatcgcgcttcgattcttctggattgcggccatgctgcgcgttgcgcgagatacaatcaccggccagcgccgcaaaatgacacccgaacgctggcgctcggccgcagtgatgacctttggcggccccaagggaaccatcacgctgtcattgatgtttaccatcccgtattacattgccggcggtgcgccgttcccgatgcgtgacgagctgattttcattgcgtcaggcgtgattatcgtgaccttgctgctggccaacttcctgttaccgctattggccccgaaccgtggcaaggatcccagcgcggaaatgattccggtgaccatcgatgtgttacgcgccacggtggaggaattgaccggacgcatcacgccagagaatcgccgtgcgattctgatggtaatcgaccaatacaccaagcgcatcggacgattgcagcagcgcatcggcgataccgatcctcagggattcgagcaattgcagatcgaagcgctgcattgggaaaaggaattcgtgcgcgaccggcttgccgacaccaaagcacatccggcggcggatacggccacgcaagagctgaacgtcgaagcctgcgagcgcatgcttgaccagattatgaatacgctgcgtcacacttccactgatccgacttcggggcatgcggtatcgcagattcgcggtcgcttacgcatgttccagcggcagatgagcaattacgccaaacgcacggtgtccaagattcgccataccacaccattggtgagcgaggatcagattttcgcgcgcacccgcgaactgcaggtcgaggcgattcatcatgttatcggccggcttattgacgagatgggccaggatacgtacaacaccgagcattgttcggcgctgttgctggattatcgtcgcgctgaggcttcattgcaggcacgtccgaatatgagcggcactacggaaaccatcacgcaggtcgaggacgtaaagcgcgagagctacggtatcgaactcggtgtgattcaggacatgtacgaagccggcgacatcaaccgagcccaagcccgctccctgaggcgcaacatctacgttatgcaggtcgatgccgattccggcatctagtttccttggctcccttctctgaggggagccaagttggggattgctatttccgtatgattctcttcagtatgtgcagtagtgcttgcagtgctcacttcgctcatgggagaacagtctatgaccgcgccggccacaagcgccctcgatgtccgattgctgtgacggccacgccaattccagtgatggcggctgactacagcacgccagaggtaatgtcgttgtcgagcagccactggcgcaaatcggcgaactcctcaagactcacattgtgatccagaccgtggtagctcttggttttcagccacgtatgctcttccaaccaagcggcggtggcgaacagttcgtatttcgggattacgccatcgttcttgccgtacgtatagaacacggggatatcgtaatcggccaggcgagagtcggcgggggccgtgccgggcacctgaccgggtgtgttgaagccggacagggagacgacggcccggtaccgctcggggttgatgcgcaacaaatgcacggcgaccagtccaccttgcgaaaacccaagcggcaccacgtcacggtcggcgggaatgttgtcggccacccatcggtcgactgctgtggcggcggcatacgcgtcgtagtcacgatcatcgccgataggcagggcatcgtgaaaccacgcgtagttgccggggtcgggactgccttcacgggccggcgcgagtgtcagcggcccgcgcaatgccacgaagtcgttatatggagcgatgaggcgcatgatgtccgccatgtcttcttcgctggatccccatccatgcaggcacaggaacagcggatgcgtggcatgctggtcgaagccgccgcgcgaggtgacgctgtgttccacggtgagtggctcgccaaaacgtccgggcacagtggtggattcgcggccgatcagaggctggctggcattcgcttctttgctcataccaatccaatatagaggtcttgcgcgctgtgcggaaaacgatggaccatgatttcagtcacattgggtaatccgcgccgaatcgccttgggactttccaggggataccggcaatctgtcaggcattaccgctgtttgcggctgcggtgtctgtggctgcggtgattgtctcaagttcaccgccccactgctgctgcagtgcggtcatcttgctgccctcgccgaacaccatccagcgtttgccgttcagcaatcgccaatcgcctttcgtttgctcattatcagcgtattggctcagcagttcggaaatcttgctttcgataggtgcccggctgatggctgcggacgattccgattcaaaggatacgaaggccactctcggatcagtgcacatctgtacggtggtgatgcctggcaaaccgcccgtatcaagcccctgccatccttctttgcacgcgccggcagcttgttctatgccttgctccatctgtgcggtatcttcgacgggtgccttgtcgttcgactgctgaatcagtccttccgggaacaatacgcccatggccacgccgataaccaagcaaactatggcgcacaccagtgcgatgatgccgcccgcgcccactcccccgtgagtggcgtaccgaggcatggtgactcgcgcagcgatgaccagaatcagggtgatgctgataagcaccgccgccgtcaacgcaatgtatcgtcctggcactgccgtcataaaggaaatggcgtaaggcgcgatttcatgaaccgccgaggtggccgataccacgacggctagcagtccgctgacaacggcaagtctgcggcacaatatcgacgttgggctgctgacttttgtagcggcgaatcgccggccggcattccgcctggatgggcgtcgattctgtgcacgacgtgagctgcgcgaatcgtcatactgaccatcgccgaagaaatcgtagtcctcatcgttgcgggccatcggtgcccccttcctgccgattacacagccagtgtaccgctatggcttgggaatggcggtcattcgggggaatgattcagggcaaaaaagaaccccggcggttgcccgccggggagagaacggagaga

SEQ ID NO: 2556 - DNA, 3713 bp, Unknown
  R50_10m  MAG No. k141_30332
ggtgccgcgattttgtcatgcagcgtcggtggagatccagacagcgtccctatgctgacgttctgagaccattggcgtcgttactgattcatggaatggcccggcgccgacgctcaaagaggctagcgtcggcggtgggccaatatttgtcgcgttgccgatggttgtgggcctcgtagcgtcgatagtgtgccatagcctggcaatttgccgacgataagctttcccagagtcggtatttcgccataagttggtccgctgacgacgctgagcagtttggctgtcggtgcagtaccaatatttggcccgccgccgacgtatggagggccatctggtggggtatcgcaggcggggtgttgtgccggagtcaaagcgtggtccgctgacgacgctgagtgccctcatatcagccaggtgcataagcaaatgccacgatacggcatttcccgcgggtttgcccgaaccggcctgtaggatgttacgtgcgtattgacaaatccgcgtggcccggcgccgccctggcacaacgccgcagtcgcgtccgcaagagggcccgcgcaataaccagtaaaggaggaacaatgggtcagggtcaatcatccgtttttgatctcgcggcagtggctgcggcgtccaatggggggaacaacgacccgctgctgcctccggcacgattcatcggcgatccgcagaagccgagtcgtatgccgtataacaagtacgccgcctacgacaagcagatcccgtttgattacccggagcgcacgtggccgggcaagcgactgcagcgcgcgccgcgctggtgctccgtcgatcttcgcgacggcaatcaggccctcgtcaacccgatggattccgagcgcaagctgcgtttctggaacctgctcgtctccatgggattcaaggagatcgaggtgggcttcccgtccgcttccgaaaccgatttcgacttcatccgtatgctcatcgagcgtgagcttatcccggacgacgtgaccatcgtggtgctcacccagtgccgcgagcacctcatccgccgtacttacgaggcgctcaagggtgccaagcgcgccatcgtgcacttctacaactccgtgtctgtgctgcagcgcgaggtcgtgttccgcaagaacaaggaagagatcaagaagctcgccaccgacgccgccgaactgtgcaaggacctcgagaacgaggccaagggcatcgacctgtactacgagtactcgccggaatccttcaccggcaccgagccggagtacgccgtcgaggtgtgcaacgccgtgatcggtgttatcaagccgactcccgagcacccgatgatcatcaacctgcccgccaccgtggaaatgaccacgccgaacgtgttcgccgacgaagtggagtacgtctccacccacctcgacgaccgtgactccgtagtgctctccctccacccgcacaacgacgaaggcatgggcgtggccgccaccgagctggccgtgctggccggcgccgaccgtgtggaaggctgcctgctgggcaacggcgagcgtaccggcaacgtcgacttggtcacgctgggcctcaactggctcacccaaggcatcgacccgcagattgacctgtccaacgtgcccgagatccgcaagacggttgagtactgcaaccagatcaagatctccgagcgtcacccgtacgccggcaacttcgtgttcaccgcgttctccggctcgcatcaggatgccatcaagaagggtctcgaggctcgtcaggtggccgccgagcgcgctggcgccgatctcgacagcttcgtgtggcttgtgccgtacctgccgatcgacccgaaggacatcggccgcacgtacgaggccatcattcgcgtcaactcgcagtccggcaagggcggcatggcctacctgctcaagaccaaccacaatcttgacctgcccaagcgtctgcagattgaattcgacaagatcgtgcaggactacgctgacacgaccaagaaggaagtcaaggacgaggatatctggcgtctgttcaaggacgagtacctgccgatcgaacagtccggcatgaccgccgccggtgtggttgtgggcgatactcatgacgcctcgctcgcaccgtggggccgcttgaagctgctcaaggtggccgtcagctccggtgaggatggctccgataccgtgctcaaggctcgcctgctcgaccgcggcgtgaacgtcggggtcgatgcgcccgtggagcgcgaggtctccggcatcggcaacggtccgatcgccgccttcctcaacgccatttccaactttggcgttgacgcctcgattatggattacgtggagcacaccatgtccgtcggcaccgacgccatggccgcctcgtacgtggaatgccaggtcggcgaggccgatgatgcgcagatcgtgtggggcgtcggcatcgattcgtcgatcaccaccagcgctctgaagtcgattatctctgccatcaaccgttcccagcgcaagcgctgagcgctaacaacaaaacaaagctccctctgattgcatcagagggagctttgttgtctgtgcttacttactactgggtgacgccgttggtgccgttgttcccgccggtgcctccggaattaccattatcgttgccggtattgttcccgttgttcccgccggtattgccgggattgttgccattgttgccatctccgccggtagtggtgccgggataattcggacactcggtggaatagctcggattggcgaggcactgctgggcgaactcctgggcctgctgttgcttcttggcttcctcttcggccgccttctgctgtgcgtcctgctcagcctgcttctgcgcgtcttcggtggactgcttgttggtgttattggacaggccgctgctctgtcccttgcccaagccccaagtgccgtcgggtccaccgatcttgccattgtctttagcggtcgggaactgctccacctcggtaccttgcaaggcctgagccatgaactcctggaacaggtgggcggggtatccagtggaagagatgccgtatccggagaaggccggcaccgcctgcggattgcccttatcgtccgggttccagatagcccacacattcatcatgctgggggtgtatcccacgaacgacgaagccatttcgtcgttggcggtaccggacttgccggcgatgggtcggcccagcatgttggatgtgccggccgccgtaccgtacgtggtggtgccctgcatggccttctgcaccaaagcgcagtcgttggcatcgaacaccttggtgcctttgctgggcgcgttgtacatgtccttattgttggaatcaagcactttggacaccatgtgcaaggtgctcttcacaccattgttggcgatggtcgaatggccttgcgccaaatcccacacggtcagggcgttgatgcccagcacgttgtacatggagttttcatcgatatcgccctgaatgcccgcttcatgggcgattgcggccgtgcgcttcggcgtcagatgctcattgacgttcatgaacaccgtgttcaccgagttggcggtggcctgatacagattgatgttgccccagttgttctccagagcgttattcacctcttgatccaagccggtgaagtgctggtgggaattgccgttgaacaacgtatcgaagctgacgccggattgcgcggcccccagcaaagcgaacggcttcatagtcgaac

SEQ ID NO: 2557 - DNA, 2842 bp, Unknown
  R50_10m  MAG No. k141_30371
cgtgccgaaaatcaacgcggcccccgataagcagaccatcgtcgatggcgagaagatgactggcgcccaagcgctggtgcgttcgctggaggatctcggcgtcgaggacgtcttcggcattcctggcggcgcgattctgcccgtctaccacgagatcaaagacaacacgaagttccgcttcgtgcttatgcgccacgagcaggccgccggccacgccgccgaaggctacgcactggccactggcaaggtgggcgtgtgcatcgtgacttccggcccgggtgccacgaacgtggtcacggccattgcggacgcgaatatggactccgtgcccatggtcgtgattaccggtcaggtgggcgtgcaggccatcggcactgacgccttccaggaggcggatatcgtgggcatcacctacccggtgtccaagcactccttcctcgtgacccgcgcgcaggacattcctcgcgtgctttccgaggcgtactacatcgccaacaccggccgccccggcccggtggtcgtggatctgaccaagaccgcacagaccggcgacatgtactactcatggccgcagcgcatgattctgcccggctacaaccccaccaccaaggcgcacggccgtgtgctgtccgacgcggcgaagctgttctctcagtcgtaccgcccggtgctgtatgtgggtggcggcgccgcccgctccaacgccggcgcacaggtcaaggctctggccgacctgaccggcgcccccgtggtcacgaccctgcccgcacgcggcatcattcccgactccgacccgaagaacctcggcatgctgggcatgcacggtacgattgccgcaaccggtgccgtgcagcgcgctgacctgcttgtggccatcggtgcacgtttcgacgaccgcgtgaccggcaagctcgacgccttcgcaccgaccgcccgcgtgattcatattgacatcgacccggctgaaatcggcaagaaccgtcagcccgacgtgccgatcgtgggcgatgcggctaccgtgctcgacgacttgattcccgaaatccagcgcacgcaggccattcagggcaagccgaatctggccccctggtggaaggcgatcgacggctggcgcgaggaatacccgatgacgtgggatgagccgaccgacggatcaatggccccgcagtgggtcatcaaaaagctctctgagatggccgatccgtccaccatctgggtgaccggtgtgggacagcaccagatgtgggcttcgcagttcatcgatttcgagaaccagcacgcttggatctcctccggaggcctcggcacgatgggctacggtctgccagccgccatcggcgcatccgtgggctcggcccgcgagttcgagggcaagaagccggtgtggctgatcgatggtgacggttccttccagatgacctctgaggagctggccgccgcgttcctggaccacgctccggtgaagatcgcgattctgaacaactccgtgtacggcatggtccgtcagtggcagacgctgttctacgagcaccactactcgcagaccaacctgctcgatggcgaggcgcacggtgccgatggtgcggcggcactggtcgacggcgatgcgccgctcgaagtgcctgatttcatcaagttggccgaggcatacggctgcgtgggtatccgcgcgttcaccgaggaagaggcgattgccgccatcgaaaaggcgaaccagatcaacgaccgcccggtactgattgatttccgcgtgtggaaggatgcgatggtgtggccgatggtagccgccggcgcttccaacgacgaggtgacgtacaagcccggcatcaagccgctgaccggcggcaccccggctccgggaaccggtccggacgagcatgcgaccggcgtgttcgagcacgagaccgccgctgccgctgcgagcgagcactgaggagaggagaacactcatggctaactatcctgcatcccagcctggttcccagcgtcatacgctgtccgtgctggtggagaaccgcccaggcgtgctggcgcgtatcgccggcctgttcgcccgtcgtgcgttcaacatcaactcactgtccgtctcccccaccgagcgtccggacatctcacgcgtcacggtgaccgccgacgtggaggccgtgccactggagcagatcatcaagcagctcaacaagctgctgcacgtgctgaagatcgtggagctcgacccgaactccaccgtggaacgcgaactggtgctcatcaaggtggccgccgacgaatccaaccgttccgacgtgctggagatcgtgcgcctcttccgcgtgcgtgtggtggacgtgaatccggaatcgctgaccattgaggccaccggtgccgaaggtaagatcgatgcgctgctggggcttttggagcattacggtgtgattgaactggtgcgctccggtgccgtagccgtgacccgcggcccgcgcgccctgagcgaaaaggtcgtcggttccgaggttaccgggcgctgattcggcgactgcgggaagacccagtccaagctcaaaaggcggatgcgcatgatgcatagccgccttttttcatgcgtgcatacctcatcacccgtactgcaagcaaaacgacagcacctcatgctagcattatgacagcaacaaggaggtgcatcatggcaacattgaccatccgaaaaatacccgatgagcagattcaacagctcaaagaagtggctgagaaaaacaaccgctccatggaatctcaggtgcgatccattcttgaagaatggctgaccggcacggtggcgcatgaaatcacacgaaagaccaatttctacgacgagatccgcgaattc

SEQ ID NO: 2558 - DNA, 6276 bp, Unknown
  R50_10m  MAG No. k141_30442
gagttgcgggccgtcgtcggatgcgctgaggctgttgccttgggaggcgaccggcttgccgtcggtgccgatcatgcgcagtgcgaccgcgtttttggtcggggcttgtttgcccgagccggagccggacgacacgccagcagccgtacgcgcgtcgaatcctttgccggtcaggcaggcggcgaatcgcttcgccgtggcgtcggtggtggtcgtcgcatcggaccgatcgtcggcacctgagcctgttccgactgccgccagcggtgacgagcaggcgcccagcatcgaagccagcgagagtgcggacgtaagcattgcgattcgccgtaccaggcgcgtatgagtagtggacattaccgtctccattccgtgagtcgattgtgacgacttccatccaatcgccctcaccgtggagcgtcggtaagcggacggattactttcgccttaccgtagaatcgggaaaatgttgggtgatgccattggttcgggaaggctcggaaggggacatgatgcggattctgattgtcgaggacgaccgcgaactggccgccgcgttggacgacgcgctgcgctacgaggggtacgcgaccagtctggcaaccaccggcgtcgaagcgttgaagatccttgccggcacgaacgtggacatcatgctgctcgaccgtgatctgccggtattgtccggtgacgcggtgatggccaccgtcgccgcgaaccgcattcccgtggccgtaatcatgctgacggccgccgccgaggtcagcgaccgcgtgagcgggctggacctaggggccgacgattacctgaccaaaccgttcgcctatcccgaactgctggcccgtatccgcgccctgcaacggcgcagcgggaccagcaacgcgaccgcagccgtgctcacgcgcggcgacatcaccctcgattccacacgccggctcgtgttccgcgaccacgggcgcacgctcgtcaaactcacacccaaggagtacggcatattgctggagctcatgcgtgcggaaggcggatacgtgaccgcgcacgaactctacgatgcggtttgggatgagccgaccgccgccgacccgaccgacgtgatcaaaaccaccatctattcgctacggcgcaaactcgccgatcgcgaggccatcgtctcgacacgcggggaaggataccggctgcaatgaaggcgacgaacacggcgaaagcatcaggtcgtatacaggcgcttgccggcaaactgcggcccaaatcattccgcgccaaactgacgttggccatcagtctcgtgttcctcatcgccatgggatcggcgaccctcgtgcagaccattgtggtcaacagcatgttcacgtacgccacgacggtcaccgccaaaaaccctgagatgcaggtcgaaagccagcacagcggttccggcaccggcaaacgcccggattccgacccgcgaatgttttcccggggaagcggcacaggtctgaacgatatcactggaacatccagcgtcggcggcgatatgggcgacggtgactatcaggtggaatggggcaaggacgggtcgtataccatcaacaccccgtatggcgtctccgtgtggaaccaggacaacatcgccaccggattgcgcatcagcgcggccatcatcttcgtgttcttcgggatcaccagcattctgatcatctggctggtcacctcgcgcatgtcccggcaactgacctccatcagcgcgcaggcggcggcattggacccggccaaacttgatacgcgcatcgacgtgaatgggccgccatctcgccgtaggccccagttccggcgtgcgggcagacgcgggaccgaggattgggatcatagcacggacagccgcacggacggtcgagctgccggccaatcctccgaagtcacgcagctcggtgacgccatcaacggcatgctcgaccggattcaggccgcatccgaagcggagcggcggttcgtgtccaatgcctcgcacgagctgcgcacgccgattgccgcggtggagaccaatctggacgcgccgttggcccaggggcggttccccgaggatgtgcgaccgtcggtacagcgcgcactggatgccaatcggcgcggcgcgcaactggtgcaggcgctgctgaccttgtcccgtattcaaagcgggaccatcggcggcaagcaggcgggcgatgtgacacagatgagtcccgcatcaacggcacgcacatccacagatttgtacggatgcgtcggcaactcccttgcggatatcgacgatgccgccaccaagcgtcgcatcaccataaccgtgaacaaggccggcggcgacgcggacatgtttctcatcgccgccgacccggcgttgctggaactggcggtcggcaacctgctgcgcaatgccgtcgtgcacaacacggatgatgggtcgatcgacgtgaccgtcgtatcggatgaggatggaagcggaccccgtctgaccgtcacgaacaccacggatgagatgctgccggacgatctgaacgagctgacccaaccgttccatcgcggcgagaactcgcgtatcagcgccgtgcccggcgtggggctcggcctgtccatcgccagtgcggcatgcgaggcgatgggagccaggctggaactcggccaaccggccgaaggcgagttccgggcgagcattcggttttgatggaacactcaggctccccttcaaagaggggagctctattgtttcgcacgcaaaaatcacagacagactattgccttgcggaaaatcatcgttagattggcgagaggaatattgtcaatgcatacgaaacggaaaacatcgtgaccgcaccgaacacgcccgccgaaacctctgaccagctcaacaagcccgccaaatccggcaaactggaggtctccgacctcatcaccatcggcgtgtttgcggccctgtacttcgtgatggtgtgcatcgccacactggtgagcaccctgttcaccagcggcttcggctccatcttcctgcccgccggacgctcgattcgcgcgcgagactcttccttctgctggtggcgaacctcatgctgttcttccatgtagggctcgccacgcaaatcgtcatggtcgtgctgttcctgttgcccctgctggcggccgcccgatggcgaaccgcgttgaacttcggcgtgacctatgccgtactcaccgcgctgggaatgctcgaccccgatgccctgggactgccgtggctgcatgtggtctccgcgctggccgtggacgtcacgatgatgctgccctgtttcatcaccgactcgcatggctcaacggcgtggccgaccggtacgtggtattcgacggcggacatatcgtgcaggattacgaggccgatgaattcctgtccctctcccccggctgcgtggccgccatgggattgcgggcgtttgacttggaaccgtatcggcaccggattgcggccctggcttcaagcccggccgccgaatccggctccacggacaatgcctcgctcgccatcgaatggttcgccgaggacgacaccagcctcgacacttacgaatacgccatcgaccatgtcatcgagcacgggctcgaaagctcccccaccttcgtgctccgcaccgctgatccggccgccgaagacagcccgttccgctggctgctggccatcaaccctctgccttcgcgcaaggcgttcgccgagggcgggctgctcagccacctgcatttccagtacgccaacgatctgcacacgctcgtcgccacggatgaggccaccggcaccgagaccttgcgcaatccgcgttggtacgcacaccatgtgcgccaacgagggaaccaccgaggaccgttgcgccatcatccgtgcgttgcaccacttgcagtagatctggcaacatacggcggtatgacggctccccgctagtgaaacagcagcgcttcagtagccgtgcgagtgcagatactcgtcatcgaagtcgaaataatggccgatctcgtgcaacacggttttgcgaatctgttggcgtagctcggcccgtgttgagcatacgcgttcatgcgaccccttgaacagggtgatgacgtccggcatcacgccgctgtagcccgtggttcgcttcgtgatgggtatgccctcatacagtccgagcagctcaccgcacggattgctcattgtggccagttcgcgctcattgggctcgtccgcaacgacgatgccgacattctccagcacccgcgcaaaccgttcaggcaaatcatccaacacctgttcaatggcccgttcaaactcatcgtcaccgatgtgcatactcaatccttcacctgttgcttggcccccacgataacagacatattccgggttccggcttcttgcgggtgccataacgttgcgcggaacgcttccaatcattcattaggtcgattcttcattcattaggtcatgaggctgcgattgtcggtgttggaatggcaccattccagtggtgactgtcagagctcaccgacctaatgaatgaagaatcgacctaatgaatgcgtccggtcatatctcattgtgaaaatgacccggtattgcggtattccgcaattgcacttccaacgattctgaagtattcatccagattctgcgtggtagcgaacgttcttcttgtggcgggaaaagtcttatagcccgcgaaggagaggttgttccttttctcgatatctccttcccatcggtttcggtcatagtggtaccgtccgtcgtattccagaatcacatgatcattcggatacaccatgtccacaatcacttctttgttctgcaatgggaggtatatcggagcattcacctccaattcgggtaatccacgttttaccgattcaaggcgaaggatgctttcctgcggcgaatcggtgttctctctgcacaacgagagcgctttgcgaaataatctgataccggggaacctacctatatcggtgaggaacaacgatatcttgtctttcgttgtctgtttcaaatgctcattacggcaggtggcccaatccaaggcaatgaccatactttccacatcgacgaactgtgcgatctgacacagcgcctgttccactgaaaccacggcgataagatcatcaatcatcgtctggtcaatgccatggccccaataatggcattgcgtttcggtaagattcgacaatctttcagccccggacaccgtaacgtgcagtttgttggggtcatagttgggcttgtaattcagcgtggccgtcatgccagcaagctgtagcctggtgccatggctgaagcaaagctcctgtgaagtgcgcatcgatctggcacggcattgttccagtgttttctgggcgaggtctcgcgcctcatcaagtgtgaagaacgtgttgtatgcataggactccatgccatcccccaatggttgtatccgtgaaccgcgttattcacggatacaactcacgatggcataaccaacttctgcgcgcaaccagctcggccgaatcggtggatatgtgtataacctgccagctcagctgttgcggttgatctcgatgtcggtgacggtgaggttggcctcgttgatcaggttgaagaggatgacttcggccagcggaccgggctgcatgaaggtgtgctgcttggcttcggagacgtagtcgtggctatcacggtagaaggcggtgtcgatgccgcccggatagacggcgaccaccttgacgctggtgcccttgtatgcggcctgcagactcttggtatagcccttctcgccccacttggtggcgcagtacacgctttcgttcgcgttgccgcgcgtggcggcggtgctcatgatctgggcgattttcacgtcgcgctctccacaggccttgagggtttccaccgtccacagaatcatgcctttgagccccttgaggcatttgtcaatgtcagcggcttcataggcggtgggcaccttgaacgaaggctggccggcgttgttgatgagcaggtcgatgtggccgagcgcggcgatgctcgccacggattccttgacaaatgcttcgtcggtgatgtcgcctacgaaggcgcggtaggattcggctggccactgcgcgctcagctcggcctgacgttcggcgttgaagtcgatgccggccaccagccagcccttggcgatgagttggctggcgagctcgtagcccaaacccagcgcgctgccggtgacgatggcgatcttctggcctgttgtggttggcatggttgattcctttgcatgcttgcgagactcccctcagaccgcctacggcggc

SEQ ID NO: 2559 - DNA, 4237 bp, Unknown
  R50_10m  MAG No. k141_30679
cttgttcattgttatttcctcctctatatggttccgaccgtcatgcgaaatggcatgcaacctgatggccgctcggtcgggaagtgtcatacggccgcagcgccgggcgttcgccgcggcagcgggcctgttgttcggcgctcagcttgggcatgagcgggcagcggcccatgaacgggcagccttcgaacgtctcggtggggctgggcacctcgccctgcagcacgatgcgctggcgggtgcgttccgccttcgggtccggcaccggcacggcgctgatgagcgcctgggtgtacgggtgcaacgggtgctcgaacacgtcttcggtgtcgccggattccacgatgcggcccaggtacatcaccgccacgcggctggagatatggcgcaccaccgacaggttatgggccacgaacaggtaggccacgcccagcttgttctgcaggtcctcaagcaggttgatcacgccggcctggatggacacgtccagtgcggagaccggctcgtcgagcagcacgagcttcgggttgaccgacagcgcacgcgcgatggcgatgcgctggcgctgaccgccggagaactgcgtggggaagcggtccacctggtcggggttcagctccaccagacgcatgagttcaccgatgcgttcgcggatctgctctttggagtagtgctggaccttcatcggctcggccaggatgtcgtagatcggcaggcgcgggtcgagcgaactcatcgggtcctggaagacatactgcacggccgaacgcagctcgcggcgcttctcgcgcggaatcttgtgttcgagcttggtgccgaacatctcgatctcgccgtcctgcggctgcttgaactccatgatctccatgagcgtggtggacttgcccgagccggactcgcccacgagcgccacggtctcgccttcgcgcacgtccagcgtcacgtcgtccacggccttgacctcgccgatcttacggcgcaggaatccgccggcggtcagcgggaaggtcttgcgcatgtgcttgacgtcgagcaccatcttgcgttcgtcgcgcgggatgccggcgaacttcgacttggcggcctcggccaccgtgtacacgtcgtggaaggtcaggcccttgtccacgatctcctgggtgcggtggcaggccacgaactggcccgggcggcccggcaccggctccatggccggctcggtggtgtggcatatgtcggtggccagcgggcagcgcggcgcgaacgggcagcccttgggcatgttgaccaggttcatcggggagccaggaatcggcaccaggcggctgttgcgttcgcggtcggaacgcggcacggcacccagcaggcccatggtgtacggcatggccgggtggtcgaagatggagtcgacgtccgccttctcgaccgggcggccggcgtacatgacgacgatgtcgtcggccacgccggcgatcacgcccagatcgtgggtgatgaagatgacggccgcgccggtttcacgctgggccttgcgcagcacttcgagcacctgggcctggatcgtcacgtccagtgcggtggtcggttcgtcggcgatgatcacgtccgggtcgttggcaatggccatggcgatcatcacgcgctggcgcatgccgccggagaactcgtgcgggaaggacttcaggcggtcctccgggtccgggatgccgaccaggttcatgagctcgatggagcggtcgtgaatctgctgttcggtcatcttcggattgtgggtgaccagcgcttccttgatctggtcgccgatggagaacaccggggtcagagcggagagcgggtcctggaagaccatggcgatgcccttgccacggatctcgctcatctcaagatcggacttgctgagcaattcctcgccgtggtaggtgatggagcccttgacgctggcgttcttgtccagcaggcccatgatggccatggaggtcacggacttgccggagccggactcgcccacgatgccgagggtcttgccggggtacaggtcgaagttcatgccgcgcaccgcgtgcacggtgccggcttcggaggcgaagctgacggtgaggtcgcgtactgaaatcaccggttcggatgccatgccttgcgctcctgtggtgttggggttggtgttggttgttacgttgcttgcgttgcgttcgtcgctcatgatgcccgtctcccctctcactcggccttgccgccagaacgggagtacgggtcgatggcgtcacgcagtccgtcgccgatcagctgcacggagaaggtcaggacgaccagcaccacggacgggaagatcagcacccatggcgaggtctgcaccacggactggccggcgttgagcagcgtaccgagcgaggtgtcgggcgccttgatgcccaggcccaggaagctcagcgaggtttcgctgttgaccgcaccgatcacgccgagcacggtgttgatgaccagcaccgaacccaggttcggcaccagatgacgcacgatgatggtgaaggacggcacacccatgaacttcgccgcgcggatgtattcgcgatcgcgcaggctcagggtcagcgtgcgcagcgtacgggcgtagccgatccaaccgaatgcggtcaggccgatggccagccacagccagtcgctgccgccggccgccatgccgacgatcagggcgatgagcaggaaggacggcacgacgagcagcatatccagcagccacatgcccacgcgctcgaaccagccttcgaagaacgccacggccgtgcccaccagggcggcgatgatcgtggtgccgaacgagctgaagataccgatggtcaacgaacggccgaggccgcggatgatcatcgcgtacatatccgagccaccgaccgtggtgcccagccagtgctgggcggacggcggcgaggcgagggcggcgaaatcgggctcatcgtagctccactgggagaatttcgagccgaaaatcgccaaaagaatcagcagaatcagcaccaccagacccaccacggccgaggggcggcgcatgaagcggcgcacgtacagctgcatgcggccggtgcggtggaagtcgtcggcgctggaagcctcctgggcgttcctggcgtcggcggactgcggttcgctgccctgcggatcggtgagttccatatcctgggcggcggcgtcggagaccatgttttcgttgtcgttcatcatgttagatcgtcctttgcgcggggctcagctcagtcggatacgcgggtcaagccaggcggagaagatatccgccagcagcgcgccggacagcgtgcacacgccaccgaacgcggccacggccacggcaccgttgatgtcgttgttggcgatggtctgggtgaagtacatgcccaggccgttgatggcgaacacgttttcggtgatcaccgcgccggtgaacacgccggcgatggagaaggccacatccacggcggtcggaatcagcgaggtgcgcagtgcgtggcgtcgaatggccgcgttgagcgtcaggcccttggcgcgggcggtgcgtacgtagtcggcgttcatggtgtcgagcagatacgtacgctgggtgaggtggtagcccaccatgcccggaatcgtcatcacgatggtgggcaggatcaggtgctgcagatagtcaaacacccaaagcaccgggttggagccttggtaggagtgcaggccggtcacgtagaacgcgcggctgcccacgatgttgttgaagttgatggccagcagcaccaccatcaggcccatgacggcggccgggaccaccaggaagaacgttgcggtggtgttgagcacgcggtcctgccacttgtactggcggatggccgtgtacacgccgatgctcacgccgaagaggatggagagcacggtggcgagcgtcaccagctgcagcgaagcggagatacgggaggcgatggccggcgccaccggcgactggtccgggctcaggccccagttccactgggtgaggatgcccttgagccagcggaaatagcggatgacgaccggcgtctggtcgttgatgttggccagatcgagcgaccggttaatcgacgcgatcggcggatgcggattgcgcgacatgtagttcgaacgcggatccatgaatgcgctggccaggaaatacgtcatcgatactgccacgaacagcatgatcacgtagttcacaatgcgcttgatgatgtccttgaacaccccaccacctcccagataactgaagacgtgatgc

SEQ ID NO: 2560 - DNA, 6947 bp, Unknown
  R50_10m  MAG No. k141_30940
cagttccgccacacaatatcggcatttcactgtgaggtaatccaccgtggcgtccggcgtctgccgtgcgacaataaagccatggttaccaacgcaacaatcgaggctcttctgggccgccgctccatccgtaagttcaaggacgaggccatcgacgacgatacccgcgccacgctcgaaaccgtcgcccaacatgccgcgtccagccagttccttaacgactggtccgccatccgtatcaccgacccggccaccaaagccaagctcgccgaattcggccatcagccgtatatcgccaccgcgccgttgctgtacgtgttcgtcatcgacgagcaccgcaacgcacgcatcgccgaacgcaagggcatcgatcccgcttccgacgaattccatctcaagtacagctatcgcttcacccaagctcagaacgacgcagtgctggccctgcacgccatggagaccgccgcctattcgctgggactgggctgcgtgattctcggctctctgctcaacaacatccccggccttatcgacgtgctgaatctgccggaatacacgtatccggtgctgggtctggccatcggcaagcccgatcagaacccgaccgtcaagccgcgcatgccgcgcacgatgcagttcttcgagaacacctacccggctgacgccgatggcgtactcgaccagctgcccgccttcgacgaggaagttcaccggtactacgatctgcgccaagccgaccgtccggtggacgctttcagcgatcaggtcgtcacgatcagtcggcaggatgtcagccatcagacactgctcgacaaggccgccgctcagggcttccgtctggatcagtgagaccagaaccaacgagatagcctcggataggctcgtcactgagtcgtctcggtctcagcactgcgacgactcagttccaacacctcaacatttcatcaccggataccggcaaaattgcacaaccatcccgccggtgtcgcaccatcaacaaacgttcacatatcagtcccattatgcggacaaccaacggccagttttgcaagaaaacccgccaaaccagcagtatccgcaccagtggtgggaatagactgcatgtggccgcaatgactacgaaccggaaaagagggactggatgcggacggtttggcaagtctttctacgcgattgcagacgtatcttacgcaatcccgttgccgttgtggtgacgctcggcgtagcaatactgccctcgctgtacgcatggttcaacattctcgccaactgggatccctattcagccaccggcaatctgcaagtggccgtagccaatgaagaccaaggcaccaccaacgatctggtcggccatctcgatgcgggccggcaggtcgtcaagaaactcaagcagaacgacgaactcggctggcgcttcgtagacaatgaggaacaggccgtccacggcgtggagaccggcggatactatgcagccatcgtgctgcccaaggatttcagcgccagcttggtcgaatcggtgaccggaacctccaaacagccgaaaatcaagtattacgtcaacgagaagaagaacgcgatcgcgccgaaaatcaccgacaccggcgccaccaccatcgatgagcagatcaactccgccttcgtcaccacggtagccaccaccgttgcctcggccatttccgaaaccggagacgatctcggccaagccactggcaaagtccagcacgatacgatcgatgatctcaatacggtgatgtccacgctgaacaccgttcaggattcactcaccgacttacaggacacgctggcccaatcagacacgattctcgccgacgccaaacagaccaccgcctcactcaagcagaccgtcgcggccgcgcagaatgcctcccgccagtccggcacactgttggcggaaacacaggccgggtcacaagccttctccaccacactggtcggcgcgctcgacagcagttcagcacaactctccggactggccgtccacgtcaacaacgccgccggcagcatcaccggctccttcaacagcgcgcagaactccgtcgacaccatcaccaacacactttcggccccactgaacgccacccaaacgtcaatcagcgatctgaaagacgcgctgaccaaagccggcatcggcaaagacaccaccgacccggtcggccagaacatctggaaacaaatcgatgcgctcgactcattgatcagcaaacagcagacacagctcaacaccttccataccgacaccacacagttcatcaactccggcaaagacgccaccacgaacctttccggagccatgaccaacaccaccaccggcggcatcgcggcgctgaataccgcgcgcggctcgctgaccggcaccgtaatgccgtcgctcacctcatcattgaacagtttcgccgccctgaacggcacgctggatggcacgttgacttcgttgtccggcaccttggatcaggccgacgggctgttcgaccagcttgtcgataccctgaaccaaacgaaaaccaccatcagcagcacgcaggattcgctgcgccaggcggccagcgatgtcgccaccgtacgcaccgatatcgccacgctcgatagttccgccgcttaccagaaaatccgggatacgctgcatctggatgacaagggattcggcgagttcatgggcaatcccgtcaccctgaccacgaaagtcgtgtacgccaccgacaattacgggtccgcagtcaccccgttctacacgaatctggcactgtgggtaggcggtttcgtgctgattgccatctacaagcttgaggtcgaccgcaaaggcattcgccgtatcaccgctacgcaagcatatcttggccgctggctgctgctggtcaccatcggattcctgcaagccatcatcgccaccattggcgatctggtgctcggcatccaatgcgagcatccgctgctgttcatcttggccggaatcttctgttcgttcgtctacatcaacattatttacgcgctggccgtggcgttccgccatatcggcaaagccatcgccgtaattctggtcattgtgcagatacccggtgcctccggcctgtatccgattgaaatgatgccgaacttcttccgcgaactgcacccatggctgccctttacctacggcatcaacgcgatgcgcggcccgatcgccggcctgtacgcgaaccattactggctcgacatgctgcacctgttctggtatctgccggcggcactcttcgtgggacttgtcatacgccggtatgcgatgaacctgaacgcgctgttcgaccatcgtttgggagataccgacctgatgatcaccgagcacaacagcatggtgaacgaacaggtgagcttgaactccgtattccgcacggtgtccgacagcaaggaactgcgcgatatcatcgctcatcgcgcgcaccggttcttcgcgcggtacccaaagatgatcgttgccggtctgacattgctgaccgtactcccgttcgtattcctggtactgctgttcgtcacccaagagaaaatcgccatgctgacctcctggattctgtcgattattcttatcgacgcctatctcattgtggttgaatacgcacgcgaaacctacgccatgcagcttggcgtcagtgccatgagtgccgacgagttccgcaatgtgatgctcaacggatatgtgtggcggcgtttccacggccacggacgtcacgaagcggcgatgggcagcaatccggatatcggcgaaaccactgaacgactcacactgttcggcgatcaggccgccgagccgactgcgcacaccgcacagttcgagcagtccggtcagtctgggcagtctgggcaaggaggcgcacgatgaagcttatctggaaaatattcgtacgtgacgtgcgccaagccacccgcaatgtgatcgccgtaatcgtggctatgggattggtgattgtgccggcactgtacgcctggtacaacatcgccgccagctgggacccgtacggcaacaccaaggccttgaaggtcgccgtggcaaacgtggataagggctataagtccgatctgatgccgatcaccatcaacgtcggcgaaaccgtgaccaatacgctcagggccaatcatgaccttgactggcagtttgtggatcgtgctaaggccatcgatggcgtgaactcaggcgaatactatgccgcgctgattattccaaagagcttcagctccgatatgatgacgctgttttcaccgaagatcaagcacgccaagctcgaatactatctcaatgagaaaatcaatccgatcgctccgcatatcaccgaccagggtgctaccaccgtggccacgaccatcgaccagacatttgtgaagaccttggcgagcgtggcgctggatttggtttccaacgtggccgattacgcgcaaagcccgcaaatggagcagtacgtcaacaacgcctccagtcatattgccaccatgtcgtctcgtttgaccggcactgcgtcgcagatggattcctatgccaatctgctcggggccgccaacagcatcattgattccaccgataagctgctgggatcaacaggctcagctgcggccacaaccaaaaaggcgttgaaacagacccgcaacggcgtctccagcctcgacaaggcattgtccggagccaccgatggcgtcggtacggcattgcagcaggccggttcatcctacgacaccattgccaagcagatcgatgccgcttttgccgatgtgggctcacaatcctcgcagatatcaaacaagctgaccgatatgcaatccaaagtggaggctcaggccgacagctttggaaagtatgccgccgctttacgagatctcgccaaacaagcggcttcactgcccgtgggcggagataccgttgccgctcaactgaacgcggctgcagaccaagccacaaaggcgcagcagagcatgcagcaagccgccaccgcgttgggcgatgcggccacgcacatagcaaatggtactgccgatgccgatacagcgcgtcgagatctgaaatcacaaatcgccgccgccaaacaatcgattactcaggcttcagacacgtacaagagcacgctgaaaccgcaactgaacaatctgacctcgtccatggacgaagtggccacgcaggcaagttccgtaatcgacgggcttgcgtcgaccgtcagcagcgtgtcaggtctttctggcggcgtttcagacagcctgacggatatccagtcagccttgactgacgcagctagcgctttgacccgttcggcgaagaaactcgacaacttgtcttcccaactcgcctctatcaccagtggcggcaccaacgacctgtctgtgatttcctctgcgaagcccgatgccattgcttccatgctggcggcacccgtagcggtcgaccgcatcgcgctctatcccgttgccaactatggttccgcgatggctccgttctacacgattctgtctatctgggtcggtgcgatcattctggtcgccatgttgaaagtatcgatttccgaccatgagaaggcccgtatcttagggttgggcaatgatctgccgctcggttcgggagtgggtcttcgcgaggccatgattgccgggcggattgccggaccggccgccgcgttggatgtgctgaagaagccgcgtgccgagtcttccggcaatgcgcggcagttcggtttacgcttgcaccacgaatatttcggccgatacatgattttcggtttccttgctttgctgcaaggtacgctggtgtgtctgggcgatatgttctatctcggcgtgcagtgtgagcatccgattcagtttttgatggtcgggtggttgtctgcactggtgttctcgaatattgtgtatacgctggccctatcgttcggtgatatcggcaaagccattgccgtggtactgctggttatgcaggtagccggttccggcggcacattccccattgaaacactgccgacgttcttccaggtcgtttctaaatggctactgttcccctatgcggtggatgcgatgcattcggccatggcgggctcattcggcatggaatactgggtttccatgggcaaactggcactgttccttattccctcattgctgttgggacttatgttgcgcaagccggtaattcgcttcaacgattgggttatccgcaaccttgaaagcaccaaggtgatgtgagtgttggacggagtgtgtccgagcgccctgaacgcttagcagcctacgacctggcgtgtttggaccgtaacctgcctcagatacggcgttggcgaggcctgtggagcttctgacgctaacgtctacgtggcttgtagccttttttacgactgtgtggcttgagttgctggttcagcggtacatgccggtaactggattgtggatcgcgatgtgtgaggtgccagcatccgcaatattcgcaacggtacacccatagctcggctccacgctcgatcaggctttgatcagcggcacgctgagcctgcgccttatcgtggtacatgattttattcgacgtggcgcaacgtttaggggtgaagtaatgcatagcagaagccagtgtagagcgaccccataaccaagccagtttctggttcccctctggaggggagctgtctgcgcggcggaccgggggcccgggcgtcgggctcccacggtcgcggacgcgccgcgtcgttcggcctcgccgtcggggctggccgggaatggtcccgggcgtgggtctcatgggtatgcggggaggtcccggtgcccgtgcgggttcgggccggggccggttccggatatagggaaagccccttggggcgtgtgctccgaggggcttcctgtacgtgtggtgcggcggcgtgctactctcccacaccctgtcgggtgcagtaccatcgccgtgccaggccttagcttccgggttcggaatggga

SEQ ID NO: 2561 - DNA, 8740 bp, Unknown
  R50_10m  MAG No. k141_30967
ccaagttcttttaccgcgcttcttcaatttttcaatattttcaagaaaggatttccatggtttttcgcgtgtacgtggaaaagaagcccggctttgatgtcgaagcccagcagcttgcgggcgaactgcgcacgatcctcggactgaacggcctcaaggccctgcgcatcgtgaaccgctatgacgtcgaaggcatctcccaagagctgttcggccagaccgtgcccaccgtgttcagcgagcctcaggtggacaatgtggcctacgacctgcccgacttcgccggcgccaaggtcttcgccaccgagttcctgcccggccagttcgaccagcgcgccgactccgccgccgaatgcatccagctcatctcccagggcgagcgcccgacggtccgttccgccaagctgtacgcgttggaaggcgaactgaccgacgccgacgtggacaccatcaagcattacgtgatcaacccggtcgaggcccgcgaggccagcctggagaccaaggaaaccctgaagacccaggtgccggtgcccggcaaggtcgagaccatcgccggtttcaacgagatggacgccgaagccggccagaagttcatcgacgagcgcggtctggccatggatctggccgacctcgaattctgtcagaagtacttcagcgaggagggccgcgagcccaccatcaccgaaatcaaggtgatcgacacctactggtccgaccactgccgtcacaccacgttcggcaccgagctggacgaagtaaccatcgatgacgccaccgtcaaggccgccttcgagcgttacctggcgatgcgccacgagctcggccgcgacgccaagcccgtctgccttatggacatgggcactatcggcgccaagtggctcaagaagaacggtgtcctgaccggccttgacgagtccgaggaaatcaacgcctgcaccgtcaaggtcaaggttgacgtgaacggccacgacgaggactggctgttcctgttcaagaacgagacccacaaccaccccaccgaaatcgaaccgtttggtggcgcggccacctgcatcggcggctgcatccgcgatcctctgtccggccgttcctacgtgtatcaggcgatgcgcgtcactggcgccgcggacccgaccgtgccggtctccgagacgctggaaggcaagctcccccagcgcaagctcgtgaccaccgccgccgccggctacagctcctacggcaaccagatcggtctggccaccggtcaggtcgacgagatctaccaccccggctacgtggccaaacgcatggaggtgggtgcggtcgtggccgccactccggccgaccatgtgcgccgcgaaaccccggcccccggcgacaagatcatcctgctgggcggccgcaccggccgtgacggcatcggtggcgccaccggttcgtccaaggcgcataacgtggaatcgctcgaactcgacggcgccgaagtgcagaagggcaacgctccggtggagcgcaagctgcagcgtctgttccgccgcggcgatgcctgccgtctgatcaagcgctgcaacgacttcggcgcgggtggcgtgtccgtggcggtcggcgagttggccgacggcctgttcgtggacctcaacaccgtgcccaagaaatacgagggcctggacggcaccgagctggccatctccgaatcccaggagcgcatggccgtggacgtggccgccgaggacgtggacgagttcctgatctacgcccgcgaagagaacctcgaagccacggtgatcgccaccgtgaccgaggacccgcgcatggtgatgacctggaacggcgacaagatcgtgaatctgtcccgtgagttcctggcctccaacggcgcttccaagcaccagaccgtgcatgtcgaggcacagcagtcctacgagaccccgtgggacgagggcacgctggccgagcgtatgaacaagctggtcaccgacatcaacgtggcctccaacaagggcctttcggagcgcttcgactccaccatcggcgcgggcaccgtgctcatgccgttcggcggcaagcgtcagctcaccccgaacatggccatggtcgccaagctgccggtgttcggcgagaccaccaccgcttcggcgatggcgtggggcttcaacccgtacatcatgtccaagaaccagttcaccggcgcctacctgtccgtggtcgagtcgctggccaagctggtcgcggccggcttcgagcatgagaaggcctacctgagcttccaggagtacttcgagaagctgcgcgacgagccggaacgctggggcaagccggcggccgccgtgctcggcgcgctgatggcccaggtggacctgggcgccggcgccatcggcggcaaggactccatgtccggttcgttcgaggatctcgacgtgccgccgacgctgatctccttcgccgtggccgtgggcaacatgaagcgcgccacctcccctgaattcaaggacgccgatcaccgtatcgtgcgcatcgcgccgcgctacctggccgacggtctgaccccggacaaggatgcgctgcttgaggtgttctccgtgatcgaggagctcaccgacttccacgatgccctggccgtctctacgccgggctatggcgccaccgccgaagccctgttcaagatgacgctcggcaaccgcatcggcgtgactctgaacgacagcatcgccgtggacgacctgttcaccccggcatatggttcgttcatcgtcgagctggcagacgatgccaagcttccggccgtctccaatttggtcgagatcggcgaaatcggcaccaccacctccgagtacgtgttcaaggccgccggcgagacgctggacctggacgctgtgcaggaagcttgggagtccggcatcgaatccgtgttcccgtaccgttccaagggcgaggacaagggcgcgaccgtcgagaccatcgacttccacgcgccgaagaagaccgtgtacgtcggctcttccgtggccaagccgcatgtggtgatcccggtgttcccgggcaacaactgcgagtatgattccgccgccgccttcgagcgcgccggcgccgacgtgaccacgctgatcatcaacaacctgacaccggccgccgtcgccgaatccacgcaggcgttggtcgatgagatcaacaagagccagatcgtgatgatcccgggcggcttctccggcggcgacgagccggacggttccgccaagttcatcaccgcgttcttccgcgcgccggccgtcaccgaggccgtgcgtgacctgttgaagaaccgcgacggcctgatgctcggcatctgcaacggcttccaggcgctcgtcaagctgggtctggtgccgtacggcgacatcgtgccgatgaccgacgcctgcccgacgctgaccttcaacaccatcggccgccaccagagccgactggtccgcacgcgcgtggcctccgacctctccccgtggctgtccaagacttcggtcggcgacatccacaccgtggccatctcccacggcgagggccgcttcgtggcctccgacgaggtactcgcccagctcagggccaacggccagatcgccacgcagtacgtggacgagaccggcacccccggcatggacctagatgtgaacccgaacggctcgctgctcgccatcgagggcatcaccagcccggacggccgcgtgtttggcaagatgggtcactcggagcgttccggcaacggcctgtacgtcaacgtgcccggcaacaagtaccagccgatcttcgaggccggcgtggaatacttcgccgcctgataatcggcgcgtatcgcgtctgatacggcacacagggaaggaactctcgggttccttcccttttttgttcatgccggtcatgggctaaggttggggtgttcgcactaccgaatccgccgctgaaaggacctgtcgtcatgccgatcaacgaggcattgttcgccgcgatgaaggccgccagctacatcaagcccaacgcgggcaagtcgtacaaattgcagcgcgtggcggaagagcttatcgccaagcaggcacccgccaatccgaaatgccgtgtcgaggacgccttcgcgcctatggcggatggatatgccgtaccattgcgagtgttcacgccgctggtcgcctatggagcgcccctgcccgaagccctggaggaatcttccgccaatggcacgccagtggcctcggcaatatccgcgattctgcccgccgtattacccaaagtcctacccaaaatacccatcaaggaaagcacgtcgagcggcaacaccgacggtatttccggcaatgccaacacggaacttccctcagtcacgccgcgtggcacgatcctgtttttccacggtggcggttggaccacaggcggcatcaacctgtacacgcaggcttgcgcgcatatggccgtacgtctgcaacgccgtgtgatctcggccgagtaccggctggctcctgaataccgcttccctactgctgttgaggattgctatgaggtagcccggcagctgtttgctggggaattgccgatttctggggtgggtggttctgttgatgttgaccacccccagtcggctgcgccgacagcccccaccggcgggggcgatatatctgcgacaatcccagcaccggatcccgacagcatcgtgctgtttggcgacagcgcgggcggcaatcttgcggccgccgtctcgctcatggcccgcgaccgcggcgagttcatgccgcgcacgcagatgctgctttacccggtggtcggcaacgactacaatcccgagaccagcccgttcgaatcggtgcggaccaacggcaccgactacatcctcaccgcacaggacatggccgactacatcgacatgtaccgttcgtccgtggccgacctgaccaatccgtatttcgcgccgctcaccgcgcatgacctgagcaatcagccgcgcacgctggtgttgtccgccgaatactgcccgctcagagacgaggacgaagcgtacgcccgtcgtctgcaattggtgaacgacaacgtctcctgttaccggattcacgacggcatccacggttatctgctcaacacgtcggccgtagggctggtgtccaccacttaccggatcatcgagcatttcctcgacgacacaccgctggtgccggctcccggcaccggcaccaccgccaacgcaccggagggaggcgacgcatggcaagacgtacttggtaccgactagacaacatcggcaagttctactcctcccaggctggccgctcctcgcagaccgtgttccgctattcggccgagctggcggacgacatcgccccggacatcctgcagcacgcgctcgaccatgccatcgcccagttcccgagcttcaacgtgcacctgctcaacggcatgttctggcattacctcgaacagtcagacggccggccgctggtggagccggaacatctgccgatatgctcgcgactgcattacgggcccaaaagcatgctgttccgcgtgagttatttccgcaatcgtgtcaatctcgaggtctcgcacatcatttcggacggtcgcggcgccatcaacctgttcaagtcactgttgcacgcctacatcgccgagcggtacgacgtgccgggcgtgccttcggattacgacggttcggatagcgacaaagccgaaaacagcttcgacaaatactacgagaaagacaaggccggtgccgcgcccggcacgaagatctaccggctggccggccccatcgaccgggacgcgcccacgttcatggaatatcacgtcagcgccagcaaggtgcttggtgcagcgcatcagtgcggagtgagcctcacctcctacctcatcgccgcgatactgtgcgcgattcgcgacgtcatgccctcgcgcgcccgcaatcgcgcgattcgcgtggatattccggtcgacttgcgcgccttcttcaggtcggagaccgtgcgcaacttctacggcatgacttacgtggcgtacacgccggccgatatcgaagccgatgaggactccgcgaaaacttccgcaacgggcccagacgcgaccggcgacggccagcagtccgccgcccgcaccgcgcacggcaacggtatgggtggattgctgaccgatgagccgttggccgacatcgcccgccatgtgcaggagcagctcgaccatgccaccagtcgcgagcgagtcgaatcgcatatgaaccgcatgattgcgctggaaaagaatccggcgctgcgtctcgcgccctcccctgccaaggactgggtgctggagctggcccggttcatcgccgaccgcgagaccacgaccaccgtctcgaaccttggccgagtcaccttggacgaacgactcgcgcgccatgtgcgttcggtgagcttcctcaccacaccggccagcctgaatttcacggtctgctcgtttggcgacgacctgagcatcggcatctccaccgtctaccatgatctgaacgtcatcaagaacctgtgtcggattctcgccgcgcagggcatcagcggccgtatgaacatcgccggcgcgcatgtggagaaaggagcgtcggcatgaagcattgcgatgcctgcaacgtcgatttcaccggcgatatggcccgttgcccactctgtcagaacgaattgcacggcgaggcctctcccgccgcattccccgcgcagcagatctatctgcgtccgaggcgtttggcggtggagatcatcacgtttgtaaccggcgcgattctgctgctgcatggcttcttcagctatctgttttcgtggccgataccgattgccagtgcatcggcagccgcgctgatcatcagcgtgctgttcatcaacagtgcgattctgcacgcgccgcggccgcttcgcctcatgtttcgatatttctatatcatgctggcgattgcgctggtctggtttgtggcgacgatgaatcatgtcgtcaccatgttcgtcataccgatcacgtgtctggtttcgctggtctttgacgtggtgctgcttatcgtgctgcgggccaaggccattgaccagtacgccaagtatctggcgttcgacatcgtcgccggtctgctgcctctgacgttcattccgctcggctgggctccgtgggatgtgctggtgatggtcagcgggctggtctccctgctggtgctgctcggcctgctcgtcttcgcccgccgtcagctcttctcggaattcggcaaacagttctcggcgtaagttgactgatattgacgtttaatagtgatggcccacaggaagagtccctgtgggccatcactatctgttgtgtatggatacgcttaatcgtctacttcatagtggtcgacagatgccttcacctgcgccgcatcggcatcgctaccggtttcgaattttaccttttctcctgcaggccaagcattagtactggcgtatacttcggcagccttcacgccatcggcatcgtatagagccaatatcaagttgacggtaccgaaatcgattccgctgatgttttcgatgacggctgagtatgcgtagtagccatatccgtcatcagttttctcaaaagtcgcagaggcaatcagattattcagcgcgtcttccgtttccgtctttttcttgacggacgaaccgttggcaacaatatcattcaatggatcttgatatttactgtctaccgtgagcttgtaattatcgacaaaatccttgagcaatgccgaacgcttatcgtataccttagtccattcggtgctgtaatccgagctgagataggaataatcctcgttcactttttgtgaatcctcaagcaggttgatataagtaatgactttctcctgcaacttcgaatccttgaactgccgctctttcaaaggctcatcgttatcgatttcagcctgaacagcatctttgacatgcttgacggaatcggtatctttcttctgctcgtactggtcgagaacatccgaacgcttctgatacgcttttgcgattatggacatcgcctcatcatccgcatagtctggaccgtcatccttttgagtgttaccgcagcctgcagcgccaacgatgaacaccaaactaacgaccgctgcaagtaccgtcttacccacgtttcgtacataggaaatcataagagtcctctcaattcctcgtttttcctatgacgcgactgcataacctccaagaataaatcagttcccaactgatttttgacgataaataattgaccttgctataccataaaaaagcgctgttactcatgcctcatagcatgagtaacagcgcttggcaacaatgtagactattttttttcggctctgttgtgtggatattcaccgtatacgagtccatttctgcaatagatgaatacatcttttcaatcaccgtttttgcctgctcattagcattcttcaacaaatcccccttattcagtttcttttccgactgcgttttggcgtctttcaaggcatctgctgtatctgaaacttcattgccgttaaatagtgaagattcttcatcaaagaatctcaatgaatccgggtccaccgaaactgactagatagtaggtgctggcagcgtgatgtcgatggttcgattatgcttattgacatcaatctcagccttactcagatcgacgccggcacgggcctcaaacgtatagaacatcacaaatgatttttttattgaggagagacatggtggtgattaacgcaatttacaaaaagctttacgcgcaagactgtgtcagc

SEQ ID NO: 2562 - DNA, 4011 bp, Unknown
  R50_10m  MAG No. k141_31056
cttcagggggtaatcgggattatcgtgcggaatacgggttgaccaccatgccgcaacgctggaagttcttcacgtcgacgtagccggtggaggccatagcgcgcttgagggcgccgatgaagttggtcttgccgtccgcctggtggctcggtccgaacagcacctgttcgagcgggccgaccgtgccgaccgtggtgcggtagccgcgcggcagcgtctggtggcgggcttcggaaccccagtgggtgcccttgccgggggcctcggtggcgcgggccagcggcgcgccgagcatgaccgcgtcggcgccgagggccagggccttgacgaagctgccggagtcgcccatgccgccgtcggcgatgacctgcacgtagcggccgccggattcgtccatgtagtcgcggcgggcctcggccacgtcggcgatggcggtggccatcggggcctgcacgccgatggtctggcgggtggcggagaccgcgccgccgccgaagccgacgagcacgccggccgcgccggtgcgcatcaggtgcagggcagcggtgtagttggatgcgccgccgacgatgacgggcacgtcaaggtcgtagatgaacttcttgaggttcagcggttcctgaccggaggagacgtgctcggcggagaccacagtgccgcggatcacgaacaggtccacgcccgcgtccaccacggtggagtagaactgctgggtgcgctgcggggagagcgcgccggccacggtgacaccggcggcgcgaatctcgtgcagacgttgcgtgatgagctccggcttgaccggctcggcatagatctgctggatacgctcggtggcctgatcggccggcaacccggcgatttcgtccaacagcggggtcgggtcctcgtaacgggtccacagaccttccaaatcgagcacgccgagcgcgcccatcttgcccatggcgatggcggtggccgggctggtcaccgaatccataggggcgccgatcaccggcacatcgaactcataggcgtcgatctgccaagaggtggagacgtcctcggggtcgcgggtgcgacgggaggggacgatcgccacatcgtcgagtgcgtagccgagacggccctttttgcccaaaccgatttcaatttcctgagacatggttgtaagcctattgcccgggtgggacgccaacaaggtcgtttcccacggaccggacgattgcttcaagtcgttacaaacatgcgctatgactaaatcatcttcacaccatctatcaggaggaagcatggccaaaatcaaggtcgaaggcactgtcgtcgaactcgacggcgacgagatgacccgcgtgatctggaaggacatcaaggatcgcctgatcctgccgtacctcgacgtgaacctcgactactacgatctgggcatcgagcaccgcgacgagaccgatgaccaggtgaccatcgacgccgcccgcgccatccagaagcaccatgtcggcgtcaagtgcgccaccatcacccccgatgaggcccgagtcaaggaattcggtctcaagaagatgtggaagtcccccaacggcaccattcgcaacatcctgggcggcacgatcttccgcgagcctatcgtgatgagcaacgtgcctcgtctggtgcccggctggaccaagccgatcgtcgtggcccgtcacgcattcggcgaccagtacaaggccaccgatttcaaggttccgggcgccggccagctgaccgtcaccttcactccggacgatggctccgagccgattcagcacgtggtctacaactacggcgaagacggcggcgtggcccaggtgcagtacaacgtcaacgattcgatccgcggtttcgctcgtgcctgcttcaactacggcctgatgcgtcattacccggtgtacctgtccaccaagaacacgattttgaaggcctacgacggccaattcaaggacatcttcgctgaggtgttcgagaccgaatacaaggacaagtacgccgaggccggcctgacttacgagcaccgcctgatcgacgacatggtggccagctccctgaagtggcacggcggttacatctgggcctgcaagaactacgatggcgatgtgcagtccgactccgtggcccagggcttcggttcgctgggcctcatgacctccgtgctcatgaccccggacggccagaccgtcgaggccgaagcggcgcacggcaccgtgacccgtcactaccgccgctggaagaagggcgagaagacctccaccaacccgatcgcctccatcttcgcgtggaccggcggcctcaagcaccgcgccgatctggacggcacgcccgaagtccgtcacttcgccgagacgctggaaaaggtcatcgtcgacaccgttgaaggtggtcagatgaccaaggatctggccatgctcatcggcccggacgaaccgtggctcgacaccgacggcttcatgaacgcgctggacgagaacctggccaaggctctggccgagtaaatcatcgaacacatcgtgcggacctacatgggtcatgtcatgtcgccaactgtcatgattgtcgtgcttcatctggaatgttcctcagcacgacaatcatgacagttgttcgatacacgcgcgaaatacccctaattgttcccggatatgtggcgatttgtccactggtccgggactttttcgtatacggcctactagaatcgtgattcagtttgttttcacgcccgcttgaggaggtttcgccgcttatggtgttcgcacgccgctcaaccaccctgctcgccgccattgtcgcatcctgcgcgatggtgctgtcactgaccgcgtgcacctcagacaataagaccgttgtagatggtcaaaccacggtgacgtccaattctgccggcggcgtggccgtgttcacgccttcggacggcattacgctgaatcagcagacgccactgaacaaatgggcgaagctggtgcccgacctaaccaaggccctggtcgacgccggtttcaagaaaggcgatatcgatcatacgacgtccgactcgttggacaagcaaagccgcgccatccaagactttgtggtcgatcatctttcgaataacaccacggacgattccggcattgccatcgcgcccgacaacatgacattgctcgtggctccagtagtcgaggccgacgcttccactcgccaatacggcgattacgtcagccagaacctgagcaccaacgatgccacggatgagggagctacttctgacggtgattcttccgaagacagctcttccaaagatgactcgtccaacactgagagcgacggcactgcatcggacgagcaggcgcaggccgtggaccggctggtctcatcgctcaagctggccaaggaatccggcatgcatgtggtattgctcggcaacagcatcgaggggtataggccggacgccttcgtcaagttctcggacgcccagaccatcggcaagctacaggcggaaaagatggtgtccaaactcaagttggataaggccagtaaagacaaccccaaatacattgaggtgctgctgccatacaccgccgtggacgaaaaaggcaacgccaacgattccacgttcgcccaagaggcgttccgtggtatctggcaggtactgggcccctactatcagaagggcgttgtggaaagcccttcaggcaccttggacggcaaatccacggaaaacgattggcaagccgtggcctacgatgccgccaaggaaggctccactgcgaaagtgcttgacaagcgtctggcaaaaaccgacgggcagtccacactcacccgtattgacggcatcatcacgatgaacgactatatcgcctccgaggtcgtcaaggaattggacgatctgggatacaccggctctgccgccgatatcaatccgcagatcaccatctcgggcattgtcggcaatatcaccggcaagaaggatctcagccgcgacgcagtgccggacccgatcaaatcccctgaaaacgacaacgcaaacgactcatc

SEQ ID NO: 2563 - DNA, 4458 bp, Unknown
  R50_10m  MAG No. k141_31181
attgtgatgcgcattatgctgggcgccaactcggtgatcgtcggcctcggccaaggtttccaaccggtgtgcggctacaactacggtgccggcctgttcgcgcgcgtcaaagaagggtactggttctgcgtgcggctcgccacctgcgtgctcgtggtgttggcggtgttgctgtgggtgttcgcaccgcaactggtcgagatcttccgctccgacccggccgtggtcgcggtgggtgtggccgcgctgcacatccaatgctgcacggtgattctcaacggcttcaacatgatgggcaatatgatgacccagaccatgggccgcaccggcatcgcctccttcctggccctgtgccgacaaggtctgtttttggcaccgatcgtactgattctgccgatgatgttcggcgtgctcggcgtggaaatggcccaatcggtgtccgacgtgctgacattcgtggtcaccatcccgttcatgcggcgaatcctgcacgaattgcggtagatgtcatcaagattttcgacttccagaccaggtggaccgagcatatctcgctgaatctctgtagtttttccttaccgttgcgttcattaggtcgattatgcgttcattaggtcggtgccctgcttagcatgagataatgagcattggaatgaagccattcttgaaggcagtgttcatcacaagtgacctaatgaacgcataatcgacctaataaatgaatggcggatggctaatacggagcctgaatgcagaatatgaaacgtatgaaagccaaccaggcacacaagtggcctgtgccggagcgcatcgaattgctgtaccgcaccatggctgacgcactcggcccgaccggatggtggccggcggagaccacgttcgagattatggtgggcgcggtgctgacgcagaatacggcgtggggcaatgtgaatcgttcgcttgcggcgttgaacgcggagggtgtgctcgaaccccataagctggtggccatggagccggagcgtttgcaggaactgattcgaccgtcaggcttttatgtcaacaaatccaagaccgtacagtcgctgagttggtggtatgtggagcgttgcggggccgcgcccgagggtgccgcggctatttccgatgccgaattacgggccgagttgcttggattatttggtattggcggcgagacggccgacgatctgatgctgtacgtgttctcgcgccgcacattcgtggccgatacctacgcgcggcggctgttcgccttccttggattcgacgtgccggccggctatccggcattccacagggcctattcgcccgtggtgctggatacgaacctcagtgtcaaggatttgcaggaattccatgggctcattgacgagttcggcaaggcctaccgcgacgacgcggccaaaagcgagtcctttttgggtggatggagggcttgactgcacggcgaatcgttctcaataagaaaagtgtgaggcccgcacggtgccaatcgcacatctgaatccttgactggctgcgctcgatgctgggtgtcgaaaacgagtctgtgacagaatagttcgaccgacacaatcgccaaaacgccgaacaggagccaatgatgaccgaagacaagccgatcgccaagccgattatcgatgatgcgacgcgcgagaaaatggcgcttatgttctctggcgaggtctacctgccggatgatgtggacggcttttttgatctgcaggccgcccagcgtgatctccagctcgaactcaacgccacgccgctgaccaacccgaagcgccgtaccgaactcatgcaggcgttcttcggcgcggcgggggagggtctgtacctcgaatgcccggtgtatgcgaactggggctgcaatacttattggggcgagcgctgttactccaacttcaacctgacgctggtggacgatggtgagatcttcatcggatcccacaccatgatcggccccaacgtcacgcttgtagccaccggccatcccgtgcgtccggacctgcgctatcagggtgcccagtattcgttgccagtccacatcggcgagaacgtctggatcggcgcgaatgtcaccgtgctgcccggggtcaccatcggggacaacgcggtcattggcgccaactcgctggtcaccaaggacatccccgccaacacggtcgcctatggcagcccgtgcaaggtaattcgcgaaatcaacgaacgcgacgacgtctactactggcgcgaccgccaattcagtgagcgttttaagctcaaagagcagtagcgcgaaagctcactcccacacgtcgagcttgcgatttttgtagaaatactcgcggtccttgtcgccgatttcacgcacgacctcgcagggcgcgccgtaggtgacggagttggcggggatggaatgtgtcacgaccgaaccggcgccaatcacgcaattgtcgccgatggtcactcccggcagaatcgacacgttcgcgctgacccacacgttgcgcccgctgatcaccggaatgcaatacgtgtaatggtgctcgcgcagcaccggcaacacggggtggccggcggcgcattagcacggggaacggttgaacgagaagtggattggcatgtggtggtatcgaacatactgatgcgtgtgccgccgagcctgtccagatggctgcctatatgaaccagtgacaggaaatcgcgggagagcaaacgagaggagtgtgcatggggcagttcggcgtcatgattggccagttagtcggatttctgatcatgctgatggtcggatacggatgtgtgaggctccggttctatggtcagacggcgttggacggcatgtgctcgctgctgctcaacgtgctcatccccgtgcttgtgttctcgaacgccgtcgacggcgcggaccgcgcgcagcttgccgccaactggggcgtgatgctgctgaccgccgtgatgtacgcgctgctcatcctggtgttctggctggtcgccgaactgttgcggctcaaaggttcgcgtagccatgtatttcaggcgtcgcttattttcggcaacgccggattcatcggcattccgttgattatggcactttggccgcagaacggcgcgatttacgtggcgctgatgtcgatcatcgaccagacgctgctctggacgtacggcgtatggctgtgcgagccggtcgacgaagcgactgacggcaacgcgattggcgcgcgaggtgcggtcgtgaacggttcggtgaacggcgccggttcggtgggcaatgctggttcggcgagcaatgccgcaaacggtggttctccggccgtcgtccgcccctcgccaggcacccgcgtcctcggcctgcttaaacgattcgtcaatcccgccttcgtcggcgtgatgctcgccctgattctgattctgctcggcgtcaaggtgccggacatcatcctgaagccgctgcacaccatcggcaatatggccacgccgatgtcgctaatctacttgggcggcctgttcgcgctgaccaagtggtggggcgtcctcaaacgctacgaactctatgctggcctagtcgccaagatgatcgcattcccgctcgccttctacgcgctactgaccgcgctgaccggcgcattgccgcaactgccgatcacccatgacatggtgctgatgattacggtcatcgccggactgccgaccatgaccaccattgccatgttcaccggtcgcaagaacaacatgcccgagtatgcggtcggcttcgtgcttgtaagcacgctgttctcgctggcctccctgacgattgtgtcggcagttgtgttctgaattgtccccttcgacgaaaagaatgccgggggcctccggcgcttggaatctcatcgacgccgccaacgactcggcatccgaggcggccgtgccgtatttcaaggagatattcgattacgcgcgcacgctcgatccgcagcatcgcccgctgacctacaccaatctgctgatggccgccggaggcaaagacaagtgccatcagttcgcggatgtcatctgcctgaaccggtattacggctggtatgtgcaagatgggtatcagctcatcggagccaagaaggccttcatcaacgagatgaaccaatggatgaacaccgaacccaacaagccgtttctgttcaccgaatacggtgcggacaccgatgccggtgtgcacaagctgccgagcgtgcaatggagtgaagagtaccaatgcgagtacctcaccatgcagcacgaagtgttcgacatgttcgaggcagtggtgggcgagcaggtatggaacctctgcgacttccaaaccggtgaaggcatcatgcgcgtcgacggcaacaagaaggacgtcttccctcgcgaccgtcagcccaaagccgccgcctatgtactcaaggagcgttgggagactaagtagcggcccgcccctggaatattccaagagcaacacacatcgcataa

SEQ ID NO: 2564 - DNA, 2526 bp, Unknown
  R50_10m  MAG No. k141_31192
tatgagcatgccgctcgatctatacgtaatccggcatggcgaatccgaagcgaacgtcatcgtccaggcgggcgagcagggcgacaattccctgtacacgcaggacaacgtcaccgtacccgaccgctcctggagactcaccgccaccggacgcaagcaggccgactgcatcggacgctggctcgtcagccagcagcagctgttcgaccgttacatggtctcgccatacgtgcgcacccgcgaaaccgcggccaccatggccctgcccaaggccaaatgggaggagaaccgtgtgctgcgcgaacgttcttggggtgaaatcaacaccatcaccaaggacgaattcaaaaacaactacgcgcgcaactggaacttcaagaacaccgatccgctgtactggcgtccgccggcaggcgagtcgattgccgatgtggccgaggaccgtgtgcacaacatcctgacctcgctgagccgcaaatccgattcggaatccgtggtcatggtcacccacggcgacttcatgctcgccctgatgctcaccatcgaggatctggccgacgaggaattcctgcatcgcgccgactcggacgactggaagatcaccaactgcacctgcctgcactacacgcgccgcgacccggaaaccggccgcacctccaagcgtgtgcgctgggagcagaccgcccggcccgtgctcgacgagacgaccggccgctgggaggtcaaggtggagccgtggcgcgaattcaagcgcccgtatctctccaatggcgatttggtggatgtggtgcaggccgtcgatccacacctgctggagtattacggcaaatagcctttcccggaagagagacttcacaaaatcttcgtgagctagaatggtgcgtggtgcggctggttgtgaatgccgtgccccaagcgagagcgaggagagtagtaatgtccaatatcttccaatggcaattgcatggcgacggcaagacgctggcgcccggcgaggtcgtcgagcccgatgaacgtctgacttgggtgcgcaccgccggtatcggcgcacagcacgtcatcgccatgttcggtgccaccttcctggtgccgattctgacgggcttcgacccgtccaccaccctgttcttcacggctatgtccaccgcactgttcctgcttatcaacaggaacgtgctgccgagctatttgggctcgtccttcggcttcatcgcaccgatcaccgcggtcaccaccgccaacaagggcattgcggtcgccagcttcggcatcatggtcaccggtattctgctggccctgattggcgtgctcgtgcattacgccggctccaaatggatcgacatcatcatgccgcccgtggtcaacggcgcgattgtggccatcatcggtttcaatctggcaccttccgtgtggaccaacttccaagccgcgccggacaccgcactggttaccctgctggccgtgctgctcgtggccgtgctgttcaagggcttgctgggtcgcctcaacattttggtcggcgtaattatcggctatgtatatgcctgcatccgtggccaggtcgacttctccgccatcggtgacgccgcatggatcggcttcccgaagttccacctgccgcaggccgatttttccatccttcccatgttcgtccctgttgtgctcgtgcttgtggctgagaacgtcggccatgtcaagtccgtggcccagatgaccggccgcgactacgacaaccagatcggcaccgccctcatggccgacggcctgggcaccacgctcgccggcttcggcggcggctccggcaccaccacctacggcgagaacatcggcgtgatggccgccaccaaggtgtactccaccgccgcctactggtgcgcagccgccttcgccctgatcctgagcctgtgcccgaagttcggcgccgtgatcaacacgatccccgccggcgtgctcggcggcgtgaccacgctgctgtacggcatgatcggcatgatcggcatccgcatctgggttgagaacaaggtcaacttcgacaagccgctgaacatcatggtggcagccatcaccatgattattgccatcggccaattcgcgttcactgttggtggcatttccttcaacggcattgccattggcacgatcgtgattcttgtggcctaccacggcctgaaggccattggcaaggcaaccggcactatcgccaaagacgatccggatattttgtagtgtgttttagggctactgggccgtattgtggctcagcccttttgcacaatggctcctaccttcacgggtaggggccatttgcgtgttccatggggcggtgctcgccttacgtggtggtagaacccatggggcggtaattggcccatggggcggcaaacatcccatggggtggtaaaaccctcatggggcggtagacgaaaatggctttattctgcggtttcacaatttcttcaaaccgccccatgggcaagttgccgcctcatgggcgagttaccgcctcatgggcgagttaccgcctca

SEQ ID NO: 2565 - DNA, 2940 bp, Unknown
  R50_10m  MAG No. k141_31339
cagtgtcgtagatcggggccggacggaccgcaagggtctcgatgttccggatcagaccgaagttgctgtaatgcctatctgtattgcgcatgaggtagtcgaccacgagccaatcgtccgtggcgtcacgaaccgcccgttcgtctgcgccgaagccgacggcggcgcggatccactggtcatgcgagttgaggccgttgacggccttgacggattggagcacctgccaggcggagaccagctcctcatgattggagagcatgtccgcgcatgtggacaccagacggttgccgttgcgtgccagggaataccggacggccggaacgcccaatcgcatgcagagcctcgaggcgatgacctcgttcatcggctcctggccagtacggcccgacttgacgagcagtctcctgccggtggccctgtcgatcgtccagcgtttgggaagatcgccgctagtggacacgtcggggacgttgaggctgatgtcatgggacgacgagtacgaggtgagcaggatctcgcccagcgcctcgtcgaaggaattgtcgaagaagttgacgtccttccattcggccgggtcgtcctcgcgtctgacccagtactggtccgacaggctcagcccgtaggtcctgtcgagcagttcatcggtcgatgccgcgccaagcgattcgagcacgcggcggatgccgtcgcgggtggaggggatggcgcgggacctccaccattcgtcgatcctcttggcatacagcgcgctcttgccgtgcgtggtgaactccaggggcagacgatcatggtcaaggacctcgccagaggagcacgcgcgaccggactcgggatcgtattcgaacgcaaggaccggatggtccccgcacatgatcagcttgcgtggcatgattccgctccctccaaacttggtctttaaagattctacaggcacgaattacgcgcgagacggcgtcccgtttcatgacgcgatgcatggatatgggccacttccgcaaatcgcaagcctcggcgatgacgccgacaactgatacggtagtcatattggtttcccaaaggtaaagaggcatgaccatgggattgttcgacttcgctaagaactctttgggtgacgtgccgtccggcttcggcggtcggggcgatatcgccaaccatcttttcaacgaccgatgaaaaggctccggttgaaggctatggtatgatgacacgagcgtgggaatttatgaccgaaggatactcacataaagcggcacacatcgttgagcatatcattctcgcaatcgcgctgatctgggctggaggctgcactctcatatggatgcaaacggatatgtcgcatcgcatcgtgaacgcgaaatccgctgacggcacctgcgaagtgaccatcagcgaactcggctcgcccatattcttcggtccaagcagcatcacggtcaaagtctcttgggacaccgatcccggtgttatcggttccgagaacgtcacggaaatcaaaacggatctgcacaacgacggcaaatcattaggctcgggcaacttcaccgtcacctggcacggcaacatcccgaccgtcaccacccatggtgaggaacagccggaccaaagctacacattcaactggaaataaccgctccgaacatcatgtctctcccgagagtagtcctcacaaccgggcaggtcccacaaggagcatagctcatgcacccaccgaccggtctcaagcacatgagacacttggagccatgactaccatcatcatgcgcacctccgagggcgacatcaccatcaacctgttcgacgacaaggccccgaacaccgtggccaacttcctgggcctcgccaccggcgagaaggaatgggcggacccgtacaccggccagccttcccatggcaagttctacaacggcctgaccttccaccgtatcatcaagcagttcatgattcagggcggttgcccgctgggcaccggtaccggcggccctggctacgagttcgacgatgagatcgacccgagcctgaagttcgacaagccatacctgctggctatggccaacgccggtctgcgtcgcggcatggacggcaaggtccatggcaccaacggctcccagttcttcataaccaccgtgccgaccccttggctcaacggccatcacaccatcttcggcgaagtcgccgacgacgcctccaagaaggtcgtcgataagctcgaagcactggacaccgatccgatggatcgcccgctcgagccggccgtaattctgtccgtgaacgtggccgagtaagaccgacacatatacagcaaaggtcctgattggtattccagtcaggaccttttcgtattcttggctccctctctgaggggagctggcgccgcagacgtctgaggggagttccgcaagcccgcgctgctcccctcagtcagcttcgctgacagcccctcccggaggggagccaagcaacggcctacttcatcttgcgcagtcgaggttcggcggattccttggcaccggtgatgcggtacacgtcgaacacgccatcaatcttgcgcacggctgccagcaacgagttgagatgctgcggatcggccatttcgaagctgaactggctggtggccacgcgatcggaaccggtggcgatcgtaccggaaatgatgttcacgccatggtcggaaagcacacgtgtcacgtccgaaagcaggtttcgtcgatccagcgcctcgacctgaatcttgaccatgaacaggcccttggtgctggtccattcgacttcgaccacacgctcaggctgcttgtttttcagatcgatcatgttctggcagtcggtgcggtgcacggatacgccctgattacgggtgatgaagccgatgatattgtcaccgggcaccggcatgcagcaacgggccagcttgatccacacatcgcccacgcccttgacgga

SEQ ID NO: 2566 - DNA, 6837 bp, Unknown
  R50_10m  MAG No. k141_31406
aatgactcccattagactcccacaagagaagagcaatggcgaaatcccaacgttgctaagctctcaaactcagatgtggaagtagagctcgtactcgagcggggtcggggccaggcgagcctggtcgatctcgtcgcgcttgagaccaatccaggtctcaagcaggtcgtcggtgaacacgtcgccggcggtgaggaagtcgtggtcctcttccagggcatccatagcctcggccagggagctcggcacctgcttgatgccagcgtgctcttccggcggcagttcgtagaggtccttgtcgaccggctccggaggctcgatgtggttcaggatgccgtccaggccagccatcagctgggcggagaaggccaggaacgggttgcaggacggatccggagcgcggaactcgatgcgcttggcagccggggaggtgccggccagcggaatacggatggcggcagaacggttacgagcggagtacaccaggttgaccggagcctcgaagcccgggaccagacggtggtaggagttcagggacgggttggtgaaggccagcacggaggaggagtgcttgatcagaccgccgatgtaccagcgagccagatcggacagaccagcgtagcccttctcgtcgtagaacagcggcttgccgtccttccacagggactggtggcagtgcataccagtgccgttgtcgtcggcgatcggcttcggcatgaaggtcgcagccttgccggccagagcggcggtctcgtggacgacgtacttgtacttcatcaggtcatcgcctgcgtgctgcagggtgttgaagcggtagttgatctcctgctggccagcgccggcgacctcgtggtgggaacgctcgaggatcagaccgaccttctgcaggttggcgaccatatcgtcgcgcagatcctgggtgtggtcaatcggcggaaccgggaagtagcccttcttgacgcgattcttgaaaccgatgttcggggtgccgtcctcttcggagtcaacgccggagttccacggagcttcgatggagtcgacctcgtagaaggagcgctgcatggagttctcgaaacgcaccttgtcgaagatgaagaactcggcctcaggagcgaaggatgcggtgtcggcgatgccggtggacttcaggtaggcctcggccttgccggcgacctgacgcgggtcgcgggagtacggctcgtcggtcagcgggtcgacgatggagaaggccacgtcaagggtcttgtgcttgcggaacgggtcaacgaaagaggtctcaacgtccgggaccagcttcatgtcggactcgttgatggcctggaagccctgaacggaggaaccatcgaacggcatgccgtcggtgaaagcgtccttcaggaattcgctagccggcacggtgaagtgctgctgaacgccgataagatcggtgaaacggacggagacatactcgatgccttccttgttgataagggcctcgacgtcttccttggacttgagttcggtcacgggaccgctcctttcgtatgagatataacggtatatatcgtaaaatagcgcgtttcgccggctcgaaacttgggttacgagaatgtttcgtgactgtggccgacaatcgcgcaggcgcgttatttcaacgaaacatcattacagaatggaaacggagactatcgggggagtaggtagagatgtccgcaacgtggacagtgggtattgacaggtgacgtaggtggatgtaagtggacgtgattatgagacatatgacgaagccccggaaccgattgaacggattccggggcttctgtgcgatttggttgtgtgctgccgatcagcgaccgcgcatcgcgcggcgggagatcttctgcgggcggttcggatccatgcccttggggatggcatagcccttcttggcctgcagcgtgcgaagacgatcgttcagcgtttccatctcggccttggtcagcaggaagcgacggcgcggatgaatcttggcgatcagtgcgttcttgtggtccgtgggctcgtagctcttggacttgatcaccgtgctacgcagcttggtcagcggcacctgcttggggccgtggcccacggcgatgcggtatatcggaatggaggagccggcggtgacgcccttgatatcgcgttcctgacgatccatcgccttcatgacgcgaccgtattcgccttcgccgatcaggtagatgccgttcatcgaagtgccgcgccagatggcatccttggtcttcgggtcgatccacaccggttcctgcgggaagtcaaagccggctttctgcatgttgctcagcacgccgatggcggcaccaggcttgccatcaatctgcttgtagccgactgcatccgcgcggcgggtgagcatcatggtggccagcagaatgccgagcatgatggcggtaatcatggtgaagatccaggtcagccaggtccacttgacaatcagaccgatgatgatcatcacgactacaggcagcaggaaagcaccggcctcaagccacggcagggccttgtcttccttagccgtgtacttgtagatctggatgatctgcttgattgtgctctgcttcttcggcttcgcgtccttttccgccatcacttcttcctttgttgggacgaaacacactggacaatatcttatcaggtgcgctggtccgaacttgcttgtgctggttggtctcagcgtgtgtgcaacggtcgtccgtcggccttgagcagcgcctcgccgagcgtttcactgaatgtgggatgcgggtgaacgaggcgggctgcgtcggcgagcggcacatggttgccgaccagctgttcggcttcggcgatgatgtcggaggccatcggggagaccatgtgcacgccgagcacgcgcggggtgtccgggttggccgcgtcgcagccggagacgatggtcaatgagccggccgtgccgctcatcagcatgcgcgcgttcgccagcatcggatagttggtctccttgatttcgacgaggtcctctctcgcctgcgcctgttcgacggtgagcccgaccgacgccgcttcggggaaggagaacacgatctgcggcacagcggcttcgtccaccggcttgggattgagtccggcgatggtctccgcgatgacgatgccttgctcaaaagcacgatgcgccagtgcgtgaccggccgtcacgtcgcccaccgcccatacgcccggtttgtcggtgcgaccgtacgcatccgtggcgacatgtccgtggtcatcaatcgtcacgccccatgctgggtcgatgatcgggtcacgcccgatggcgacaagggcgatttcgccccaaacgctctgttcgccgtcctggccttcgcgcgtgtagtgcacggtggcaccaaggttcgcgccggtgtccacatgggtgacgctggcgcgggtgatgatgttcacgccatgacgtttgagctcacgggtcagcgtggtgccggctctccggtcccaggctgagagcacgcggtccttgcgaatcagcagggtcaccttcgaaccggcggcgttccacatcgaggcgaattcaagggcgatggccccggcgccgataatcaccgccgaagagggaaattcgttgacttccagcgcctgtgtggagtcgatgagggcgccggcgaacgggttaccgggcaatgggtgtggcttggcaccggtggcgatgacgatgttcgtggccgtgaggtccatcgtggggccgctgggttcggggacatcggccttgtgataggtgaggatgtcgctttggtcgggggagggaacgaggtggacgatgtggttggaagttgctggagtgatctcatccgcatggaacgcggcattggctcggaacacggtgatgccgcgatgggccagcagtccggccagtcctcccaccatcgtcttgaccacgcgcaggcgatagtcgcgcagcgtgccgaagtcgatgccattcaccgaggcgttgacgccgagttcggccgcacggtgcacggtgtcgatggtgtgggtggcggtgatgagcgccttggaggggatgcagccacggttgagacaggtgccgcccacggtggcgtcacgctcgacgagtgccactttcatgccgagttcggcggcgcgcagggctgtggaatagccgccggggccggccccgatgatgaccagatcaaactgttcgctcatgattgcctccttggtgcatataagtatggctcccatgctagggagccatatgcggctatcgccgccacttcgcctaaaaacagtccactggactgttttctttacggctcagcccctcaacgaggggagccagagtatatatatggacatcagtctgccggccagtgaccgcgcttcgggtaacgcggcttgggaagcctccaacgacgcatctgaatcgaacggctccaagcgtaggagaaggagcgggagcccttggacacggactgttcgccgtacttggcgatgagcttggccttgagcttgcgccacatcagccatacgtcgatgatcacggcaatcaggtaaccgtacataagcgccatcatgatgatggaagcccactggttctgcatcaaagaagtgacgaacatggagacgatcagaatcgcgaaggccaccgggatgaaccattcgccaaggttgaaacgggcatccacataatcacggatgtagatacgccaaggcaggcgttccgccttgggcatgtggttgatatcgcccttctgcatcgcctcgtactcggcgttctccttctcacgcagacgggctttggcggccttggcgctggccttgcggtccaccggaaccagcggacggataccggcggcctgagcctgcttcatcttcggggtaggacggccttttttctcagaaggatcggcggtcttcttcggggcctgctcaacgggaacttgggcctcttcttttttcctaaacggattccatgtcatgctttgaggttacggtgacgttcagacacttgtatactggcgcagccattgcaatgacgccgcttacacacatataaaggaggaccatcatggcaacgctcaccgctgacgagattcgttcgcgcgtcgaaaccgattggaaccgcatcgtcaaggtgctggccgaaaaggtcgcgctgcagtcgatctccgccaagggcatcaccgccgaacatatgaagcgctccgctgaattcgtggcagacgaactgcgcctcgtgggtgtggatgccaaggtggtccaggcttccaatgccgacggcactccgggcgcatgggaggtcatcggctcgcatatcgtttctccggacgcccccaccgtgctgctctacgcccatcacgatgtgcagcctgttccggacccggccgagtggaacaccgacccgttcgtggccaccgaaatcgacggccgcctttacggccgtggctccgccgatgacggcggcggcatcgccatccactccggtgcgctgaaggctttgggcgacgacctcaacgtcaatatcaaagtgttcatcgaaggcgaagaggagatgggctcgccaagcttcattcccttcatcgaggctcaccgcgacgaattcgccgccgacgtgattatcgtggccgattccggcaactggtcggcggacattccttctttgaccacctcgctgcgcggcaacacctgcgtggacgtgaccgtgcagggccttgagcacccggtgcactccggtcagtacggcggcccgattcttgactccaacacgttggccgccatgctcatcgcttccatgtacgacgagaacggcgatctggccgtgcccggcgtggccgcggaagagccaatcggcggtttgcaacgcgaccttgacgaaaccaccgtgcgcgaggattccggcgtggtggccggttacgagttcgccggcaccggttcgctggcctcacgcctgtggaccaagccgtccgtgaccgtgatcggcttcgacgcccacccggtcgagggatccttcaacgtgatcgccccggagacccgcttccgtctgtcgctgcgcaccgcgcccacccagcgccctgaagaagcgcaggaagcactggctgcattcctcgaatcccacgcgccgttcggtgccaaggtcactgtcgaacgcggcgaaaacggcatgggctgggccatggacccgaccgccgtggccaccaaagacgcgctggaagccatgaccgaggccttcggcgttgagcccatcaacaagggcgagggcggctccattccgttcatccccgaactgcagcgcattttccccaacgctcaggtgctggtcaccggccccgaagacccgaaggccaacgcccacagccccaatgagtccatctccctgcccggcctcaagaacaacgtgatcaccgaggctttgctgctggacaagctcggcaagtaaccgaaccgcatcggtaatggtggcgagctgccgtcaggtaggtcacggatgtggctattgcctttgacggcggcttgctttatagtcggggagttgacacgggagctgccgttaggcggctgagaggagattcatagtctcgaccgatggaacgtgaccggataatgccggcgcacggaaatgtcgctcttacccacccgtgcctgaaccaacccgcgcgtggccacgaacatgtgcatcatgtgcgtacatatatccatgtatgttcggcctgcgtacgagcagaagaaaggcacattcatgactgaagctgtggccaaagccaattacaagtggcgcgtcgtcgatatcgtcgtcgccgcaatcatcgccgtcgcatccggcgtcattttctggggctgggacattgtctgctccgccccgct

SEQ ID NO: 2567 - DNA, 4934 bp, Unknown
  R50_10m  MAG No. k141_31463
atcgcctccaaggtcgtcgagaccgccaatggcgagaccggctacgccgtcgagctgaactccgagaccgacttcgtggccaagaccccgaagttcgtcgagttcaccgaggaagttctcggctacgccgtggacgccgacgccaactccgctgacgagctgctcgaggccaaggccggcgacaccaccgtcaagctggctgtcgaggaggccgccgccctgttcggtgagcacgtcaaggtcggccagttcgccaagatctccggcgagcacgtcgaagtctacgctcacaagaagtccgccgagatgccgccgagcatcgtcgccatgatcgccaccgacaaggccggcgccgccgtggctcacgaagctgctctgcagatctccgccatgggcgctaagtggctgacccgcgaggacgttccggccgatgtggtcgagtccgagcgtcgcgtggccaccgagaagtccctggccgagggcaagccggagaagatcgttccgaagatcgtcgaaggccgtctcaacgctttcttcaaggaagtcgtgctgctcgagcagccgttcgtcaaggacccgtccaagaccgtcggcgacctgttcaaggaagtcggtggcaacgccaccgcattcgcccgtgtcgaggtcggcaagggcgaagaggagtgagcctaaggcttactccacgcgcttagcgtaatttcaacgaaacgccatccggttattcaataatcggatggcgtttcgctattccaagggtgtcgttgctagggggtgtcgtcgtaaaccgatacgcttgtctacggataatttcgcactttcggttttgagaaaggcatgatatgactgatagcgacaagccgcgcagagttctgctcaagttgtccggcgaagcattcggtggtggcaaggtcggcatcgatacccatgtgattcgtcgcattgccgaggaaatcgttccggccgtacaacagggtgtgcaggtggccatcgtggtcggcggcggcaacttcttccgcggtgccgaactgcagcaggccggtatcgatcgttcccgcggcgactacatgggtatgctcggcacggtgatgaactgcctcgccctgcaggacttcctggagcaggagggtcaggccacccgcgtgcagaccgccatcaccatgggacaggtcgccgagccgtatattccgctcaaggccatccgtcaccttgaaaagggtcgcgtggtgattttcggcgccggtgccggcatgccgtacttctccaccgacacggtttccatccagcgttccctcgaaatccactgcgacgaagtgcttatgggtaagaacggcgtcgacggcgtctacaccgccgacccgcgcagggacgagaacgccaagcgttttgaaaccctgagctacaatcgcgccctcgtggacaatctggcagtcatggacgcctccgcactgtccatggcccgcgacaacaagaagcgcatccgcgtcttcggcctcgaagagccgggcaacgtgacccgcgccctcgtcggcgatgaaatcggtacgctggtctccaccgccgaatcgcgcgtggccgagtaagccgcaaacgcctacaatcgaatcaaacgttcatagacgaacaacacagacgaacaccaacacacaaggagtgaatatgtctcttatcgaccaggccaaggaacagatggccaggaccgtggaaaacaccaaggaaaacttctccggcatccgcaccggtcgcgcaaacccggccctgctcaacggcatcaccgtggactactatggtgcccccaccccgattaaggccgtcgcctccatcggcgttcccgaaccgcgcaccctgtccgtcaccccgtttgacgcttcccaggccggtgccgtcgaaaaggccctgcgcaactccgacctcggcatcagcccgaaccgtgatggcaacgtcatccgcctgaccatgccggaactcaccgaggaccgtcgtaaggagtacgtcaagctcgccaagggcaaggccgaggacggcaaggtcgccgtgcgcaacattcgccgtaagaccaaggaaaccatcgacaaggccgtcaaggacggcgagatgggtgaggacgaaggcgatcgcctgctgaaggatcttgacaaggtcaccaagtccgttaccgacgagatcgatactctgctggagaccaagcagaaggagatcatggaggtctgattcagaccaggtccggagaattatggaacgcaacgaacaactccatgaagaggccgaggagacgctcgaccggatcaacaagaagaccggccgcaacatgccgcaggccatcgccacaggcgcggcactggtcatccttattgtcgcgtgcctgctgctcagcgtcgacctcttcgtgctgctggtagtcgtgttcatgattctggcgctgtgggagctcagggtggacttcgccaccgtaggcctgcacatcccggtgttcatgctgtggctgtgcgcgtccttcaccctcatcgccacctattattccccgtaccatctcatcacgatgtcgctgagtatcatcgtgtcgattattctggtcgccatcgcggccagcgcaaaaatcagcgtcggcaaccgcctatctctggcggttgccggcaaactgtccaacacggatgccagcgcgcgcctcgaatcctcgttcaatcatgagggcggggaacagcatcattcccggctcagccatgtggctgtgtccgtgcttaccgtgttgtacattccgttgctggccagctgcatcatcatctcgctgactttcaatgggcatccgattgcacacgccatcatgctggtgttcctgcccgccctctccgatacgggtggtttgtttgccggtgcctggctcggcaagcacaagctcagcccgcgtatctcgccgaagaagtccgttgagggcctgatcggctcgatgctcttcgccatggctggcgcattcgccgtattcgcatgcacgtatgatgcctcgaaatgggccactcgttggtgggtgccgatcgtggcgggtattctcatcggcgccgtgggcacgttcggtgatttgtgtgcttccatgctcaagcgcgatatcggcatcaaagacatgggccatctgctcaagggacacggcggtgtgatggatcgtgtggattccattttgatgagtgcaccgttcacctgcgccttgctgtgggtcaccggactgtgattcgcatgcctcgtgcatgaacaatgtggcatcgtgtgtatatcgcacggtgccacatgtcatatatgggggaaatcatcgttcaatatgcgttcgccatgggctaagacatgggccatctgattcgtatgcggcacgccgtatggtggattctgatatttctattgcatgtttgactattttctgatattgagagcgaagcgaacccatcatgaccacacagcatcctgacactccggaaaccggcattactcccggcggcacatcaggtgccttccgtgacgtgctatccaaggaccatgcccgccgtggcaagccgccgctgcactttgtggatatgacgcccgagcagcgcatcgagaaagcgaccgaactcggattgccgaagttccgagtcaagcagctcgccaaccattactttggccatttcgatgtgaatgccgctgaattcactgattttccggcagccaagcgcagcgaggccgccgccgcgttcttcccgcagctcatcaccgaggtgacccgccaagtggcggacgaaggcaccaccatcaagaccttgtggaagctgttcgacggctccctcatcgaatcggtgcttatgcgatacccgacccgcaccacgctgtgcatttcctcgcaggtcggctgcggcatgggctgcccgttctgcgccaccggcaagcttggcctgacccgtaacatgtccaccggtgaaataatcgaacaggtgcgtgtggccgccaaaatgatgcgtgacggcgaagtggccgggggagagggccgcctgagcaacatcgtgttcatgggcatgggcgagccgatgggcaactacaactccgtgctgtccgccgtacgacagatttccgccatgcctcccgaaggcttcggcatttccgcgcgcaacatcaccgtatccacggtgggcgtggtgcccggcatcaagaagctcactgccgaaggcattcccgtgcgtctggccgtttccctgcatgcccccagcgacgaactgcgtgacgagctggtgccgatgaacaagcgtttcaacaccacgcaggtgttggatgccgcgcacgattattggctggcctccaagcgccgcgtcagtatcgaatacgcgctgatgcgcggcatcaacgaccaggccgagcatgcgcagttgctggccaagaggcttaaccattacggcgacaactgggcccacgtcaacccgattccgctcaaccccatcgagggctcgaagtggaccgcctccaagccgggagacgaacagcggttcctggagatcctgcaccgcgcgggcatcaccgccacactgcgtgacacccgcggccaggacattgacggtgcctgcgggcagttggccgctaaggagcggtagttacttcagcgcatccttgattgcgtccacgaagtagtccaaatcagcgggcttgcgggacgtgatgagcttgaagccgttggcgtcgtccacgtgcagctgctcgtcgacgtaatggccgcccgcgttctcgatatcggcggcgatataacggcagggcgcggcggtcttgccagccaccagacccgcgttgaccagcagccacgcgccatgacagatcgcggcgatcggcttgccttcgtgcgcgaactcctgcgccagcgcgatcgcatcctcattgacgcggatacgatccacattgcaggtaccaccgggcaccaccagtaggtcata

SEQ ID NO: 2568 - DNA, 5475 bp, Unknown
  R50_10m  MAG No. k141_31544
aggtaagatcgatgcgctgctggggcttttggagcattacggtgtgattgagctggtgcgctccggtgccgtggccgtgacccgcggcccgcgcgccctgagcgaaaaggtcgtcggttccgaggttaccgggcgctgattcggcgactgcggggagacccagtccaagctcaaagggcggatgtgcatgatgcatatccgcctttttcatgcgtgcatacctcatcacccgtgctgcaagcaaaatgacagcaccttatgctagcattatgacagcaacaaggaggtgcatcatggcaacattgaccatccgaaaaatacccgatgagcagattcaacagctcaaagaagtggccgagaaaaacaaccgctccatggaatctcaggtgcgatccattcttgaagaatggctggccggcacggtggcgcatgaaatcacacgaaagaccaatttctacgacgagatccgcgaattcatgaagaacatggattttgagggactcgacaagggggaactcccactatccgagcgaaattccgccgattcccgaccgccagtatcttttgaataggaatcggccatgattattctggacaccaacgtcatcagcgaaatcatcaagaaacagccagacgaacacgttgccaattggctgaggaaccaagatacaagcaatctggcaaccaccgccatcaccgtcgccgagttgttggtcggaatatgtcgcatgcctgaaggcaaacgacgaaagtacacagatacgaccgtcaagctggcgcttatgacattagaggacaggacgttcgcatttgacacccaggcagctgcggattatgcccatatccttgtcgaacgcgaacgcaggggcacacctaccagtattcaagacgccatgattgcggcaattgcctgttcctgggatgcggccatagccacgcgcaatatcaaggacttcgaaggtaccgacgtggaattgattaatccgtgggagtttgcatagcggtaggccccggcaaactaccgaggccttgtgaacgttacggtttctcccgctactccaattgttcggagagttcgagccattcggcttcgagattatcgctttcagtattgacggcggtgagttgttcattgagcttgttgagaccctcgtagtcgctcgggtcatgggcggccatctgtgcctcaagttcggtcttccgctcttccagtttggcaagcttgcgctcgatggcattcacgcgcttggatgcctcgtggaaggccttgccggtgagcttcgaggtggagtcctcaccgttattggctccctctgacgagggagctgtccgcgaagtggactgagggagagatgcagcaacattgacggcggccgccttacccctaccagacttcgccgagctgctaccggtgcccgcgaagccaggcgtgtcagccggcaatcccttgccgttcttaatagcctcaaccatatcgaggtaatcctgcacaccaccgggcagatggcgtaccttgccgccaatcagcgcgaactgctgatcggtgacgcgctccagcaggtaccggtcgtgggatacgacgatcaacgtacccggccaagtatcgagcaaatcctccatgacggcgagcatatcagtgtccagatcgttgccaggctcgtccatgatgagcacgttcggctcgtcgagcaggatgagcagcaactgcatgcggcgcttctgtccgccggagaggtcgcgaatcggcgtcatcaactgggcggattcaaagccgagacgctccatcaactgtcccggcgttacttccttgccatccacaatgtagctcggcttatagcgggaaagcacttccttgatcttgtactggcccagtttctccagctcatcaagacgctgcgagagtacggcgaacttcacggttttgccgatgttcacatggcccacggtcggagtaatcgaaccgtcaatcaacttcagcaatgtggacttgccggcaccgttcgcaccgacgatgccgaaacgatcgccggggccaatcagccaagtcacatcgtcaagaatctcgcggccggaaaccgtcaccttgcgtgcagccgaggtgacaccggctgcagcagtgccatcatccgaattcgttgcagcagtgtcaccgccgatggtttcaccacccgtgttcatgcgacgaacctcgcgattgtcagcaagctgcggattgccgctctcagcctcggccttcttacgcgcttcctcagcggcctcgacggcttccggcacgccggcgtccaccaggcgcaggtcagtcatgtcggtgaccgccacctcaacggaaccgtgcagctgcggctcggcgtacatggcgttgaccacatccacgcgggaagcggacgcggagagcgccgccacatccgggtcgatatcggccatgccctgcggtttttcgaaaatctgcgtcacgtcgaccaaatcgaccacctgtttgccgaggcgtgaggtggccatttgcttcagttcaagtgtgttacgcatcggcggcacatcggcaatcaattcgcgtgcggccttgacgtggaacttctgcttggtggaacgggcacgggcaccgcgggaaagccatgcgagctccttgcgggccagattgcggcgcttcgtttcacgcacatcagcctggcggtcgcgttcgacgcgctgcagcatatatgcggaatacccgccctcgaacggctcgatcacgccatcgtggacttcccacatcgattcgcagacctcgtccaagaaccagcgatcgtgggtcacgagcaacagagcgccctggcctttggaccagcggttcttcagatgttcggcgagccagtggatagtgaccacgtcgagatggttggtgggctcgtcaagcgcgagaatatcccaatccttgagcagaagtcgggccaaatcggcgcggcgacgctggccgccggacaaggagccgaccttggcatccagactcatgccgccgagcaatgcctcgacgatttcacgggaagtgttatcggacgcccattcgtagtcggcgcggccttcgagcgcggcttcgcggatggtggcgttgtcgtcgagcggatcgcgctggtcaagcatgccgaacgtgagtccgccgcgcttcgtcacgcggccggaatccggctcctgggtgccgcggaacaggtgcagcaacgtggatttgccgtcgccgttcttgccgacgatgccgatgcggtcgccctcgaaaacaccctgcgtcacatcggtgaagatggttttggtggcgaaagcgagcgaaacgtgttccagtccaatgtcataagtcggcatgactcaccaatgtagcgccacgcttgcccagcggcggcccacaaacgttatttgttcagcgtctgagcgtaggagttgcagcgggccgcaaaaccggagaacacttgctcggcgagcggatgcagtagctgatcgtattgggcgaactgctcgcgcaattgggacttggacccacccgcggccttgagatccttgaccatgctcggctcatccagccattcgtccagcagcgagccgcacacctcaagatggaactgcatgcccagcgcggatcccagtcggaacgcctgcaccttggtggaagacgaacgtgccagcagctggcctccctcgggcaagcccaccacgtcgttatgccagtgcagcaccgtcagctgcttatcccacatggagaagaagtcatgcttgtccacacgcttgatcggcgcgaacccaatctccggcgcatcgcccttgcgcagctgcgcaccaagcgcagtggcgataatctgatgccccaggcatacaccgagaatcggcttgcctgaagccacggcggcacgcgccaacttggcttctgccttcagccccggatacttatcgtaatcaagcgcgcccataggcccacccatgattaccacgccagccagttcgccgaaatcaggcaagtccggtttctttttgtcgacgatattcatcgtcaccgtctcaagaccgatgtcttcgaggttcgacaatatgcgtcccggacgttcccatgggacatgttgcaaaatgagcacttgtggtgtggccatgacttctattgtggcacgagcgttccccgtttgcgtaacaggcagggcaaatccatgaatctcgcagtttccgcagcggtcaaaggcgtgttctcgcgagactgttgtcccgcttctcatccgtctgtcacctcgttcgggccccgcctgtgaagcgttcatcaagctcttcgagtaacgattcagcatgtctggttcggaccctacgcttgagcgttatgggaaacagccaagaaccgcaggatttcaacatttccgtcatgccttcaagcctgacgccggtgcatgtcgccaaggccgcagaaggcctgaatctgtatgacaccgcctcgcaccaggtcagccatttcgtgccgctaaagccgggcgaagtcggcatttatgtgtgtggcgccaccgtgcagtcgtcaccgcatattggccatatccgtgccgccgtggcgttcgacatcgtgcgccgctggtttttgaagctcggctacaaagtcacttttgtgcgtaatgtgaccgatatcgacgataagattctcgataaggccgcggccgccggccagcgttggtgggcccgcgcctattactacgagcgcgaattcaccgaggcgtacaacacgctcggcgtgctgccgcccaccgtggaacctcgcgccaccggccacatgtcggacatgatcgacctgattcagcgcattctcgacaacggccacggctatgtggtcacggatgcggacggcaagcccaccggcaacgtgtacttcgatgtggcatcctggccgcattacggcgaactcacccaccagaagcagacttccgaagtcgatgaggccgctgccgtggccgaccgcatgggcccgtccgtggacgccaccggtgccgacaagtacaatccggtcgacccggccgacgcctcccccgacaagcacgacccgcgtgatttcgccctgtggaaggcccccaaggacaccgatcccgaggacgcccgttggtcgacgccgttcggcgtgggtcgccctggctggcacatcgaatgctccgccatgtcccaccgttacctgggcgatggcttcgacattcacggcggcggtttggatctgcgcttcccccaccacgaaaacgagatggcgcagacctgcgcggccggctacccctctgctgcgcgctggatgcattcggcatgggtgaccgccaagggcgagaagatgtcgaagtcgctgggcaccggcctgtccgtgccgagcgtgctggccgagcattccgcttgggtggtgcgttacgctttgggctccgtgcagtaccggtcgatgctcgaatggtccgatcaggcgctggtcgaggcgcaggccgcatacgaccgcgtctcgaacttcatcga

SEQ ID NO: 2569 - DNA, 6290 bp, Unknown
  R50_10m  MAG No. k141_31625
cgcactgaaatcgtagaaccgttgctgagataaacggctaatgaattgggaaacaaacagcggaacgacctcaggcgagccgtctgctttcagccggcgctgtagtgtcttcccctgactggtagacacgatttgctgactgttatccacctcaatactgactatcggcacctcgttctcatacaagagcgccacgcgagcgggaagctgcggaacagtcttattgaaaattagtaccgcaagtccattgatattgcgatgctcgtcacatacgccggtcacagtgccatcgtcttcaataccgagatacagtgtgccgccttcggtattggctagagccactacggtgtcaacaatttcatcatgcgattgaggacgcttctgctcgctcttgaactcaactgtcaaactttctttagtcggcaacatgagcatcccctttcaccatcttgcaataattcttacatgttaacagagagttcttacatgtaagaattattgcaagatggtgaaaggggtaaagagcaatccatcctgtcatctccagcaacttaaatccgatcatcgctgctttcggcatatctgatatcagccgctggtgccagtccaatcacccaattgaagctcaacacggccaaagactctacgccgcagtggattcgcgctcgatgagcttatagcccacattcacggtctgcgggaagaactcgtcgtccaggttctcgatacgccgcataagcaaggtcagcgcggtatccgccatgcccttgaaatcggtggccacggtggtcaaagtcggcacgctgtacatgctctggctcaggccgtcgaagccgataacgcgcacatcgcccggcacacttacgccatcgtccgccagaccacgcagaataccgagcgcaataccgtcgttcaggcagtacagaccgtcgtacttgcacttgcctttcttggccaagccgcgcccggcctcgataccgccgtcaatcgaccacgaggatttgatgaaatcacggcgctcgtcaaacggcagtccggccgcgagaatcgtctccttggcggcccgcatacgaatatcacgcgagccgggaatgatgttgggattgttgggatcgtgattgtcgccgacgatgccgatgcgcgcacagccacgcgcgataaggtgttcgattgccgcccgtgagccggcgtcgctcggcgcgttcacggtgtcgatgggcaggctggtgtcgtagttttccagcatgacggccgggtgccgcttcaggatatcgaccgcacgtggcgcatcgatggcgatgatgccgtccgaaaacgtgtacgacagatcgttgtcgtcggtaagataccgggacagttcgatgagcatgtgcgagtcgcgcttgtgcacttcctcagccacacacatggccagatgggagaaatagtcgccctcgaggcccgaggtaaggaaggtgatggtatcggaccgcccagaacgcagggaccggccagacaggttgattttgtagccgagtttgcgggcggcgtcacacacgcgttgcgtggtttcgggcttgacgtaatccttgcctcgcagggccgcggaggcggtggtggcggtcactccggccagttcgccgacatcctttaaggtcaccatcgttaccatctccgcatatcacgaaccttatcgataagaatccatagtaccgcccacatctcagccgaggatgagaccctcggtcgaggccctgcccggcgactcgaacgccgcggtcaccgtggtgagcaccgacgctgcaaacgaaaacatgtcaaaccaagaaatggacatgacggagtcattgttttccgagagggatatgccgcgtccacgggcagacgtcacgtatcaatcacgccgataccgtcatataactgttttcgatgtgagaaagctcatagcttccgaccacagaaatcagccatggcaaccccgtaacagcgttatagttctgtttgtcggcgtcgacaagagccagcagcgccgatgaaatgcacaccaaggatgtttagcgaattgttcgcagttcgcacgattcgatttgattcgattcgtgcagcccggatggttcacgggggcatgccgtcgtgatgtgcgtggatatgggcgatgcgactctcgttcgggtcggcaggtcatcgtacaccagttacgaaaggatccgtccatatatggcaaggtttaccgagaatcgttggaccagcgcgattattcccgcactgctgattcatatcccaatcggtaccgtctattgctggagcgtgttcaagcagcttatcgctgaccgtctccacgccagccccgcctccgtggaatggggcttctcactcgccatcttcttcctcggcatgtccgccgcgtttgccgggccaatggtggagaaaaacatcaagaaatccgcactcgtctccatggtctgcttcgtggtcggcttcgccggcacgggcgtgagcatcgccctgaacttcctgccgggcgtgttcatctgttatggcgcgatcatgggcatcggcctgggcgtcggttatctgactccggtcaagaacctgatgctttggttcgccgacaacaagggcctcgccaccggcatcgccgtcgccggcttcggcctggccaaggccattgccagcccactgatggaatatctcatcggcacggttggcctggtcagcatgttcttcatcctcgccgcggtctacgcggtgatgatgttcgtcggcttcctgctcatcaagcgtccggccggctgggtgtacgatcccgcgacctcacacgtcagccgcaagacaatcctcaagaagcccgtgttctggggcatctggatagccttctatatcaacatcacctgcggcctggccctcatcagccaagagaaggatatcctgcacgatgtgctcagggccttcccgcagtatgccaacctgagccccgccaagtttgccgccgccatctccggcatcatcggactggtgctcgccgtggactccgtgttcaacacggctggccgcgtgggcttctccacactctccgaccacctgaagcgccgcgagaccgtctatcaggtaatcttcatcatgtcgattgccgtgtgcttgctgcagatcttcaccaacagcatcgacaacgctctgctgtgggccgtgctggccatgctgttcctcgtcaacgcgggctatggtggcggtttctcgacgctgcccgtgctgcttgatcagcacttcggcaccaaaaccgtctccaccacgcacggtctgacgctgagcgcctgggcgttcgccggtctgtccggcaaccagttggcctcgttcgtagttgcccacgcgcctgatcaggcccaccgctacgccgcactcatcccggtgctcaccggcctgttcgttgtggccctgatcagcatcagcctggtcaagtacctcggcgacagaaacgccacgaaggccgtcgaagaccgaggctgagctgccgcaaaacaacgattctgccggagtcgggcgcatcgatcgcatcaatcgatgtacgtcacgattttggcagaatcgttgttgttgctgttgagtacctgaggtcgtgcggcttacgcgccgaccagttcgagcatttgggggatgctctttttgccgaattcgacttgctgggtgccgtcggcgtgggtgatgacgatgcagggcacgctcatcgcgccgtactggtccttgagttcggggaagtgcgagacgtcgtaggcttcggcgcgcacggccgggctcagggaggcaatgcgctgggaagcaagcacggtttccgggcacatcgtgcaggtgagcgagacgaggatcatgatgttcagcgggtccgtgatggacttcgcgcgttcgaccaggtcatcgcccagcggctggccgggaccggccgcgttgtacaggccaagcacgaacgagttgaactcgtggccggaaggtacgccgtggaaggccagaccggtgaagaccagtgaaccattgccgtccttgccggccttgccgtcgccctcagccggcacgcagatgcgcacagttgggcgggcgagcggcaggacgccggcgacgtcgaatgtggcacggccggaatcgtccaacgaaccataagtgggcagttcggtgccgtccggcaaggtgacggccaatggctcgccaaccaccaaagaagtaggcacagaagcaccatccaccgccgtgatcagccctgcggcatcaacggcaaccgagttcagcttgccattcgacaacgcgaccatctcgccgatgaagccctgcaattccgccgaaagcggagtgccgtccagctcgagagcgagcgtgaccggtcgggtcatgcgtccgaagaccacgccaagctgctgcttgacggcggcggagaacagttcgccgggcttcttggcggcgctggctgcggctgcggcatcggcgctgcgtttggcgggagccggggcgggcgtcgtgccagcggccgaggcggcggaggcggccttggcctcggactcctcataagcggaagcagtgggacgcggcggcaccaagccggttttctcgctcatctgcttggcgtaacgctccagttccacggcggcaatcgcaccgtcggcggtggcggtgaccacttggcgcaggttcttgacgcgcagatcgccggccgcgtacacgcccggcaccgaggttctgaggtagtcgtgcgtgaccacgtaaccgtggtcgtcgagctccaccacgccgcgcaccaaatcggtggcgggcacatagccggcgaacacgaagacgccgaaggtgccggcgtcggcgggcttccacgtttcggtctggccggtggcaaggttcaggatcgaggcttctcgcaggcctccttggccggcggtgacgcccttcagctcgacctgataacgcacgtcgatcttcgggttgttcttggcttcggcggccactgcggcatcgcaggtgaagtccggttcgcgcacgagcacggtgactttggaggcgtatttggtcaggaacacggattcctcggctgcggcgaatccgccgccgaccaccagtacttccttgccggtgaagaactcgccgtcgcaggtggcgcagtaggccacgccgcggccggcgtactcggcctcgccctcgaagcccagcttgcgcgggctggcgccggtggcgatgaggatgccgaacgtcttgaggtcgccgcgtgaggtgtgcacggttttgatgtcaccatccacgtcgagaccggtggcttcggcggagaggaattcggcaccgaagtcctgagcctgctgacgcatggtctgggtgagcgcgcggcccgtggtgcggcccacgcccggatagttgacgacttcgttggtgatggtgatctggccgccgaaatcgtccttttcgagaatcagcacgcggtagcgagcgcgggccaggtacaggccggccgtcaggccagccggcccgccaccaatgacgacgacgtcatagagattgttggtctgagtcatgaaaactcccttacatacactggctcccctctctgaggggagctgtcgtagtgagactgagggaagcatatcggatcaggctagctctcgcgagcactccccccagtcgctttcagcgacagctcccctcagagaggggagccaaggttaccgcctattcagtgtcgatcacagctggccgacgaggtcgaggctgggctcgatggtttcctcgccaggggtccagttggcggggcagacctggtcgccgtgctcgtggacgaactgggaggcctgcacgcggcgcagcagctcctcggcgttgcggcccacgttggaggagatgacctcgtaggccacgaccttgccctcggggctcacgatgaagtcgccgcgctcggccacgccatcggcctcgttgtaggtgtcgagatccttggccagcagggcggtcgggtcggcaagcatcgggtactcgatcttggcgatcttctcgttggcgtcgtgccaagccttgtgcacgaagtgggtgtcgcaggagacggagtagatctcgcagccgatttccttgaacttggcgtagttcttggccaggtcttcaagctcggtggggcacacgaaggtgaagtcggccgggtagaagaagaacagggaccagtggccgagcacatcgtccttggtcacttcgtggaactcgttgttctggaatgcgttcaccttgaaatcggtcagttcatgctgcagaagagtcatcatcggtcctttcgggaattgttaatcttcaagcgtttacca

SEQ ID NO: 2570 - DNA, 5697 bp, Unknown
  R50_10m  MAG No. k141_31811
aacgtcatttcgccgttttggagctgtcgctactcggccatcagcccctcgaaacggaagtggatgtctcggaacgagcaaatcagccccttgaaacgcaaatagacgattgcgaatcggcttatcagccgcgtcgaacttgcaatagagatgtcggtgtatcattccccggtctgattgcgcggatgtcaggaagcgtgaagaattgtcacaaagtcgcgtgatggcgcagccgccattcaggtggatatgccacgctgtcatgatgacggccgagccggaacacggcaaatcccgcatgctgcataggccagccggtcacggtcagccatgacaccgaaatattggaggcgcaatgggacaacaggtgcggtgcggcagacgccgctcccatggcgcgggcgcgctgattgcagccgtcatacttgttgttgcggcgctgatcgcggcatggacgctgctgccacggctattcacgcctcgcgagaccgcgcgcacggccgaggaagcatattgcgcggcggtgtcgcccgacggagcccgccgcaccttgacgcctgatcaggcgcagaacgcggcgctgattgcgaacatcgccgtcacgcgcggactgccggatcacgcggcgacggtggccatcgccacggccatgcaggagtcgaggctgacgaatctggactacggcgacttggattcgctcggcctgttccaacagcggcccagccaaggctggggcacggcggagcaggtgtccgacatgacctatgcgacaaacatcttctacgaccatctgctgcaggtgccggattgggagacgattccggtggaggacgccgcgcaggaggtgcagcgctcaggctacccggaactatatgccacatgggatgcgatggcacgcgcttgggcctcggggctgaccggcgaacggtcggcggacgtcacgtgcgcgttggagccagcaatctcctcggacgcggacgggttggttgcagccataggcggtacactgccgaatgtcaaggtctcggttatgcccctaaatggcaaaaccggcacgaacaacggcgctgcgaccaatacggccagcacaacgttgacgatcacgctgccggacggcctgtccgccgacaaccgcactcgactttgctggcagacggcaggctggctggtcacgcatgcacgtcaatacggcattgacgcactgcacgcggacggcatggattggaaccgcaaagccggcacatggaccggcaccgaaaccgccgagcagaccgtcaccgtcacgcttgcgtgatgtgacctataacgccgtcgcgactacaaatccgactgactggagcctacgccgtcgatgctgcctgaggcacgacacggatatgttttttactcgttcgaatgagcccaatccacgacggcttcgatgttattgccatccgggtccagcacgaatgcggagtaatagccgggatggtacgggcgcggaccgggagcgccgttgtctcggccgccggcggcgagcgcggctgcatggaacgcctgcacggcttgctgactgtcagccaggaacgcgatgtgtgtgaccggcgtgaccggcgaagcctccgcctccggcccgtcaatcggcgacacgtagaaatcggagtgcagggttccgtcatccacgccgaatccgagcgtgggctcatgatgcgccttgacgatatagccgagcggtgcgagcgcctgtttgtagaatgtgatgctacggtcgatgtctttcacgtgcaacgtcagatggtccagcatggtcttggtcaccctcccctggttcttgtattcgattgctgcttgcagtgtaagcccgaacgtttcccacagggccgcgcatggctatgatgagagcaatcgcacgtcgagttcgagacaatattcaaaacgaatccaaggcaatagggggaatgatgatgaccaaggcactgattgtggtggatgtgcagccgacgttctgtgaaggcggcgaactgggagtcgaaggcggcaacgcggtcgccgagcggatcgccgattatgtgaacgcgcatcgcagcgagtacgcgtatatcgcaaccacgcaggactggcatatcgagccgggcgcgcactggtcggcggaaccggatttcgtggacacgtggccgaagcatggtgcggccggcacgccgaacgccgaattgcatccggcgatcaaggcgctgattatccatcatcatttcaagaagggccagtattcggcggcatattccggttttgagggcatcgaggacaataccgaccgtatccagacccgcgaggaggttgcggccgagcaatccgccggcaagacgctggccaatgcgctgaaggccgccggcgtgagtcgcgtggatgtggtgggcatcgccgaatcgcattgcgtcaaggacaccgcgctcgatgccgggaagttcggtttcgaggtcaccgtgttcgaggacctgaccgtaccggtcagcgaggagctcggtgtcgcggcccgcaaacagatgacggcggccggcatcacattggccgagtcccgctgatcaggccggatatacccagagcgaacgcacgaacacttccgtatattcaaggccgacactgccgcatagtcgcctagtcgatatgtgaagaaggcttttatggttacgatgctgctgacttcgatattccgcaacgcctcgtccgccgtgcatgaagtcgaaccgcatccgcaaggcaagcgggtcgcgttcatcccgacggcgagcgccgtggaaccgtgggggccggttcactcggcgttgagcaaacacgcgctgcaacgcctcggtttcgaggtggagcaactggatgtggaagatgtgccgagcgggtccgccgaacgcgtcacgcgtagcatcgccgaggccgactacatctatgtgggcggcggcaacacgttcttcctcctgcaggagttgcgccgcaccggcgccgaccgggccatcatcgagcaggtgcgcgccggcatgccgtacatcggcgagtccgcgggctcggtcatcacggcacctgacatcggctatatcaagctcatggaccgcacggacaaagcccccgatctcaccgattacgcaggattgggcttggccgatttccgcgtggtcccccaccatcatgcaacggccatgggccacgccgcacaacgcattctcgaccggtatggtgccgatctcagtctcaagcccctcaccaaccggcaggccctgcttgtcaaggatggcaaaacccggctgctgcgatgatgcgggtcgtcggcccgtcgcccattcggcatcaccgtggtgtgtccggcctgacatgcctatcgagcggcatcaatcacacagcaatgtggttgggaacctcgccgaacgtcaacacctgcgtacatcagcacggcaaaatctgccgaaatcgcccggcgcacgagatgccagccggccccatccgtcacctcagtgccgtaccgggccaggcatggccttgagcaacgggatgaatccggcgcacagtaccagggccacgacggcgagtatctgccagtgggcggagccgagccagccgccccacgtgccgacggcaccgccgatcgcatacgcgaacctggcacggccgctgaatttggccaggtcaccaccgctcagcagcagttgtcgcgatacgatcacgccatgcgccagcaggccatagccgaggttgttgatgagccatccgacgcacaccgcggcaaactcgggaaccagtacggcggcaagggaaatcgccgtggcgattgccccgatggcggacacggcgcgcatgccgagttttgcggagagccgcatgtagacaaacgatccgatgatgctgcccacgccgccgaatgcgtagaccacggtcagcatatcgctgccgtaccgggagccgatgcccagcaacgcatagcttgcccacagcgacggaatcagcgcaagcagcagcgatgcgatcagcagtctgatccgggtcaagcgggtgaccggagtgcgctgcggcgcgtgtgacgtgtcggccgccgtggattcgtcggcggagccgtcgccgtcatcgccgcccgcaccatcgttgccgaatcccggcatgaactcgcgggtgcggaatcgcgtcagcgcgcaggcaaatgacagtgccgacgaggtgagcagcatggccatgatggaggcgttggccaaggccgatccggcaacctggcccagcaacgtaccggccacgctggcaatcacggcgacgtagccgctgtacttgacgagcatgtcatcgtcgtcgccggccgcatccacctcgaacacttcggaggccacgtcgatgacctgcccggtcatcagcagcaggcatgacagggccagcagcagccacttccaatacgtccaaccgttgggcaccagcgcgaccgccaggcacagtacgccttccacgccctccgtggtagcaagcgaacggaacgagccgaaccgctgcacgatccatgcggataccggagaagcgaagtcgatgaccagattgaacgtcttgcggaacgcgatcacccatgccggcagtccgacgatcagaatcgaaggaatcaccgacccctcgaaaatcgcgttggacagcatcgaaaacgtcatacccaccaacgcccatcgcaacgccctgctcaataccgacaatccgcgcataccaatcccccacgagcaaaccccaacatatccgccgcaacagcatacccaccatttcgatggtttgcaaaccggtctacagtgagaatcagagggggccactatgcgaatcatcgaacagcactgccaaggcaagaggtctgaccagtcgctcaatgaggacgggctgatcatcaccgatggtttcgcggcagtggtggatggagtgaccagcaaaagtgtgcaccaccctgccggccttgttcttggccgcgtccagcaccggcgcgaggcctgcggcccattcgcgcaccgaacggccggcgagcatgtcgttgccgcccacgcacacgatcagcacgttcggccggtcgttgatatcgccgatcatccggtagcgcacacgtcgagcggtcgcgccgagcttgccgaccgtacgccaggccaccggccgaccggtacgcttgcgacgcgcgcggcaagcagcggcataatgcctttcgactggtcgtccacgccacatccggccaccaatgaatcgccgaccatgacggcaagaatcggcttcacgccgttcgcgcctttccaatcggggccgatcggcgccttgatatccaccacgcgacccttggcatcgaacaaaccgaaccgtttgcccttcggctcggacgccaacttcacccggcccttggcccacataccctcaatcggagcaacggcagcatcaaatcacacgcaagattcccacgccacccaacatagtccgccctcctcgacctcgttagcggccagtagcaacccatattcgagaactcgataaccatcgtcaattcgcataatttgaacgttttaggcgttttggtcgctttggacgttttatactgtgatagataaaaaggaggtcaccatggcagaatccgacaaactcaccattccacgaacaatccttccatccatcaacattgacgacatgacgacattggaggcattcaccgcacgatttcttgatgagcggatcttcatc

SEQ ID NO: 2571 - DNA, 3681 bp, Unknown
  R50_10m  MAG No. k141_31949
aagccgtcgctatggagccaactgtccggtttattcaggtaacccggtttattcaggtaactgttcctgatagaggcggaaagcggcgcgaagtattcgaggtttcggtggccttccgctgtgttggacgattagtggcagaaatcccgcgtctctttcgttgtgacgcgggatttctgccggttgggctatcggttggattgactggtatgtttcagcgaacggctttgaccagtgcctcggtgaggtacttgccggcggccatcaccagcggcgcatagcggcgtccgggggcggcacccatgcggccggtcgggccggaaatcgagatggcggcgatgacctggccggaggcgttgcggatcggggcggaaatcgagcacacgccctcttcgcgttcgttcacggactcggaccagccgcgcttgcgtacggcggccagcttggtggcggtgaacttggcgtggcgcaatccctggtgcagacggtcggaatcctcccaagccagaagaatctgggcggcggaaccggcttccatcgacagcatggcacccaccggaatggaatcacgtaggccggaggtgcgttccacagcggcgatgcacacgcgctgatcgccttggcggcggtaaatctgcgcagactcgccagtgcgatcgagcagggtctgcaggatcgggccggcggcggtcagcagacgatcctcgcctgctgcggcggcaagttcggcgaaacgggagccgagtacgaatcggccatgctggtcgcgcagtacgaaacggtggcgttccagtgcaatagccaaacgatgtgcggtcggtcgagcgagaccggtggcggccacaagctggcccagcgtagacgggccggattccagtgcgtcaagaatctttacggttttatcaaggacgccaacgccggaatggatttccccatcgtccttggcggtggtgtcttcaaccggctcggactcggtcaagctgttgttcaatggttcttcccgggaatcagtcataataagggcgattatgccatctcacatagtgaaatggcaaattggggaagtgtctcacagggtggccatgaagttgaaagggcgttcgtggatgccgaagagacatgtctggagcggaaccgagtcatgactaggtcatgttcgagtcgggtccgagtcatattgaggccatcatttgaccgtatctcaatatccggcatgctcatggccgggcccatcgcaagcacataggctaataccacgaacaaggcgcgaacacaatacctcgcgcggaattttttggaggaatcactatgggaacgacactggccgagaaggtctgggccgatcatctggtgcgcaagggcagcgacggagctcctgatttgctgtacatcgatctgatgctcatgcatgaggtcaccagcccgcaggcgtttgagggcctgcgcttggccggccgcaagccgcgtcacgtggatcagctcattgccaccgaggatcacaacacgccgaccgttgatatcgatcgcccgaacccggatgagacgagcgcgttgcagttgacgactttggagaagaactgcaaggagttcggcgtgcgcctgcacccgctgggcgacgccgatcagggcatcgtccacgcgttcgccccgattctgggcctgacccagccgggcatgaccatcgtgtgcggtgattcgcatacgtcgacgcacggcgcgttcggcgcgctggcgttcggcatcggcacttccgaagtcgaacacgtgatggccacacagacgctgtctctgaagccgttcaagaccatggccgtcaacgtcaacggcaagctgcccgcggacgcgacggccaaggacatcattctggcgatcatcgccaagatcggcaccggcggcggccagggttacgtgatcgaataccgtggtgaggcgattcgcaacctcaccatggacgaacgtatgaccgtgtgcaacatgtccatcgaggccggtgcgcgtgccggcatgatcgcgccggacgagaccacgttcgagtacctgaagggccgtccgcacgcgccggaaggcgagctgtgggatcaggccgtggcgtactggaagacgctgaagaccgatgacgatgccgtattcgacaaggtggtggatattgacgccaccaagctcggtccatatgtgacgtggggcaccaaccccggccaaggtctgccgatcaccgcctccgtgccggagccgggcaagatcgccgacgccaccaagcgcgccgccgccgaacgtgcgattacatacatgggtttgaagccaggcatgccgatcaaggacatcgccgtggacaccgtgttcattggttcgtgcaccaacggtcgtatcgacgatttgcgccaggccgccgcgattatgaagggccaccgcaaggccgagaacatccaccgcgtgctggtggtgccggcctcctcccgcgtgcgtttgcaggcggagaaggaaggcctcgttaaggtgttcaaggactttggcgccgaatggcgtaacgccggctgctcgatgtgcctgggcatgaacccggacaagctggtgccgaacgagcgctcgatttccacttcgaaccgtaacttcgagggccgccaaggcaagggctcgcgcacgcatctggcgtcgccggccgtagccgccgccaccgccatccgcggcacaatctcgtctcccgccgatctctgagtcaatacacgtgagccccctctgacgaggggctgtcagtcgaagactgactgggggagagatccccgaaaggaaaattgttatggaaaaactcaccacactgaccggcgtgggcgtgccgctgcgccgctccaacgtcgataccgaccagatcattcccgctgtgttcttgaagcgcgtgaccaagtccggcttcgatgacgccctgttctacgcatggcgccgagacccgaacttcgtgctcaacaagccggaatacgccggtaagggccagattctggtcgccggccccgaattcggcatcggctcctcccgcgagcacgccgtgtgggcgctgcacgattacggtttccgcgtggtcatcgcgccgagcttcgccgacatcttctacggcaacaccgccaagaacggcgtgctggccgcgattatgccgcaggagtccgtcgaactcctgtggaagctactggaggaagagcctggtcgtgagatgactgtctcgctggagacccgcactgtcacttgcggcgacgtgaccctgccgttcgaggtcaacgattacgtgcgttggcgtctgatgaacggctacgacgatatcgatctgacgctgcagcacgaggacgacatcgccgcctacgaaaagatgcgcgccgaaaagttccccttcaagcccaagaccatccccgccaagcactggcccgaagaaaaaatcgagtccgcccgcgagcctgaagataattggacgggcccgttggccgaccgcggcattatctaactccctccatcgcataaacaaggtctcactggctgctcaccagtgagacctttgaaattcatacttcggtcggaccgtccgcccaacggttcaggatatcggcggctgcgcggtgtaggaagagaacgcggagggtgtcgagacctttggggacgaacagggggcatggtgatgcgttcgatgccgtgcggctcaca

SEQ ID NO: 2572 - DNA, 10708 bp, Unknown
  R50_10m  MAG No. k141_32004
cagtctcacttcgttcgacagctcccgccagcgggagcataaggacttaagtcatgtccattccgctaattcttgcttccaagtccaagcctcgccgtgacgtgctgtattcggcgggtatctgccccacaattcgcgtctcgcacgtggatgagcctgctgcgctggaagcggccgcccgtgaggaaggtgtcaccgtcgacgatttgagcatcaagcagcgtgtgatgattcttgccgcagccaaggccgaggccgttcaccgtgcgtatcgcgatgcggccaatactgccgccgccgcaaccggcgatcgcgtgatcgcctacccgctcaaggccaaggaaatcaaggattcggaacgcgaagccgtcgtcgaagacctgcgcaaagccgccgctggccagcccatcgactattccaaggcggaagtcgccaccacgcgcgacttctccggcatcgacatgccgaccatcaccgaacccatcgccaccgctattgccggacagccgggactgaccgaggcgacggtcggcccgctgattctcggctgtgattcgatgttcctcctggacggcgaatgctacggcaagccgcacagcgaagccgtggcccgcgaacgactgaagcgcatgagcggcgcgaccggcgaactgtggaccggccactgcctgatcgatttcgcgaccggacgtaccgtgcgcggcgcaagccatgccaaagtccatttcggcgaattcaccgatgacgacatcgaacggtacatcgtcaccggcgagccgctggaagtcgccggatcgttcacgctggaaggcttcggcggcgcgttcatcgacagcatcgagggcgatccgcacggtatcatcggcctcagcctgccgctggcccggcatctggccggcgaactgggcatcacgtggaccgacctgtggaatgtcggccgtggcgaactggagccggaaagcaaggcctcgggcaaccagcacgctggcattctgccgccggtcgaaaacgtgcatcagcccggcgatggctgggtggactgcgcctgcggccgcaagcattggggcaccaacggtgcgtccggcattctgctggctcgccgcgacccggcgagcggcaaggtgactcacgtggtcatgcagcaccgtgccgcgtggagcgccgaaggtggcacgtggggtatccccggcggtgccactgcggacggcgaatcgcccatcgaaggcgcgttgcgcgaaagctacgaggaagccaacatcacccccgaagacatcgaggtggtcggctcctaccgcgaggaccatggcccgtgggcctacaccaccgtgtttgcctttgaaaagcccggccacaccgtcgagcccaaggcaaacgacgacgaaagcatggaaatctgctgggtcccgattgacgacgtgcccaaccgcaagctcctcaccgccatgaagaccgactggccccgcttcgccgcccgcctggacgagctggcctgtgctggacatcggtagtggtgttggctgggccaatgttttgccgatgagtttacttgggtaatgcgtgtgaaccgcgtgtggaccgggacggattctgctgtcccggttcgtcattttgcctcttttgggacaaccgggacagatttcgctgtcccggttcgtcattttgcctctttttgggcaaccgggacagaatctcattcacctgacgccctatcgtgcgatggtcgccgtcggggaatggcggaattccggggttttggatttgcatatatcgggtgttcatggaagggcctgtcccggttcgccaaaagaggccgaaatcccgaaccgggacagccgaatctgtcccggttcgtatgtcgatcgattgaccccgccaccgggacatcaaccgcgcatagacaggacgcttcaatgtctggcgggcatgaccatatcggatgacacacgttccctcgtgcgtttcgccacgacctccgccccaagtcagtgcgaaaatggcatttttagcggtgtggtcagctgtcgcatgcggaaaatcctaaaatcaaccgccgaagagacacatcgccgactcggcggaactcgctggtctgcgcgcaatgaggagtgttgtgtctgaatgcgattcagacaatggtcggcgtcaaatagcggtctccagccattaatcattggtgattgtggacattgagcggagtaaacattctagatgattcagggatatgccgaaaatcatatcgttcagagaatgaaataccgcatctcggagtaactgactgtcgacgtgcatggtttgaaatctgatatccacgcccatcatgcctagcaaaattacgggaatggggttcggactatttcgcctcagccaaccgggagcttccgaatgctcaatgctgtatgcacttagtgtgtggaaaccagccaatcattgaccaatggcaggccgcagtcgaaaccagaaatatcctcgctcgcagtcaggtgccgaggctcagtgaagttggtcacgtccatatgggatcacgctccaacaattcattcagacgtaggcccataggttcgtttaatgctgcggtgaaatcattccacgctttactgttgggccgaatgatatgagcttcatggatgtcccgatctgcggcggcgagcagattcgataatgcccattgcaacgaagtcatgcctttggactcggccgcttggtcgattctggaacgttgctcttaggtgagtctcatttcaaaacgactgttcttgttattctctgtagtcatactcctgttgtacgacttttgtacggacacgattggtgtgtgcgggatgtcgattgcgatggccatgtgggctcctttgcttggtctgttgtggttccagcttccgaaccggtcttccactgttcctcgtcttctcgagcaatgaacatctgatatatggattgtcgcgtcgactgcgtatctctaatccttgcggatgaggagcgggccggtgatccagaaaggttcataccgcagcccgatggtcggctgggcgttcgctccgtacgctcgggagtatgaacacagcagcatcgcaattgcagcagcctcagccggcgtcgggaccggcggctcagcctcagcagtctcagcaaccccaacagttccagcagccggcatcgcacacccagcagtgggccccggtcatcgaggcgcacgacctggtcatggactacaccgccagcatggcccgcgcacaggcagggcacggcgtcaccggcgtgatgccagccggcacgggagccggttatgcgtcggcgaattccgctgcggccggaccgggtgccattcaggccggccagccatcccagccagcccagcccggcttcgccatgccgaccatgcacacgctcgccctgaaccacgtgaacttcacgctccgggagggtgagacagtagccgtgatgggcccgtccggctccggcaaatccactttgcttcacgcgttggccggcattatcaagccgactgccggcacggtcgtcttccgtggcactgacctgagccatatgagcgacgccgaccgtaccaaactgcgtcgtaatgtcttcggattcgtcttccaatccggccagctgctgcccgaactgccggcggtcgaaaacatcgccctgccgatgatgctcgacggcatgccctaccgcaccgccaccgacacggcgatcctgtggctggaacgcatgggattgcgcgcgctcgccacgcaccggccgggggagatgagcggcggacagatgcagcgcatcgccatcgcccgtgcgctcgccgtcaaacctgccgtggtcttcgccgacgagccgaccggcgcgctcgaccaagccaccggccgcgaggtcatgggcattctcatagccgccgcgcgggacaacggttccgctgtggtcgtcgtcacccacgaccccaacgtcgcttcgttctgctcgcgcaccgtgaccatgcaggacggccagctgggaggcgtacgatgagcgctttcgcattgtggcgattgttccatcgccccggctcgcgtggcagtgcgggtcatacttcggtgttggccatcattgcttttgccgcagccaccactatctttctcaccgttttgggcggcgtgcatgggttcatgtggcgcgcctccgccgaccacaccattggatgcgcaatcaatctcgacgcttgcaaacccggaacagcggaaatctggaagcagcgtatcgccaatccccacagcctggatcaatacgccacggcatacgtcgtgctggcgttctttgcctgcctgctgctgattgtgccgttcgtggcgcttgccggttccgccgcgcgattggctgcgtcccgtcgtgacgctcggctcgcatccctgcgcttggcaggcgcgaccacggggcaagttattcgccttacggcgcttgatgcggctgggcaggccttggtgggggcgctgattggcatcgcggggtactgcgtgttgatccccctaatcatgttgctgcatttccagaatcagacgtttacgttcgagcaactgtgggtggggccgattgccttgatcattacgcttgttggcgtgaccgtgttggcgctgatctcttcgctggtcacgcttcggcgcgtggccatcacgccactcggcgtcacttcacgcgttgcgactacgctgccgtccggctggcgtgtggtggtgttcgccgtcatcatggtgattgccgttcttctgttcaagaatccgatggtgctggctcaggccggtgaagtagtgatgtacggcgtgatcatcggtttcatgctgctgtgcttcgcgctggtgaacctcgtgggctcctgggtggtcaccgctcgcgccaaggccaaggccaagcgccccaaggatgcggccacgatgattgccatgcgccgtattctcgacaatccgaagcgcgcctggcgcaatgtgtccggcattgcgttggccgtgtttatcgccggcatcacgtcgatctgcggattcttcggatcggccgccgtggtcgatgacgccaacgacccgttcaccgtgttcattcgcgacatcggcaccggcggcattctgacgctcgtgttcgccgctgtgcttgccgcggtcagctccggtgtgatgcaggccggcagcgtgtacgatcaggccggcgaatatcgcatgctggtgttggagggcactgatgtcaagaccttgaaccgtgcgcgattcatcgaggtactcaccccgctcaacatcgtggtgatcgtggccggcggctgttccatgctgcttatggcccctctgttcgccgcttcgatgaccgaaccggccacgctggccagcttcttcggcgggcttgcgctgtgctatgcgctggtttcggtgggtgcgttcgcgtccaatcgggtggccgccagcttgaatctggccgattatcgggccgatgactgaggcggtacggtactttcccgggtgacgacactggtggggaggatgacgtgcatatcaccctgattgcccttgcggctgtcgatgatcatctgcacggcgcgttgggctatttcgctgaacggctgatgcacgctggtcagggagggcatgagttggccggcggggaaaatgtcgtcgaaccccatgacggacaattgctttggcaacgcgatcttatgctctcgtgcggcacgatacgtgcttaccgcagataagtcgttgcagcagaaaatcgcggtgggtcggtcggtgagttccagcagccggcaggctgcttcatagcttgtttcggcggggaagtagtcgccctgttcgatataggactccggcagatccaccccggcctgttgcagagcggcggtgaatccgctatagcgcgcgatgctggtctgtaggttcgccggcccccggataacggcgatgcgtcgatggccgagcgacagcaggtgtttgccggcctggtatcctgcggtccagttatcgatggacacgctcatcacatccgaatcgacggtatcgattgggtcgatgatgaccacgggaatactgcgcgatttcaacaaagacttcgcttgagtggtcagaccgcccatctgctgcataatcacaccttggggatttctatcgatgatgccgcggaaacagtcttccgtggcatcgccatggttggtctgggtgaccgtgatggcgaggcccgcctgctgcgcccagtatgaggcgtatttgatgagttccatcgtgccgttgtgctcaatgtattcgacgacgagctctatggtgggggagagtttggtgttgaccagaggccttgagtaaccgtgatctttgaggatttgctcgacttgtctccgcgtctcgtcggaaatgcctgacctgccattgatgactttggaaacagtggatgcggatacgccggcgatttttgcgagctcgccgaccttgagcttgtgggtggatgtatcgttaaccatcggtgcttccctcttggatattcgccgttcaattactgagacgatttcgtcgttgttcccaccattatgacgcattgtgccgtaacaattccgtgttttcttgccctttgtccggccttgaataaaaattttcgcaaataggcttgcaaatttctttattcggacgtacgatatagccgttggttcacaccaggcgaaggagcccgaacacatgagtaccatcaccaaagtcaagacgtatgacttccgattccccacttcaacgacgctttccggctcggatgcaatgaaccccgatccggattattcctctgcgtacgtggagatttccaccagcgccgacgacggcatcacgggtgtgggattcgtgttcaccatcggccgtggcaacgacgtggtttgcaaggccatcgaatcgatgtcgcaggtgctgattgggcgcaacaccgaggaactgctcgacaacatgcgcattgcatgggacctgttcgtgcatgattcccagctgcgttggcttggccctgaaaagggcgtggagcatatggccatcggcgcggtgctctccgcgttgtgggatatcaaggccaagcgtgcgggcaagccgttgtggctgctgctgggcgagatggagccggaggagctggtctccacgctcgatttccgctacatgaccgacgccctgcgccctgaggaagccgttgcgattctcaaagagggtcagaagggcaaggccgagcgtatcaagcatctgctggaggtcggttaccccggctattcaaccgctcccggttggctcggctactcggatgagaagatggtggccctcgccaaggaggagacccaggtcaagggcttcaagcagattaagcttaaggtcggccagaacatcgacgacgatctgcgtcgcctggccaaggcccgcgaagccatcggccccgacgtgcgtcttgccgtggacgccaaccaggtgtgggatgttcccaccgccatcgactggatcaacaagttccacgacttcgatctggcttgggtggaggagccgaccagccccgacgacgtgatcggccacgccacgattgcgcgcgccatcaaccccatcaaggtggccaccggcgagcagatgcagagccgcatcctgtacaagcagtacctgcaggccaacgccttcggcatcatgcagatcgacgccacccgagtggccggtccgcaggagatcgtgctcgaatacctgctcgcaaagaagttcaacaagcccgtctgcccgcacgccggcggcgtgggcctgtgcgaggccgtatgccacttcgcgatgttcgattacgtggccgtgtccggcacgatggacggccgcatgatcgaatacgtcgataaccagcatgaacatttcgtccacccgaccgagatcaaggacggcaactacgtcgctccgaccgctccgggcaacggtaccgaaatgacgctggagacggccgagaagtacctgtatcgcggctgaccgcaactggaaattcataactgaacaacacaacttaacacaacaacacacaaccactccggctggggtgccgaagccccggccgggcgtgacatggaacacccatgaaacgcagaataaggatggacgaaggagttcccatggatctgcatctcgaaggcaaagtcatcatcatcaccggcggtttcaaaggcatcggcaaaggcatcacgctgcaactggcccaggagggggccatcccggtggtgattaatcgacccgacagcgctctcgacgagttcaagaaggatatcgagcagtacaccaccacctatgatgtgcacttgcttgacctcaacgacaccgacaagatcgccggcgtcgtcgaagcaacatacaagaagtacggccatatcgatggcattgtgaataacgccggaaagaacgacaacaaggatctcgagaccactacttggcgtgagttcgaggaatcgcttcacggcaacctgactcactattacgagctggtccacgcggccgtgccgtatctcaaggaaagccgcggatccatcgtgaacatctcgtccaagaccgcgcttaccggccaaggcaagaccagcgcctatgcggccgccaagggcgcgatcctgggcctgacccgtgaatgggccgccgcattggtgcacgatagcgtgcgtgtcaacgccatagtcgtctccgagtgctggaccccgctctatgccgattggatcaagacctttggcgatgaagcggcccagcaggcgcgcctgtcggtgatcaccgacaagattccgctggaacatcgtatgaccaccaccgaagagatcggtaatgaagcggcattcctgctctccgaccgctccagccacaccaccggtcagtgggtgtacgtcgatggcggctatgtccaccttgaccgtgcgctgagctgacaagcagccctttcccgaatattcgcgcggcaattccggagctttgatcattgctccatccgtacgccgtatccgcgtatgccgcccgtatcacccgcgccctgggtcatccgtttaccaacatggcccagggtggtccactcctcgctaggcaatatcggggaaactcgtatcactaaggagtcaatgatgacatccaaaaacacaaccggttccaaggcgaccatcgccattgtgctggtgacctcactgttctttatctggggtttgaccatgaacctcgtgaacgcgttgaactcgccgttcgcaaactacatagaactcagcagcgccgaagcgtcattactgcaggtggcctattacggcgcatacttcgtcatggccattccagccggcttgatcgccaagcgtttcggttataagggcggcgtcatctccggtctgttcctgttcgctctgggcgcgttcatggtgatccctgccaccaacatggccagctacggcctgttcctgttcgccatgttcgttatcgcgctcggcgcggcatcgctggagaccaactgcaatccgtatatcaccaagctgggtgatgaaaagggcgaatcgttccgtatcaacatggcgcagagtttcaacggcgtcggcaacatcgttggcccgctgattcttggccagattctcggcaccaccgtcgcatcaggcgagtccggcttcgacgccgctaagacgcagttcctgaatgatacccgcacgatatacattgtgatcggcgttgtgctggtcgtggtgctcgccgtgttcgcgctgttcaagctgcccacgcctccgggagacgaagaggaggccgcgggcggcgcctcctccgagaacagctccttcttcggcctgctcaagcgcccgcacttcgcattgggcgtgcttgccgagttcattttcatcggcctgcaagtggccggcatggcggtcttctccgcctacgcgctcaagcactggggcgcgggcatcacagccggcaccgcggcgatgatgctttccgtgctttccctgctgttcaccatcggacgcttcgccaccaccccattgatggccaaattcgatccctcgaagattcttggcgtatacatgaccatttcagccgtgctgatgttcgtggtattccttggcctgggcaaggtctccgtcatcgcgttcatggtggcgtatctgttcatttccatcggatacccgaccatattctccctgacgctgaaaggtatcaagggttccgcggcgaagaccggttcctcggctttggtgatgagcattgtgggcgccgcgttgattccgctgctgctcggtgtgattcaggatgcggcaggcatcgagatcgccatcctggtgatggtcccgggcttcctgttcgtggcatggtacgcattctggggttccaagatcggtctgaaggaggcctgatatgacactcaacgtaatcgattcccacttccatatctgggatccggatgcgcaggatctgccatggctggcaggattgccctcgctgcaacacaagtacacgattgaagacctagccgcacagtacgccaaatttggcgtgaatttcctcggcggcgtatacgtggaggtcgacgcggccgaccatgagcttgaggaccggctgctgtacgagaatgcaagtcctctgatcctgaagcgcatgctgcaaggacgggtaagcccttggatgcgtgtcccgattaatgccgatggcatcagggaaccgctgcatgtggattccgagccgcggggccgtgcgctcgaacccgaattcatcgccggtctacgcgc

SEQ ID NO: 2573 - DNA, 2534 bp, Unknown
  R50_10m  MAG No. k141_32226
cgggtccttcagacccacgcgagtacggcggatagagcgggacagggcggaaaccgcctcgtcctggccgatgatgcgcttgtgcagttcggcttccatgttgagcagtttcttggactcggcctgagtcagcttgaacaccgggataccggtggtggagctgatgacctcggcgatcacgtcctcgtccacgaccatcttgacgtcggactcgccttcgcgccaggagtcttccttctgcttgcgatcggcttccagcttctcctgcttgtcgcgcagttcggcggccttctcgaagtcctgacccttgatggcctcgtccttgtcggcggcgatctgggcgatcttctcgtcgagttccttgagctcaggcggggcggtcaggcgcttgatgcgcaggcgtgcaccggcctcatcgatcaggtcgatggccttgtcgggcaggttgcggtcctggatgtaccggctggacagctcggcggcggactgcagcgcgccatcggtgatggtcacgtggtggtggttctcgtaacgggaacgcaggcccttcaggatctcgatggtctcggcgatggtcggctcgtgcacctgaatcggctggaaacggcgttccagagccgcatccttttcgatgtacttgcggtactcgtcggtagtggtggcaccgatggtctggagctcgccacgagccagcatcggcttcaacatgtcggaggcacccagcgcgccgtcggcggagccggcgcccacgatggtgtggatctcatcgatgaacagcacgatatcaccacgggtcttgatttccttcagcaccttcttcaggcgctcctcgaaatcaccacggtagcgggagccggccaccatggaaccgaggtccagcgagtagacctgcttgcccttcagggtttccggcacgtcgccggcctgaatcttctgggccaagccttcgaccacggcggtcttacccacgccgggctcgccgatcagcaccgggttgttcttggtgcggcgggagagcacgaccataacgcgctcgatctcgttggtgcggccgatgaccgggtccagcttgccttcagcggcttcgacggtcaggttgcggccgaactgatcgagaatggcggaaccggacttgttctgcttgtctgtcacgccgccggcgttggccagatcgcccttgccgtcaccggtgccggtgccggagttgccgcgaatcatatcgatggtcgcgctcctgagctcacccaggtcgacgtccatcttgatgagcacctgggtgcccacgccttcgccttcgcgaatcaggccgagcaggatgtgctcggtgccgatgtagctgtggcccagctgcagggcttcgcgcagcgagaactccaacacctgcttggcgtgcggagtaaaggggatgtgcccgttcggagccgcgttgcccttgccgatcatttcttcaacctgcttgcgagtggcatccagctccacgcccttcgaggcgagcgccttggcggccacgccctcaccttcgcggatcaggccgagcagcaggtgttcggtgccgatgtagttgtgctgaagggccctcgcctcttcctgcgccaacacgatcacgcgccgtgcacggtcggtaaaccgttcgaacatgcttgtccttcctcaattgacattccgtcttactctaccgattcacgatgacgtttattcatcggattccatgaattgcgccgtgagaggataagaaaacgatatgctggttctagattcacccgtagtcgattacaaggaggctcgaaatgagtgaagcgacaaccaagcccgacatcgttgtcggcgtggatggttccgatgaatcctttgccgcgctgaagtgggcgcttgaggaggcttcgttaaccggtcagagcgtcaacgccgtgtttggctggacgcattcgtgggatatgggttccgaaccggacagcgacgaggcttgggccaaagtccgccacgacatcgccaacgagctgcgtgtgtgggtcgacaaggccgctgcaggcatcgacttcgatccggcgaatctgaagctcacctcggtgaaggcctccggcacttcggccctgctgcagatcggccatgatgcgcagcagatcgtggtcggccgccgctcgctgagccgtgtggcccgctggttcatggggtccctgtccgcttcgctggccgaggccgccgaagtgccggtgaccgtggtgcgcatcgccggcagcgaggatgagaccgtgaccgaggccatcgccaatgccctgacgccaggagaccagccggtccactacacgcagcctcagccggtggttgaggaggctcgccgcccggtggtggttggtgtggatggttccgagacttcccgccgtgcgttcgatttcgcactggaagaagcacgactgcacgacgcgccgctgcatgtgatgttctgctggcagctcaaggatttgggcgttattccgggctatgagaacgccgtggcaccggtgaaggtcggtcagcgccgcgccgaggagattctc

SEQ ID NO: 2574 - DNA, 6331 bp, Unknown
  R50_10m  MAG No. k141_32398
cttggtgagcttcgagctgggcacggcagagccggtcgaaccggatttcggtgtggtgcggcgcgtggtgaccttgccgccacgggtgccgccatatgaaccggatgaagaaccggaacgggaacgcgacccgtaagacgaccccgaacgggagcgagacccgtaggaggacgagccggagcgggaatcatatgatgatgaacgggaaccgtacgaagaacctgaacgggaaccgtacgacgaggagccggaacccgagccatacgacgacccataccgcgaccgcgacccataggacgaacccgaaccggacgaaccacgcgagccgaacgtcgacgacccgccaaacgtggcgccgccgaaatcgtcatcatcccaaccgcccaaatcgtcggcgaatccatcggtctcccagttggcgcgcatacgctccacgccggcttcacgacgtttccaatcaatcagcggatccggaatctcgtcgaggaattggctgggcatcatgtcggcggcctgaccccactgggagcggacggcggcgcgcgtgacatacagccgctgcttggcgcgtgtgatgcccacataggcgagtcggcgttcctcctgcagttcagtggtgtcttccatcgaacgcgaatgcgggaaggtgccctgttccatgccggtcaggaacaccaccgggtattcgaggcccttggcggtgtgcaaggtcatgagcgtcaccttgccggagtcctccgcctcgccgggtagttggtcggagtcggccacgagcgcggtggtctccaggaatgcggacaacgtggcgtcaggcgtgttctgttcgaattcggctgcggtggactgcagctgggagaggttctccagacgggaggcgtcctgcgggtccacggatttctcaagttcggcccttaagcccgacttctccaatacttcagccacgatctcgctgggcttggagtcgtgcgcgcgcgtgaactgcgagagcgcgcccatcagatcgcggaatgctcgtagcgaggtggcggtgcgggtcggcacttcaatctcatccaagtgcataagtgcgtagaagaagctggtgccatgctcgcgcgcgtaggcgagcagcacgccttcggcgcggtcgccaagcccgcgcttgggcacgttgagaatacgacgtagattcacatcgtcgtccggattgacgagcgcctgcaaataggccagcgcatccttgatttcgcgacgttcgtagaacttggtgccgccgacgagctgatacggctgattcgtgttgatcagcgcctcttcgagcgagcgagattgggcgttggcgcggtacatgatcgccatgtcggagtaggcgatgccctcttcggcgtgcaggcgcgcgatttcggtggctacccactgggcctcctgctgggcgttgtccgccgcgtagccgacaatcggctcgcccttgccgagcgcggtccacagtttcttgggcttgcggccctcgttgttgctgatcaccgcgttggccgcatccagaatggtctgcgtcgaacgatagttctgttcgagcatgatggtcttggcgttcgggaagtcctgctcgaagtcctggatgttgcggatgtcggcgccacggaacgcgtagatggactggtcggaatcgcccaccacggtgatccaggcggggccggacttgccggcgtttggcgcgcccgggatggccttctcccccgtgtccacgccggccagctcgcgcacaagcacgtactgggcgtggttggtgtcctgatactcgtcgacgagaatgtaacggaagcggtgatggtagtactcggcgacggccgggtcggtgcgcagcaactcgaccgtgcggccgatcagatcgtcgaagtcgacggcgttggccagggccaagcgatgctcgtattcggcgtagatcaccgcatagatggcttcaaggtcgcccaccgtgccgaactggtagccgcgctggccaggcgtgaagtcgggcgcgtgaacggcgaggttttccttccaaccggtcagattgttcttgaggtcggagatatggccgaggatcgagcgtggagtgtagcgcttgatgtcgaggttgaattcggtggcgatgattttgacgagtcgctcggagtcggcggaatcataaatggagaagccggacttgagcccgatggacttgccgtcgcgcctcagaatgcgcacgcaggcggaatggaaggtggagacccacatgcgctgggccaccgggccgatcagcgagccgagtcgttcgcgcatttcggcggcggccttgttggtgaaggtgatggccagaatctggctcggccatgcgccgaactggctcaagatccaggcgatgcggcgggtcagcacacgggttttgccggagccggcaccggcgccgatcagtagcgcctgaccgcggtattgcacggcttccgcctgctgcgggttcagatcgcctacgagttcctgcgcgctgcgtgcgatgacttccggctcgtcgtacactgttgcctccctttgaatcgcgacattcatgtttaccacatgcacgggtcagcgcaggacaacgtacacttacaagtatccatatcattcactgacatacagcaatgggaggtctaatgcaggaacttgaggagcgaatccagagcgagggaacggtgaaggcgggtgatgtgctcaaggtggacgcgtttctgaaccaccagtgcgacgtgcgtctgttcgaccgcatgggttcggcatgggccgctcatttcgccggcaagcacatcaccaagattctgaccatcgaggcgtccggcatcggcattgcgtgtgtggcggcccagcatttcggcaatgtgccggtggtgttcgccaagaaggcgcagtccatcaaccttgacggcgaccagtacaccaccacggtctattccttcaccaagcagaaggagttcccggtgatcgtggccaagaagtatctgaacgccggcgaccatgtgctgcttattgacgattttctggccaacggcaaggcgttgcgcggtctgattgacctgtgcgaggcggccggtgtcacggtcgagggcattggcatcgccgtggagaagggcttccagggcggcggtgacgcgctgcgtgccgaaggctacgatgtggattcgctggccatcgtcgagtccatgaatcccgagaccggcgaaatcacatttaggcactgagcacattgactgctcccgccagcgggagcaacagagagaagaaaagaatcatgtcagagaagaaaaccaagaattccgtatcctttgaggcgctgtcttcgctgaacgcgccagtatccttctggaagggcattccgttcggcctgcagcatgtgatggccatgttcgtggcgaacctcgccccgatcttcatcgtcgcctcggccgcgaaaatgaccccagcccaatcggccaccatcatccaggccggccttctggtggcgggcctgggcacctgcctgcaactgtacggcgcgtggctcatcggctcgcgtctgccgatggtcaccggcatctccttcacctacgtggcggccgccgtggcgatctgcgcagacaagggctatggcgcagtggccggcgcggtaatggtcggtggcctgctggaactcgtgctgggtttgacggccaagtattggcgtcggttcgtgccgcccatcgtctccgccatcgtggtcacgtcgatcggcttctcgctgcttaacgtgggtgccacgagcttcggcggcggcagcggagccaaggacttcggaagctggcagaacctgacgctcgggcttatatctttggtcgcctgcctggcgttccagctgttgatgaagggcacggccaagcagctgtccgtgctgttcggcctggtggtcggctatgtggcggccatctgcatgggcaaggtcgatttctccggtttccagaacctcgccatcgtgtccgtgccgcagttcatgccgttcaagcctgagttcgactggggttcgatcatctccatcggcctgctctacgtcgtctcctcggtcgaggtgctgggtgacaccgccgcgctgaccaaggtgggcctgaaccgtacgcccaccgaacgcgagaccgcgggcgccatcgccggcgacggcctgatctccaccgtatccggcctgttcggatgcctgccgctgacctcgttcgcacagaacatcggattggtggccatgaccaaggtcgtcaaccgcaaggtgattctctccggcggactgattctggtgctggcgagcttcgtgccggccatcgccgaggtgttcaactcgctgccgcaggcggtgctcggcggctgcacgatcatgatgttcggcaacatcattctttcgggcttccagatgattgccgaggcgggcttcacgcagcgcaacatcacgattgcggcgctttcgctgaccatcggcatcggcttcacccaggtgagcgacatcttcgcgcagttcccggcactgttccaacaaatcttcgcctcgaactgcatcgccgtgtcgttcgtggtggccgtaatcctgaacgccgtgctgcccagcgaggagcacttcctctccgcgcccaaggaggcaccggccgcggacgccgagtgataacaacgcgacatatcagctgcgcatagtcacatgctgatgccctatcgtcttgcaggatgatagggcatcattgattttgagagagactacaagttgaaccatgagttcgagccggtggcgtgtcgatcaatcgacatcttcccattcgaggatgtctccgggttggcagtcgagtgccttgcagatggcgtccaatgtggtgaagcggacggctttggcacgtccgttcttcagaatggacacgttggcgggcgtgatgccaatttgttcggcgagctcgccgacgccaatcttgcgtttggccatcatgacgtcgagattgatgcgaatcgtcatctcaaatcacctgctcaagttcgcgcccgatccggacaaggagaacagtttccatacggccacgaacgccgcttcgatgcagagcaggaacagcacgcccataatgagatatgaccagtgcatcgacgtctggctcgggcagaggccggccagcgcgccgctcaatcccggtacggcgaatagttggccccataggcaggccagccagaccagaatcacgatggctttcaacgcgagcaacacccatcggttcatgtagtttttcatagcccggtcctttcaggtgccgacgtttttggcgacaccgcgaacatcgatatgactatatcgaaaaacgatataccttgcaaggcgtattgcgtcaaccggcattggtcgctcatatgcatataggcttcggcagactgtcagcagaccgtcagctcaacggaacgaacgccatatgagccacccattcgcgcacgagcgtgatgacggcttcgggttggtcgatgtgcgcgttgtgaccggcattatccagagtcacgaaggtggcgttgggatagtgcggcaacagggcttgctggtcttcgcatccgacgatctggtcttgcttgccggtgacgatgagcaccggaccagcatatgtgccgagcatttcctcgggattatcggccagccaataacgctgatccagtcgttcgcatgccgcacggtcgcacaacgccacgccgggcaggatgaaccgttggtagcgccgccacgcgtcgaatgactggttgacgcccatggtaatgaaatcgaacacctgttcctgtggcaaggagtgcgtcagcttgggattgggctgtgcaaccacatgttcggccacatgccggccggcatgctgcgggtccacgaccggcgcgatcaatgccataccggccactcggcgaggttcgcgcgccaatacttcgcggacaagcgcaccgcccatcgagttgccgaccatggcgaatggagccgctttaccgacaaggccgtcaatggccgtttgcagccaatccgccatttccggcagcccgcaggcatgctcgggcaatgccggcgtacggccgaaaccgggcagatccagatatatacggcgaattgaatcattgccgtcaaacgccttgtcgagcatcatcagcgaacgatggtccacacccatgccatgcacgaacacgacgggcaatccatcatcattgccctcaatcgcgcagtacggctgcaattgtgccatgtgttcctctccttcaacccggtacaaatcgcctttcacacaatagcggcagcagctcccctggtgtcggagcaatcccgaccgccattctcggtttcgaggggctgattgcgtggtttggggac

SEQ ID NO: 2575 - DNA, 15910 bp, Unknown
  R50_10m  MAG No. k141_32558
caacgaccggcgttgatcagcgtagccatcggtaccgctgtaatcgcgattgtcggcggaatacggacggttcgacgcaaatccaagaaccagcttcagcggtaattcagccaaagttcagtttggagatctgccgagtttgccttcatacggtgtcggcttcatttctctctcatactctcggggtgtcatccgccgaagagcatcatgctgcggcggcacaacccgaggaaggaacgggagtaatgttccacaccaacaatttcaccgcgatgtcgcggcgcgccatcgcgctgctcaccgctgcggtgacactgagcagcatcgccctgatcggcgtgcccgctgcggctgcggacgagcagcaggccactgccgaacagaacacggctgccaaaccatccgtaatcatcaacgaggtctatgccggcaatacgaaagctgccggagacccggatagcaagcgttgcgattgggtcgagctcaagaacaccggctccacagacgttgacgtgaagggctggggcatctacgacagcggcaagaaagccaagaagcactacaccatcggcaccagcgaagtaacgaatacggacaccgtcatcaaagccggcggatatctggtggcatacatcgaccccgacaaggccgagcccggcctgggttccgatgccgacgaagcctatctgaccactaccagcggcgactttaccgatagcgatgtggtggattccacgtcatggaataccgatacaactggcgtgaagaagatgagcgacagtcagtcatggtcccgtaaggacgatggcactttcgcgctttccgatacgcccacgcccggtgcacagaacgtgttcgatgacccgactccgactccgcccgccggcgagaccatgaccgtggacgcatggtcgggattggccgatgtgaccacagtggatgccgaaggcgaatttggcgccaaaggacaaggcggcgaccacactgacggcaatctgtctggtctggtgtatgaagccggtaaagacggcaagcaaggcgtgctgtgggcggccgacaacgatctgaaccccacgctcggcaacaccgctgataagggccctggctccatcaacaagttcgtctaccagaacggcacatggcagcaggatcccactgatggctggaccttcaccaacaacggtcagaccaagggcggcaagcagctgcacttcaaggacggcaagggcggtgtggactccgaaggcatcacgctgatcaacggagattcatccaagggcatattcatcggcgccgagcgcgacaacgaaaacaagaatgtgccgcggccttccatcctgcagtatgacgtgaccgcgaaaaccaccgacgccaacggcgacggagcgcaagagctgaccgctacgcacgagtggaatctcaccgcagcactcacacaattcggcgtgacgctgggccacggagcggacgccaatcttggggtggaaggcatagcctttattcccgactcggtcctgaccgccaacggattccagtccaaccttgacccgaagaacgtaatgacctacgacccggacggtttcggcaatgatttcggcggtctgttcttcgccgcactggagaaaaccggccatatctacgctttcgcgctgcaaaccgtgaatggcgaggacctggtacatccggtggccgacatcgacctgccgcagtccgcggtgaacgccggctatgatggcccgcgcgatctgacttgggacgccgagcacaaccagctgctcgcccaaagcgacaatgacgcgaacaccggtgccaaaatcggcacctacgaattcaagaacggtgtgctgcagctgaccaagctgaccgacactccggatgaaatccgtacgcagaacaccgaaggttttgccatcacccctgataccgaagccaccaaggtagtaaatggcaaggtgtacaagccggtgttctgggcagacgacggcgtgaccaatggccattcattgcgtatgggctatatggcaaccaatcagccggttcccgccagcaccaccatcaacctgctgaacttcaacgacttccacggccgtatcgacaagaacctcaccgtgccgttcgccgccaccatcgagcagctcaagggcgaataccctgactcatcactgttgctgtccgccggcgacaatatcggtgcttcgctgttcaactcttcggtgcagcaggaccagccgaccatcgatgtactcaatgctttgggcgtcaaggcctcggcggtgggcaaccacgagttcgaccaaggctatgccgaccttaccgatcgtgtgatcggcaaggagggcgcgcgcaacgcccaatgggattacctcggtgccaacgtgtacaagaagggcaccacaaccccggctctgcccgagtacagcattcaggaggtgaacggcgtgaaggtcggcatcatcggtgcggtcactcaggaaaccggcacattggtggctcccggtggtgtcaaggacatcgaattcggcgatccggtggaagccgtgaaccgtgtggccaagcaactcaccgacggcgacgaatccaacggcgaggctgacgtgattgtggccgaataccatgagggtgcagcctccaatgaagatgacgccacggccaagcccacgcttgacgagcagaaggccgccagccccgtattccagaagattgtggacgataccgatgcggcagtgaacgtgatcttcactgcacacacccacatgaagtactcgtacaccgatcccgcgcacaacaaccggccgatcatccagaccggtagctatgccgccaacatcggccaagtggtgctcacctacaacacggccaccggtgcggtgtcttacgacaagtccggcaacacggccgtgcaggtggcttcgcagcccgccgacaaaaatgatccgcactacaacgattacgccgaatacaacgatggcctgctcgccgccgcgaatccgactgtcgccaaggtgaaggacatcgtgtaccaggcccttaaggtggccgatgaaaagggcggcgagaaggtcggcaaggtgtctgcggatatcaccaccgcattcaaggacggcaagcgtgacgaccgcgcctccgaatcgaccatgggcaatctggtggctgatgcgctgctcgattcgctcaaaggcgaggaccgcggcgcggccgaaatcggtgtggtcaaccccggcggtctgcgtgccgaattctgcaagtccggcaccaatgacgcctgcacgctcgatgccgacggcaatatcacctacgcccaggccaacgctgtactgccgttcctgaacaacctgtggaccaccacgcttaccggcgcgcagttcaaggaagcgctggaacagcagtggcagacgaacgcggacggcagcacgccatcgcgcgcgtatctgcaactcggactgtcccacaacgtgagctacacgtatgatccggatgccgcgcaaggccatcacatcacctcggtgaccgtcaacggtgagcctttggatctgaaacgcaactaccgtatcggttcgttcagcttcctgttggagggcggcgataacttccgcgccttcgcccaaggcacgaacaccaaggacaccggtctggtggaccgcgatgcttggatcgactatctcaaggacaacaatccggttgccccgcgctacgaccgccgtgcagtggccgtcaccggtatcccgaccggtgcggtcaaggccggtggctcgttcaccctgcacttctcgaagctcacgctcacctcgctgggcgtgcctgacgagacgaagctgaccgccaccatcggcgagcaggtggtcggcgaagcgcaggttgcgaatggcgataccgccgagctcaaggtcacgattcccgccggaaccaagaccggtgatataagcctgacagtgaccggtgcgaccaataagaccacggtcgctctgcccgttgccgttaccggagtgtccaccgggacggacgacaaggataacggcaaccatagcggtagcgtcaatgccaatggcagcaccaagccacagcagaccgaacgtacggccgataccggtgcctcggttgcgttggttgtggttctggcgacgctgttcgctgcgggtggcgtcaccatcgtggtcaagcgtcatgatgcggcgcgcaagtagcgcttgaagccgcgtgcgctggtcggatgcttcagcatgatgccgacgatttgccggtcggtgatgatctctttctcgtagcagatcgtgccgtcttcctgatggctcaggtatgtttcgggccgtttgccgcttctttatgtactgcaaacggacgggggattggccgatagggatgagagagaacggagagagtatgaagtgccaggtttgcggaacggagatgccggagggaagccgattctgcacggaatgcggtgcgccgatggcacagtctgcgccaagcccaagtcctcagtcgatggatggcccgacgctggtaccggctgctccccagcaggtgccagcgggttcgatgccgttgcccccaagtttcaacacggcgaccgcacctacttcgacattgccgactgcgccaggtaatggtgaaaccgcgcagccgcgttccggtgggtctgccggaaagaagatattgctggggatcgtctgatccaggcgtgataagcggcagcaacgttacggatgacgaagccgaaaataatgcaagcaaggcattggattggcaggtcgagcacgacaaggactccgcagagctgttctattccacgtataccgcacagctgtccagcaagcgtaagggtatggaggctgaaggcaagacctggaactaccgcgatattcttgcgcaattcatcacgatgcacaacaagaattcaaacgtactgcttatctggtcgggtgactggcccgcctacagcagcaattccgacaaatactatgtgattcttgccggtgagggcttcgactcgacagatgaggcttggaattggtgcaaagccaacaattacggtccgaacgactgcatgcctatagatttgcagtaacaggcgaaatgtgaatgtcgctacgttgctaggtctcctgagttacaagacgtacaatcgggagcatggccaaggacgacgacagaaccaacgagcctgaagaggccggcaagtggggtacggccggaaaatcctcaggaaagaacaacaagaacggcaagggaaaggaatccaaaaccgatcgacggatcgacaaggtattacagctcgcggtggatcgcatagacaccatcgactcaagtgccagcgtgcctgaacgactggcgcgtgcggcgaaatccagtgaactgctcagcgccgtatggtcgttgccgcccgctcaacgtcttatgttccaccacggcatgcaggtcactgatgtcgaaggcgattccactcccggattcgacggcaataaagaggacgccgagaagttcatttcgatcagctcctccgaaatcgcccgataccagcggctcatgtacgcgaatggcgtcaaaggctcgacacggcggctgctcatcgtgctgcaaggcatggatgcctccggcaagggcggcattgtgcgccacgtgttcagccaaggcgacccgatgggcatccattaccatggcttcggcaagcctacggccgaggagctcgaccacgacttcctctggcgtgtgaagcgtgaattgcccaagccggggtggattgccgtattcgaccgctcccattatgaagatgtggtcatgccgcacgtctatggcacctatcccgaagacgtatggcgtgcccgctacgaccagatcaacgatttcgaacgtgaactggccgccagcggatgcgccatcctcaagatcttcctcgtggtaagccaggaagaacagaaaaaacactttcttgggaggctggatgatcccaccaagttctggaaattcgatatctccgacctcgaggcccgcgaccgatgggatgagtacatgttcgcttggcaggaagtgttcgagaaaaccagcacggccgccgcaccgtggtacctcgttccggccgataaccgctggtattcgcgagccgtggtctccgaactgctgcgcaccaccttgaagaacatgaacatgacctggcctcccctcgaacccgaggtggaccccgacgaggtgcgccgccggttggcgtgagcgatcctcccattggcggagccaagcgcatggcacagctcttcgcatggctccgcccgctggcgggaggcgtcgcatagcgacggagggcggctcgtgccgtcggaataggccactaggtagactgagcattatgactgacgagaaggaatacggatccctggggcggctggcccccgaatgggacggcgacggacgcgaacggaatcttacggccgacgacatctacgaacggttcttcggctgggtggaagacgtcaagggcatcgagccgtggccgcatcaggaagaggctattatggacctcttggccggcgaccatgtgattttgaataccccgaccggttcgggcaaatcgctggtggcgctcggcatgcacttcgccgccctatgcactggccgccgctcctattacaccgctccgatcaaggcgctggtgtcggagaaattcttcgacttggtcgaagtgttcggccgcgacaatgtcggcatgatcaccggcgacagccacatcaacgcggacgcgccgatcatctgctgcaccgccgaaatcctcgccaatcaggctttgcgcgaaggcacccatgccgatgtgggcctcgtggcgatggacgaattccattattacggtgatccggagcgcggctgggcgtggcaggtgccactgctcacgctgccgcagacccagttcctgctgatgagcgccacactcggcaatgtggacgccatcgccgacaagctctccgatctgaacgacaccccggacgtggatgtaatcgccgacgcgccgcgaccggtgccgttgagctacgaatacacgctcgacccgatggaaaaaaccgtggaactcgccttccgcaacggcgaaaccccgatttacgtggtccacttttcgcaggacgccgcattggagaccgcgcaagcgctcgcctccaccggtgtatccagcaaggaacagcgccaagccatcgcagaagccatcaaaggcgtcaagttcaccacagccttcggcaagattctgcagcgactgctgcgcaccggtgtcggcatccatcatgccggcatgctgcctcgctaccgccgcctggtcgaacagctcgcccagcagggtctgctgccggtgatttgcggcaccgatacattgggcgtcggcatcaatgtgccgattcactccgtggtgctcacggccctgaccaagttcgacggcaccaagatgcgccgcctgcgcgcccgcgaattccaccagattgccggacgagctggccgtatgggattcgataccgagggactggtgatcgccgaggctcccgaatatgaaatcgaaaaccagaaagccatcgccaaggccgggggagatccgaagaaactcaagaaggtcaagcgcaagaaggcgccggaaggttttgtgacctggaaccagagcacgtttgataagctcatcgacgctgaaccggagaccctggtcccgcacctgaaaatcacgcattcgatggtgctcaatgaagtggcgcagggcggtgacgcccgtgcccgtatcgacgatctcatcgacgattccgcgcagacccccgaccagaaggagcatctgcaccagcgggccgacgagatcttccaaaccctgttcgataccgaagtcatcgaaaccgaggaccgcaaggacggcggcaaggactactacatgacccttgatatgccggacgacttcgccctcgaccagccgctctccccgttcctgctggccgcgctcgaactgctcgaccccgagtccgacacctatgcgctggacgtgatctccatggccgaggccacgctcgaagaccccaagcaggtgctgcgtgcccaggagcgtcaggcccgagacaaggcgatggccgatatgaaggccgacggactcgactatgacgagcgtatggataagctgcaggagattacgtatccgaagccactggaagacatgctcgaagccgcgttcgatcagtaccgccacgatgtgccgtgggccaacgactactggctgtcgccgaaatccgtggtgcgcgacatggtggaaaccgcctccgacttcaccggatacatcacccgatacaacatcgcccgctccgaaggtaccctgttgcgctacctctcggacgcctaccgcacgctggcgcgtaccgtgccgcccgaaaagcgtgacgagcaactcgaagacatcatctcctggctgcgcgtgctcgtgcgctccatcgactcctcgctggtggacgaatgggagaacgccggtgactcggctgaccaatccgaggctgcggcatccttggccgcgcccggcgcaaaaagcgcggtggtcgaggaccgtcgtggtcttaccgtgctggtgcgcaatgccttgttccgccgtgtgcggcttatggaccttgaccagccggacaagctcggcgcgctcgacaaagactggggctacggcgtgcacgaatgggaagatgtgctcgacgactactacgacgagcacgagtacgtgggcatcggcgccgaagcgcgctcgcccgaactgttcatgttggatgacaagcacgagaacgacgagcatacgtggaaggtgcgtcagattatcgatgattccgatggcgaccacgactgggccatcgaaggcatcgtggaccttgacgccacccaagacaccggcgaagtagtcttccacgactacaaggtgagtaactgattcctggctcccctctctgagggaagccaaggtgcagctcgaacgtctgttcgaacactggggtactataggacgttatgagtgagaacgatttgtttggggcggctgatgcgccggagtcgatgacacggccgttggcggtgcgcatgcgtccacgcactttggacgaggtgattggccaaacgcaggtgttgggccagggctcgccgctgcgccgcctcgccaatccggccagcaaaggcagtctcaccgcgccgagctccgtaatcctgttcggccctccaggcgtcggcaagaccacgctcgccaccatcgtggccggccaatccggccgcgtgtttgaggaactctccgccgtgacctccggcgtcaaagacgtgcgcgacgtactcacccgcgctcacgaacggctcgtgtcacgcggccgggaaaccgtactgttcatcgacgaggtgcatcgcttctccaaatcccagcaggatgcgctgcttcccgccgtcgaaaaccgcgacgtgacctttatcggcgccaccaccgagaacccgagcttttccatcatcaaaccgttgctctcccgttcggtggtcgtcaagcttgagtcattggagcctgatcagctcaccgaactggtgcagcgcgcgctgactgatgaccgcggtctcaggggcgaggtcaaagccacggacgaagccatcgccgacatcgtgcgcatggccggtggcgacgcacgcaagagtctcacgattctggaggccgcggctggcgcggtcaccggcgacgaagcccgcaaaaagggcgcacgccgacccatcatcacctccgaaatcgtggctacggtaatggacaccgccaccgtgcgctacgacaaagacggcgatgaccattacgacgtgatttccgcattcatcaaatccatgcggggctccgatccggatgccgccatccattatctggcgcgcatgctgaaagcgggtgaagatccgcgcttcatcgcccgtcgcatcatgattgccgccagcgaggaagtcggcatggccgccccgcagattttgcaggtcaccgtggccgcggcgcaggccgtggcgctggtcggcatgcccgaggcacgtattgttttggccgaagccacgattgccgtggccaccgcgcccaaatcaaatgccagctataacgccattaaccaggcgctcgcggacgtggataccggcaagatcggcgctgttccgctgtatttgaggaacgcccccaccaagcttatgaaagagtggggcaaccacgagggctacaagtatgcgcacgattggcccggtgccgtggcgccacaggaatatatgcccgaagagctgcgtggcaccgagtactaccatcccaacgatcgcggctatgaacacgaagtcagccagcgtcttgccaagattcgcccgatactgcatggtggggaacccgaacagaaatgaacataggggagtaaagtgtaacgcaacaataacagtggaaaaaggggaggcaaacaccatggcgaccatcttcatcgtggacgatgatcaggccatcggcgaaatgcttagtcttgttttggaaaacgagggattccagactgtgacctgcctggacgggctgagggctgtggaaatgttccccatcgtcaagcccgatttgattctgcttgacgttatgctccccgggctggacggcacggaggtggcccgccgcatcagagctacctctaatgtgccgattatcatgctcaccgccaaatcagacacacttgacgtcgtggccggcttggaagccggtgccgacgactacgtgcccaagcccttcaaagtagccgaactgctggcgcgtatccgtgcacgcttccgcatcgccaagccggccgccgaagacggtgccaccggtggcgcaagcggtggcaatgcaaacgtcaaccatctggaacgcggacccatcgtcatcgaccgtttggaacacaccgccaccaaggatggcaaggacctgaatctcactccgatggaattcgagctgctgttcatgcttgcggccgccgccggcgaggccatcagtcgttccagcctgctcaagaatgtctggggatacgagaattccggcgatacgcgcctggtcaatgtgcatgttcaacgccttagggccaaagtggaggacgaccccgagaacccgcaaatcgtgcagaccgtacgcggtatcggctacaagttcgtcactcctgaacaatgaacctgcgccctcgattcagcctcaaacgcttgctgcgccacggacgcgctgaagttcgtcgctcactgcaggcccgcaccgtggccctcaccgtgattcttacgctggccgtggccatcgtcttctctggcgtatcgatggtatcagtgcgcgcctcgctgcttacccaaatcacttcgcagtcgcgtgccgactattcaaacatggtgcagcaggcccaaaccagtctggacgcggccgatgtctccgccgtagtgcagatccaacagctggtcaatgacttggcgtcctcgttgcaatccgaggggtcctccaacctgataggtgtgtatttgtggagtcgtgataccaactcgcgtgccatcatccccgtatccaccgaacccagctatcaaagtctgatttctgacgacatccgttcgtccgtggcttccgacttggatgacagcgtgttctatcagccggtcgaaattcccggtgattccggcatgccgggcagcgggacgcccgcagcggtgctcggcaccgtattggactttggcgtggccggcaacctcgaattcttcgccatttattcgtacacgttccagcagcagtccttgacgcagattcagctcagtctggtggtcatctgtgcgttgctgtccatcgtggtgggcgtagtaatctggctggtgattcgtggcatcgtgcgcccgattggacgagtggcagcggcctcggaaacactggcctccggcaatctcgatatgcgcgttaccgtggatcgtaaggatgagcttggtgtgctgcagcaatccttcaatacgatggctgatgcgctcaaccagaagatcgatgagctggaggaagcaagcgttttccagaaacgatttgtgtccgacgtcagtcatgaattgcgtaccccggtgaccaccatgcgtatggcttccgacctgctcgaaatgaaaaaagacggcttcgacccctccaccaagcgtacggtcgaactgttggccggccagatcagtcgattccaagacatgctcgccgatctgttggaaatctcccgctacgatgccggttatgcggcactcgaccttgtggaaaccgatttatgcgaaccaattgaaacggcagtggaccaagttgacggcatcgcccaagccaaacgggtgccgattcacacgtatctgcctaatgtgcaggttttgactcgtatcgattcgcgtcgagtgattcgcatcgtcagaaatctgttggccaatgccgtcgatttcgctgaggaccggccgatcgaagtgcgcgtcgcggccaaccgcaaagccgtggccatcagcgttcgcgactatggcgttggtatcgacgaagacaaagtcgctcatgtattcgatcgattctggagaggcgacctttcacgttcacgcgttaccggcggcaccggattgggcctggccatcgccatgactgatgccttgctgcaccacggtagtatccgtgtacgttcggcagtgggggagggcacctggttcttggtattgctgccgcgtgaccccgaccaaggtgaggtggcggacgctgaactgccggtgaattttgcttctgaaacgccggatgacctgcgtgttaccggtgggtttggtgtggccaccagccaagtcacacatgattatcatgaggttcgccgcgacacgatgatggggaggccactatgagacgagtggccagaacgattgccgccgcaggcgcggccatagcctgttgcatcacgatgacggcatgctcaagtccgttcggtttgccgattagcggctcggtgcagactctggcaccggtggaacagcagacccagcgtgtttacaccaatcctcaggggcctgcggacgatgcacagccggaaaccattgtcaaagggttctatgacgctatgcctgctggcgtgcagtccgatggctatcgcgtggctcgcgaattcctgactggctcggcttctgccgggtggaatggagattctgcggcactggtatacagcggcacccctgatttccgccgacgcgccaacaccataagcgcgccacaaggtgcggaaagctcactgattgtggaagtggaacttcaggtggtgggttccttggattcgcatggcgtatacacgccgtcaaacagcacccaaacgcgcaggcttccctatacgctgatgaagaaaagcggccaatggcgcatctcgtcattggaaagcggcgtggtgatttccaccgcagattttgaacaggtgttccgccaagtatccgtgtatcaggtgagtacttccggcaagcaacttatcccggatattcgttggttgagctggcgcaactggcgcacccaggcagtcggtgaagtgctctcggatgcaccctcctggttggaaggagtgctgcgaggcgccggcttgtctaccatcaaactcgcggtcgacagcgtgccggtgaagaacaatgtggtggagatacacctcaacagcggtatcaatgcgttgaacgaggaagaacgaggcctgctggtacgtcgcatccgtctgactatgggcgacggcaatgccgaatacgcgctgaggattaccggcgatggagtggactattccgatgccgacgcaaatgtgaaacttactaccgagcagccgacagcgggcgtatacacgttgaccggtggtcatatcgtttccctggccagctccagtccgttgcgtgtaggggaggcccccggatatgacgatgctcggggcttcgttttttcctcatccggcggcgcggtgttgcgtgcggacggcgtggtcgaatgcctgaaatctgatggtgcgtcctgtggggtgatgttctccggcgagccgatgcgatcgattaccgaaggtctggatggcgaagtatgggctgtatccgagaacgggcgcgaattgcatgtgtcagatgggggcaaggaaaccgatctgaagcttgattggcttggtgctgccgacagcattgtggcattggcggtttctccggaagggtgccgattggcgttggcagtcaggggcgaggacacgaacggcgtgatgatgaccggtgtggcgcgcaacggtgataaaacactgagcggtctgagcaaagcggccacccaagtgagtgtgctcaggcacgtcaccatgctcacgttctacaatgatctgaatctggtgtacgccaccacacctcctgagggaaacagcgaacaacaagaggcatggcgtcaaatggcaccaggcccggccaatgcgcagcgtttacccaatggaatcataacgtcgatggcatcggggcagatcagcctgtctcgtcgcctggccattgtggacgatttgggtattgtgcgctccgtttccggctcactcgacggttcctggaccatcgccgatagccaggtcactgccctcggtgcgcagtagatggtataagaaaaacggtgttcataataacttttcttgtgttgtgatgcggcggctttgtcgctcggctgacgagcggcattgccgccgtgcaaccacctcttattatggcttaataacaaggcaaaacggcgctgtgaagccgttttttgaactactgttatcaaactgttataaacctgttatcaaactgttatcgcatgcgattgaacatttggcctgtgagcgtcacactagagattgtcgatgacgaacagtcaccaaacaggatggaagatcatccaaaaaataaacactgctcgaggaggagtatttatgaagaattggaagaaggccattgccctcgttgcttctgctgctgcgcttgtcagcgttgccgcatgcggttccagcaacgcaggtggcagctcggactccggcaagaagacggttggcttcgttgctgtgggccctgagggcggcttccgtaccgccaacgagaaggacattcagcaggcattcgaggatgccggctttgacctgacctactctccgacccagaacaacgatcagcagaagcagattcaggcgttcaacaagttcgttaacgacgaagtcgacgccatcatcctgtcctccaccgaggattccggttgggatgactccctgaagaaggccgctgaggctgagattccggtcttcaccgttgaccgtaacgtggacgtcaaggacgccgaggccaagaaggccatcgttgctcacatcggaccgtccaacgtctggtgcggcgagcaggctgccgagttcgtgaacaagaacttcccggatggcgccaacggcttcatcctcgaaggccctgccggcctgtccgtggtgaaggatcgtggcactggttgggacaacaaggttgcctccaacgtcaaggttcttgagtcccagtccgctaactggtccactgatgaggccaagaccgtgaccgctggtctgctcgacaagtacaagtccgacaacccgcagttcatcttcgctcagaacgacgagatgggcctcggtgccgctcaggctgttgacgccgccggcctcaagggcaaggtcaagatcatcaccatcgacggtaccaagaacgctctgcaggctcttgttgatggcgacctctcctacgtgatcgagtacaacccgatcttcggtaaggaaaccgctcaggccgtcaaggactatctggatggcaagaccgttgagaaggacatcgagatcgagtccaagaccttcgacgccgcctccgccaaggaagccctggacaacaacacccgcgcctactgataagtctgctgcgactcattgataactggaccaaataattgatgtga

SEQ ID NO: 2576 - DNA, 3661 bp, Unknown
  R50_10m  MAG No. k141_32606
cgacggattcgctgacgattatgtcgccgcggcggcggacggcgacaattcgccgaacgtggacacggttaccagctacgcatccggctccgggtcgatggcgcggatgaacgtcggcgggttcctctcgctcacccgcaccgcactgatcggcgcgcagacgagggtcgaccaggcggcgctcgccggcatgatgaacgctacaggaggggccgccggttttgatggcgcgagtctggaccaagacatgctggactcgctgccggaagggcaagtcgacaagccggatatcaaggatctgtcccaggccgccaaaatggccgccgaatcggccagcgatacagacgtgaaccatcagatcgccgtggtcgatacgccgaccgaggagtcggcaagcgctgcggatacggcggtcagcggattcggcggcaccatgaaaaccgcgctgtacccgctgtccctggcgatgaccatctgcggatcgatgatcctgggcgcgttcaccaccggcgaggtgcggcggcgtctcaccgcctcgccccgacgcatggtcctgatgggactccagcggttgctgacgttgggcggattcgcgctcgtcgtatgcgtcggctatttggtgctgtcaatcggtctgatgatggcggcggggctcgatccgttgcacctgagcgtcgggggagtgctgatgacgttcggcgcgacctgcgtgtacgcgctgatgaccgtcgcctgcggattcatgctcagcgagttcgggctctcggaagaggctgccaacggattcgccaatatcttcggactgctcatcatgttcacgtcgggcgtcgcattgccggttgacatgatgcccggcgtgatggtgaccatagccaagttcctgcccggctggtggtattgcaccgcgatcgacaacgcgctcggcttcggcacggctgcggagagcggcgtgagcgtcgccggctgggccggctcgctgggattggtcgcactgttcggcgtgatgttcatctgtattggcctggccgccggccgcttccgccgatcccgtcccaccttggccgcgcctgccaccacgcagctggccgagtgagaaaatcagcctttcaaccgataccgctgtaccgagtcgtcggcgaacttgactcgggcgacccgcccttccttcatcagctcgcgcataccggatgtggcggccagcggcgtcaactgcagttcgcgcatgatctccttgacgctcatcgccgaatgccgctccagtacggtcataatcgccttgaccacgtcacccggcgaactgttcgccatcgtgcgctgcttggtgatggtcatcgtgaacgtgttgatgtcgttgcgcgtggtcgccggctcgatgccggcctcgcgcaacgcggcggcgatgcgctggtagccgtcgccgccttctgggttcacaaacccgccgcccggatacggcgtggactccagcagcgtgaacaggaactggtttcgggtggagacgaacggtgcacccgtcaccggatgcggactcgccagcacatcatgtgtcaccatgccgtacaggccacccggattggtgatctcaatgcgatcggtgaacacgctgatatgcacctgcgtgccgcgcgcatcgggcgaataatcacggtgggtgagcgcgttcgcaatcgcctcgcgcaacacgagtggcggataatcgggcttcttcgcgccaatccaacgcatcagcgagtcgaccgcatcgtcgatcatcaccggaatcgaaccgaccaccgacttcgaggcgaccaatcgttcgtcgccccggaacacatcgtcccggctcgtccccggaaacacggctatcgaaatgccgagccgcggatagaacttctgcggatagcggcccaacgccagcagtccggccaaggtgggacgcagtattccgccgacctccgattcgtcggaatcatcatggcgcaacacctgcagatccagcagcacatcgatgccgtcccggtcggcgaacacgcgcggatgctgttcgcgcacgcgcgccaacaatccggcaacaagctgcgggtcgaggtcatcggtcgtggcgccgggcacgatatccagatcgtatgtgggctgcagatgctcctcgatgagccggtcgacctcataggaggtcatgcgccggtcgccgtcgccggtgcggatgaacgagccgccgtgcggtccgagcgcggtggtgaagcagggcttgtcgcgcggcagcatctcgtcgatgcgcgcgaacaccagattcgcgccttcgaacgggcaggtgacgatcacgggccgcaccaccggcgtcatcttctcgcacgcctggctcagcgcctcctgcatggcgcgcgcgtcgaatccctcgaccggcgtgaacccgttcttttcggacaggcccaggatgatccagccgccggagccgttggagaacgcggacagcgtatcggtgatggtcgaggagatcttgcgcttgcattccttgacctcgcactgctgcgtatcgttgccgatcagacgcatgagttcgatcagctcagtcattttggcagtatagtcatcgaccatggcggcctccttgacaccattgtgccccataatccgccgcccgctcgcctccagacccgccggttcaccccaattcatccagaattcatgggttactggtcaaagtacgaatgattgccgaaaggctgtcgtatatgcgcaatagcggctgcaaactgtgttgcgccagagcgttcaagtcttttagcaaagtcgggaatgtttatcggtggccgatgtcgagaatcgataagctcacgtatggcgctagctgtggcttccggatttcgtctaagtaatacacagagcaaatcatctggcgtgatgacctgaatggagaaagagtcaagcagtttctggggaaaatccttgatattgcgcgtggccagtgcgtctgcttgtccctgtgccgcagccgcaagtacgtgacgatcatccgggtcaggcagatcgaattggctccattccgattcctcaacatgtatggaggattcggggaatgcctggtccatcattatcagtcttttccggaaggcttgttgtgcggcgtcaggcagtgttcgggaggcggcttcctgtgcttcttgtaatacgttaggcgaccacaggggaagaaaaaggtcatgctcggccaaggtgagcagaacatcggtcaaggtgatggaatagatgacattggcatcaagaaacaccgacagcatcggcccgtactctccttacctccgataccgcatgcctggcttcctgcggggtcggctcgggcaggtcgtacaattcggcgtcttccccgacgccgatcatttggctcagggcgcaatccttggtgtgtttcgaggctcgcttgtattcaagcaggtcttccagccggatgcgacggtgattggacggacgtgaaaaaggaataagtcctttatcaagcagtcttatcagtgtttgccgcgaaatgccgagcattgccgccgcctgttcggtagtcagatcttgttcggtggcactgatcattacacttttgccttcggcgagaaggatggccgtctgcctgacggcgtcgcaaagctgcgaaggtaggggagtctccacgccgctggcatctttgatgaagatc

SEQ ID NO: 2577 - DNA, 4892 bp, Unknown
  R222_15m  MAG No. k141_588
aacagcaggcccgacgcttggaaaccgccaaagtggagctcgccgccgaaagcgaattcgacgtcaccatcgtcaacgaaaccgtcgatcaggccgccgccgacctctggtccgtcatcgccaaagaatacgggctgtaactaccgctttaccaccaactgctggtggaggatttcggtgctgtttttggccggggattgcttccaacggattgcttcggattcgtgatgctcggtgacataatgccgcatccattcgaagcactgctgggtttggatggcatcgcttaatgcgcggtgttcctcattgtccgcgatgccgaagcgtacgatcaggtcggccagacggtgatgccgctgcgcggggaacagggcgcggctgatctgcatcgtgtcataatccgcgcaggcaaagccgcagccggcgatatgccgggtgttgtaatccaggaatcgcagatcgaagctgacgttatgaccgacaatcggctcaacggtgggaccggcagccggggtagcgagccatgcgatgaatcggggaagcacctcgtcaatcggatcgaggtcggccaccatcgcatcggtgatgccggtcagcgtggtgatctgacgcggaatcggccgcaagggattcaccagctgctggaattgatcgacgatatgcccctcccgcacgcgcacggcaccgatttccgtgatggcgcaactgttcgggtaaaagccggtggtctccagatccagcgccacataatcggtgggaaagagggcatcgtccatggcgattcgcccgccggcaccatgattgggctgggatggttggccgaaaacggtaatgccggaagtggtcacggaggctcctcatatcagtcggtgttcggtgacttattgtaccggcagcccggtctgacggtacaatttttccctcccggattttctcggatatattggttaggcggccggcaacatgcggcgcatcgggaagggagcacagctgatgaaacggatagtggcaggcatcgtggcgcatgtggacgcgggcaagaccacgctgtccgaggcgctgctctaccgtaccggtgagatccgcaaattggggcgagtggatcacggcgatgcgtttctggacaccaattccttggagaaggcgcgaggcatcacgattttcgcgcaccaggcattggtagaacacggcgacctgcgcctgaccttgctggatacgccggggcacgtggacttcgcagccgaaaccgaacgtgtgctgcgtgtgcttgactacgcgattcttgtggtctccggcacggatggcgtgcaaggccataccgagacactatggcgtctgctggccagatacggtgtgccgacgttcatcttcgtcaacaagtgcgacgccgccggattcgcccgcgaggccatcctggcacagttgcgcaaacgcctgagcgatgcgatatatccgttgccggcaatggaacagttcactgagggcagcgcggtaccgttggacgcgttcgccgaagacatcgccaccctggacgaggaggcgatgaacgactatctggaacatggcgtgctgtccgtgggcagattgcgatcgatgatcgccgtacgcgagctgttccccgtatatttcggctcggcattgaaactcgaaggggtcgaggaattcctggacgggctggagacgttcacccgcgaacgtgaatggccggccgccttcgccgcacgcgtgttcaagatcgcccacgacggtcagcacaaccgtatgacgtggctgcgcgtcaccggcggtgcgctcaaagccaaggagatcgtctcctcatcctcgtgcgccgcggcgtcgacaccgtcgccagcgcaggaggatgatggcatggcgtggtccgagaaagtcgatcaggtgcgcatctacaatggcgccaaattcgagacggtcaccgaagtgccggccggcttggtatgcgcggtgaccgggctgacgcggaccttccccggcgaagggctgggaacggaaccggacgccgaatcgccgtcgttgcaacccgtgttgacctacacgatgttgcccgtcggagcggaatccgatacggccggcacctcgggagcggccaaacgtgggggagccggccatgacagcgcgaatcaggacgatgccgagcatgatgccgccaagtcgggaaccggccgcaatgaggagaacgacaccgccggccagaccgcggcggacaatagctcgccggcccgtccccagttcgatgatctgaccttgcacaaggtcatcaccgcattgcgtgagctggaagacgaagacccgttgttgcatgtggtgtgggtggaacggctggccgagattcatgtgcaattgatgggcgcggtccagctggaaatcatccagcagaccctgcacgaccggttcggtctggatgtgtcctttggccccggctccatcctgtaccgtgagaccatcactgcgccgatcgaaggcgcaggtcatttcgagccgctccgtcattatgccgaagcacatatcctgctggaaccaggggagccgggcagcggagtcactgtggcctcggccctgtccgaaaatgatttggaccgcaattggcaacggctgattctgacccacctgaccgagcgtgagcatctcggtgtgctcgttggcgcaccgctcaccgatatcaagatgactttggtggccggccgcgcgcatctgaagcacaccgaaggcggcgacttccgtcaagccacgtaccgggcgattcgccaagggctgatggaagccagggcaggagtcagtggccggcccgagacgccggtcgagagccggccggacaccacaggggagggcaactgccgactgctggaaccgtggtaccggttccggctcgaagtgcccgcagacatgatcggccgtgctatgagcgacatccagcgcatggccggcagcttcgaatccccggtcaccgatgacgaatacgccgtgatcgaaggcgaggcgccggtgtccgaaatgcgcgactatgcgatggacgtgaaccagtacacgcacggccatggccgtttctccgccaccttcggcggctacaagccatgccatgacgccgaacaggtcatcgcagccgccgcctacgatcccgaagccgatctggacaacacccccgactcggtcttctgcgcccacggtgccggctaccccgtcaaatggtacaaagtccccgaattcgcccacgtagactacgccatgtgaggtggtgactaccaaatctgcggccgaatgaatccgttggcctccaagaaccgttgaatatcgcgcatttccggcatattgatcgaatgggccatgcccggatacacctgttcggtcaacgtgccgtgctcgcgccagaactcacccatcgccgtcacatcggctttcgggaagatgtcgtccgcagcaccatgcccgtagaacacgggcggcttcaacgaagccaattcggcatcgcccgcaacggaccccggtgccagccatccagagcaggagacggctgcggcatatcgcttcggattgaaacgcagcagatgcgcggccaagaggccgccctgcgagaatcccatggcaaccaccggccgagtggcgggaatatgctccgcaacccatgcatcaatggcttgggcggcctcagccgcctgcttgtccaatgattcgccctccggcacaccttcatgcgcccacgcaccgaaccatgtatatcccatgccataggcgatgggtgcctgcaaactggcataatcagccgaaccggcaccgcaatagttcagcagatcgggcaaatcgtattcattggaaccccagccgtgcaacagcacgaataccggggtggtttcaggaccggtcaaacgggtcaaggccttggcaatcttcatggctcccagtgtagccacgtgaccgccgcgaccgcatttgaacggtccataagcaacccatatagcaacgccgttccattcaagtgtccgatacgttatcgtcgtagacgtgccgcacggggaacggcctcgtgcacagcagccatagagaacaccataaagggggtgcgcaatgaccagattcaatactcagctcgtccacggactgccggttggagacaacaacaccggagccgtgaatccgccgatctacaactcaacgacatatgccttcgagaaggtcgacgcgatgccccgctatgactacgcacgcagcggcaatcccacacgtgacttcctggaacagcagatcgcccagcttgagcagggaacgcgcggttttgcgttcgcctccggcttggcggcgattcatgccgtgctcagcattttcaagcccggcgaccgtattattgtaggggacaacatttacggtgggtcgtattcgcagctcaatgagttctttacccgttggggcgtcgtggtcgagtcagtcaatacccaggacattgcagcgttggaggccgccgtcaagggcgaccgcgcgaacggcatcgcgcctgcgcaagccgtctactttgaaaccctgaccaatccgctgctcaaggtcaacgacgtacgcgccatctccgcaacagcccgccgttacggtgcgctgtccatcgtggacaacacgttcgtgaccccgtacctgcagcagccgctttcccttggcgcggatgtggtaatccactccgccaccaagtacctggccggtcactccgacgtcaacgccggtctcgtggtcgtctccggtgaggatttggccaatcgcgtgtacttcgcccagaaccgtcttggaggggtactggcgcccactgaatgcgattcggtgcgccgcggcatccagacattggccctgcgcatggaccggcagcaggagaatgcgaatgccatcgcgcggtacctgct

SEQ ID NO: 2578 - DNA, 24937 bp, Unknown
  R222_15m  MAG No. k141_937
caaaaaatgctggccaatattcatggtgtcccacaccgtccgacgggtgtcgacagccgcgatattcttcatgtcgtggataccccgaaaatcggtatacccggttcgggcattcataattgtgttgccgatggaccacccatggcctttgctccaacgtctacgcacgacaagcgatgccgttcaacaccacagccggtgaccagacaacccatacccagccaacaccacatcacgcaatccctcatcaacggtagtgggccagcccagaatcaattggactggcccactatggcatcagcaattactcaccgcaacgccccgcaaacaaccctcgttaacgggaaacgagtgcagtcacctcaccgctcgaacgggttcttgcggtacgcaaactgctttctgcgctggttcaccgcgacaatcgctccggcgatggcggccaagaccaccagtgcaccgaagatcatcgtgttgcgcagccacggggtgtgggtggcgtactgccaccagttggaggccacgtagatgttgtcgtaggtggacgtcgcctcgttgcctgccttgtcgatcgtgtggatcacgatctcgtggctcttggcgtcggcgtcgaacgtcagactcggcgtggacttgagcgtggcatcgcccttccagctgtctttgagctggccgtcgacatacacttcggtggacttgatgccgaggttgtctttggcgtccaccgatgcgggctgtccctgctggctgtagtacacggtgccggacttgatgccgagcagcgaagcagtcggcgcggtcgagtcgacggcgaagttcacttcggcagtgcccttacggtcggcgttcttcttgtccatggtgttctgcgagaggttgcccgcctcgtccatggactgcacctgcacacggtagaagccgtcggagttaaagcgggatgccggcacggtgtacaccgtacggctccagcccttgtcgtcagaggtcgcgaccttgtagtcgttgttggtgagcgtggtcgccttgtcgtccttggcgatcacgatctggcgcttgctcaggtcaagaccggagacgttgatctccgttatctgcacgtcctgcgccttcttcaggtaggtgccgcgcaggttcgtggtgtccgcatcgaacgtgtaggtggagccgaagcggttcacggagaaggtcttcttggtctcgaacgtgttgccagccagatcggtgccgtgcgccttgatggtgtacacgtcatcgaagtcgaccttgcgttcgaagtccgtgaagtccacggtgcggtcgttggccgcatcggtggtgacgttcttgggcatcttgtcgcccttgagttcgccgcgatggtcgccgaccagcgtgtagctcacgttcttcatgtcgatgttgacatcgttgaagtcgatcaacggtgccacggtaccggcgtacgcggtcttgtcttccacgcggtcgatcttgatctgcggcttggtcttgtcaaccacgaactcgggttcgctcacctcttcggccttgttgccggccagatcggtggcggtggccttgatggtgaagtgcgcctcgcccgtgaatgccacggagttcgtccactcggtggattcgcgcgtgccgccggtgcgctgccagcccgccgggccgggggctgcggtgtccgcgccgttatcgtccttggcggtgacggtgatgaccgattcgtccttggagaagttgcgctcgacttcgcgaatggtagcgttgcgatcggccgcgtagtacttgccgttcttcacgttgttgttgtcgaaggtgagggtcagcttcggagccacggtgtcgaccgtgaactcctcgtgaatcgtattcgacgggtgatcgcccggatcggtgtaggcggcgtccacagtccagtcgccgtcgctgtcggcggcgaaggtggccacgtacgtcttcaggtcaccactcgcgttcttgaaggaggagaccggaatggtggccttcttgccgtcgatcgacgtggtgacgaccacacgatcgccctcatacttcttggagaaatcgaagttcgattcggtcagtgtcacggtaccggtacggtgggccttgtagtacttgccgttgcgcacatcgttgttgtcgtaggagaccgcaatggtgggagccacggtgtcgatggccacgccgttcaatcccttcagtgcgttggcggcttggttgccgttcacgccttcgtaggcgttgagcctgccggtgtcgaccgggttgccggcctcatcgcgaatggtgaggctggtttcaccaaggtagacgcgctggctgtcgccatccatcgtgaagctgatgctgccggcggccgcgtcgcccgcatagacgggagccgggtcgttcttgccggaaagccagttgtcgaagtgcttggtggagaacgcggtggagtccgcagtcacaccggacacattatcgctgatgccgttcagcgtggccgtgaagacatcagtggagaagatccaatcccacttcttcggtgcttcactggaagcggtcaggtcgcccagcttcggagcggtccagtcgagcaccacgtctttggactgggtggatgcctcattggcctttgcctgtagaccggcataggcgaggtgcagcgtgtaattgccttccacttcgttggtcttgccgttgatcaacagcttctggccggagagcgtccacgtgtagccatcgccttcagtccactgtgcatcgctggcatccaacggcttgatgttctgctcgttctggccaccggtcaacggcgtggtgttcgaagtactaccagcgagcaggttcgtcttgccggcgttgagcttggcgtaaatcgggaaccagtggtcggtgatggtgtaggccaccttgaccttgccacggaagtacttgttgttgttatcactggagtcgggcacggagttgtcggacttggtgaccgcgaaggatgccttggtgtcgttgccgttcacatcggcaacgacggcgtcgtaatccttgacattgtcctgaaccggagctttcttgaagctttccttgtccagcgcgttgccgaggttgtcattgacacttaccgtgatcttgctcaggtcgtagaagccttcctgatcaagggtcaactgtcccttgccttcgttgtcgagtgtgacattcaccgtcttgccctcggcaagcgtcttgcccttcagatcagtgccgtcaggaatggtcagcttaacggagtcatccttgatgccggacgtatgggcttcgttcttcttggcggagtcgttcgaggactggccgttgggcagcaagtccttgatccagaccgtgaacgtctgtgcaccggccttggcgaagaccgtgtagctcttgccttgcacggtggtatcgacgatggtctcgcccttggcaccggccggaccgctgatcttggtcagcactgggcgcttggtgtccaacaggtagttggtagtgccggtgctttgagcgttgaacagctcgacattgttgccgaagttcttctggagcgtcagctggtagtcgccgttgaactgcttgccggtggcatccttgtcggtttcggtccgcttgggcaggtttgcggtgcccagcgtgatgacgctgtccttataggtggcgtcactgatcttgaacgtgaaggacttcgaaccggcgtcgccgtattgcaccgcgccggtcagcaagtctgtattggcataaccagccttgaccacatcccagcggtaggcgaacgcggggtcaccggcgaccttgagggagatgttggtgagatcttccttgtaggtcttctgcgggtcagcatcgttgagctgcagagtcgccttcgcggtctgcttgctcactcccagcgtatccggcagctgcttggccgcagcggccacggtggtatcagtggacttggccagtgcggccttcaccgtggccaatgtggtttcggcatcgctgacattgggcttcgtggtcgccttatcggcggctctgagggatacgccggccagcgtgtacttgccgtcctggtcgccgagcgtcagttggaccttgttggggtcgttgttcacacgctgaagttcggtccacttgccggtgaccttatcgccattccacgtggtgtaatcgaccttggcttcgacctttgccagaccagaggtttgtgcatcgtctttgccggcacctgttgccgtggaatcgggcagcagatcgcgcgcgtccaaagtgatggtggcggcagaacgggacacgacactgatggaatcgtccttggtggaggtcagttcatctctgcctgcctggtaggcggcaccggtgaagctcggagcctgcgtatccacgccgaaggtcttggcgttattggtcacgtcacccaacactgccagcaatgtggggttatcggttaccgtaatggcatactggccgtttgtgttcttggcgtcaatcaacggcttggcggcatccgctgcgatgacgatctcgtcaccggcgccgttcaccgtggcaccggccaccgggaatgtgcccccgtacacggtcttgtcaccggcggtcaatgtgctggtgagcaggttcaggcccttggtgccggcaccttcttgcagacccttcagttcgtccgccagccacgggttgttcttgacggtcagtgtgaccttgggagtgctgttgatgtagtcggtgccgcttaccgataccgtggtcttcggctggacattcttgccgatacgaatcttcgtgtaggtgaacttatcgccggcaattgcgtttaccttttcagccttggactgcgtacctgcattgtccgtggcttggatggtgaagtccgtcaaatcgtaggttccggccttggtgagcgggaatgtgtaggtgccgtcaccgttgttggtcaacgtgaccgtggcctgcttgcccgtctcaggatcgataccgcttgcaatcaccttgcccacaccggcaccatcatccgtaacggtgaaggtcagggcacgttctttacggtcgactgcgaagagtgtctttccgaacggaatatcaatgccgccgttcttggagtagcccttccacgcaacggtaggagcggtggtgtcgatggcgaacgactgcgttacagtcggcgtgcccggcagcgcggagttcaggcttacggtgtggttaccggtcttcaggtccagtccggcatcgccgcagtccatggcaccattcgtaagatcagcggcatcgcacaccgggattgtggcaccggtgccgtcggcagccggaacggtcagcaacttgataccgttcgccttgagcagggcgagttcatcggcgaagtatgcgctcgtgctgctcaccgagaagccgccgaccttgctgtaatacgtggtgccgttgttgacagcacccttatccggggtggtaccggtcagattcagggacagaccagtgccggcattcgggtcaacaataacggtcttcgcgtcgagcaaatcgctcaacggcttcgcatcggaagcgctgccgaaccaattggtgaccgtaaccgtggtcttggtcaggtcggtcttgccgttaggcacggtccatgcttcatctgccttgaccgtatcggtcttggtgccgttgccattcggatacgtcacctcataagacacgacattggctgcctcagccgcaaccggagtaaaggttacggacggcgacgtggtcgtgaaccaggtaccgtcggtcgcgtctttgtctttgcctttcagccaatcagtatcaacaacgtcgccgaacaccgccgtatccacggcggcgggcttggtgctgtcataagacaattgaggagccgtgatggtgctcgtgccgtcgccatccttgaactgattcaggtcaatggcggcatctgccgctgtaggatcagccggcgcggcaactgtcacatcgagcgtaaccggatcaccgctcagagtaaacgccggaccatcattcggctcaacggtgtaggtgtagccgtcctgcacattgcctgtacggtggaagtcgccatacttgacttccttgacgcccaaggtgcccacggtcacggtaaaggcaaccttgtctttatccgcacctacgtattgtccgttacggtcaaattgatccgcagggaaatcatcaaacccagtaatcgtcacgcccagacgaacgttcgatgcgttggtgcggccatcggccaacggctgggcgttatcggccaccttgccgttttcatcggcggcataccaagccaaatccatcttcggcgtcgtggcggcagccggctgtgccttgacggccttgaaggagcgtgcggacaccacggagccggtggtctgctcgggcttgaggtcggaagtcgaatcggcgctggctaccacggcggtagcacccatggcaagagccgccacagccacggccgcaccgatcaacgacttgcgccagaaactggaattagttacgaagctcattacttgttcttccctccacgaaccaggatggtacgggattcatcgtcgtcggacgatgcttcattcgtcttgcggaattgcatcagcgaggtctcgccctcgtccgccaattcggcggcggaagccatggacaccggaatctcaaccacagattcgagtgcggccttggtacccagacgggtgctttcgtcttcctcgtccaccacagccggagcggcggaagccttttgcttggcaccgggcactgcggacggcttgtcttcgccggggcgagtaatgccacccttggtgctggcggaacccagagagccggaaccggtaccggtcaccgggcggaattcgatgtcgctggtgtcatgcgtaccggtggtggtatcggaaagggcacccttcttgcgcttgcggcgcgagccttcgcccagattctcggcgttggcccacgaaccggcgcgcactccacgcagttcggcgatctcacgttccgcgcgcttgccggtcagggcgtcacgcacggcgggaatgttgaacttgcggaacagcactacggccacgaccgcaagaatcacggccaaagccaggaatacgactgccagagtcctatagatatcggcgttcacttggcgtcccccttgatatcaacgaaagcgttggcgatggcgtccttggtgggcttttcggcctgttgcgcggctttcttgctggcatccagctcatcggtggtggtttcggtcttgtcggcaagcgatgcggcggcatcggccaaatcgctcatctgctgttgcgtgatgccgtccgcgcggaacttgcgcgggtacacgcgcaacgcgtccaaggtcaggttcgcggattcgaggctgatcacaccgttatcttcctgagcggcggacttcaccagttcgttcagcttgctgaagtacggcttgtacttgcctgaatcggatccttcgttgatcagcggcacgatctccgtattgaagtcggcgatgtcggcgtagatcttggcgagcttgacgttgctgaagctactctcttgtgccgcgttgtgcatccactgcgaagcggcgcggatgcgggcgtatcgctgtggatcggtgttggcggcggacgcgctttggccggccatcttggagccggagtagtagtaccaatacatgcggccggtgtcgaagctcagctcggcccacttggtggagtccttgcgcaacgagtcggcgtgctggttgatcagcgtgttgtagatctgctcttcgtcgtcgctgaaatcactgtcagcggtgtaacgcttgatcagctgctcgtacggttcaatggcattggtcttgatttccgctgcgcgcacgtaggcggcttctgcggcggatgcgtcggtggtctgcgccgcctggttcatccagtagtcgtaatcggtgttctgcgcgtggttggctagcaccaggctgccgccggcgagggccaggcagaccacggaggcgatcgccgtgccgaggaagccccaccacttggaattcagcgccttgcggtatgcggcgtcttcctgcttgtagtgtttcagcgcatacgcgaagtcggcgcaggtctggaagcgatcgtccggattcttgctggtggccttggcaatcaccagttccaagccctgcgaaagctccgggttgatctgacgaatcggcacaatgccgttcttgcgcgggtgtgagccggtcagcaggtagaacagggtggcaccgagcgcgtagatatcggtacgtgcgtccacggtgccgttctcggcgaactgttcgggagcgccgaagcccggcgtaccgagctggcggtcgtcaccgaccagcggcttgctgtccgcatccttgccggtctccagtgcaatgccgaagtcgataagcttgattgcgccctcaggggtcagcatcacattcgagggcttcatatcgcggaagatcaccggatgcttgcggcggtgcagatagtcgagcacatcgcacagctggatgccccaatcgaccacgtcttcttcggactgcgggccttccttcttgagcaggctcgccaaggtctggccttcgacgtaatccataacgacgaacaggctgcccttttcttcgatcaagtcgacgatacgtggaatcgccgggtgatcgaagcgcttaatcatattggcttcgacggtcaggctcttaatgaccaagtcgcgctgcaccggatcagaggcactgcgaatttccttgatggcccattgcttgttcagcgaggaatccattgccagatagacggtggacataccacccttgccgatctgggcaaggatcttgtaccgcttgccgaccaatgtgtttaaccccaccataggtggccctccaacacttgtctcttctcttacgacttccgtgcacgtaccgagccacaaaccactgggagcggtacccacactcctaagttgccacgttacccccgtaaatcgacaagaacaatactgctgtctgaaaatgcgagatggcccggaaccacacgagttccgggccatcttatcgggggtgaggagggttactcctcgatgtcaggctgaccgccctgatcggagtagaaatcatccgggttgaagtcgtcgccgagcttcagatcgccgaactcgagattcgagaagttcaggtcggacaggtcggcgtcggagaaggtcgcgtcgccgagatcgccatcgccgcccagaccgaagttcgggtagatggtgtcgcggatggccttgtcgggctcgaccacggcgttgcggtagcgggcgaggcccgtaccggccgggatgagcttaccgatgatgacgttctccttgaggcccttgaggtcgtcgaccttctcggagagggcggcttcggtgagcacgcgggtggtctcctggaaggatgcggcggacagccaggagtcggtggccagcgacgccttggtgatgcccataagcgccggacgaccgacggccggacggccaccgttcttgacgatgttgcggttgatctcgcggaagcgggcattgtccaccagctcacccggcagcaggtcggtgtcgccggagtcgatgatggtcacgcggcgggtcatctggtgcacgatgacctcgatgtgcttgtcgtggatatccacaccctgggatcggtacacggtgtgcacttcctccacgatgttgacctgggcggcgcgcttgccgaggatggtgaggatcttcttggggtccacggaaccttcgaccagctgggtgccgaccttgatgtggtcgccgtcggcaaccttgagcggcacgcgcttggagacctggtaggtgatcggcttgatcacgccgtcttccttcggcgcgccggaatcggcgtccggggtcaggatgatctggcgaccgcgatcgttctccacgatcttgatgctgccggcgaactcggtgatcggggcctcacccttcggggtgcgggcctcgaaaagctcggtgacacggggaagaccctgggtgatatcggaggccgcggccacaccgccggagtggaaggaacgcagcgtcagctgggtgccaggctcaccgatggactgggcggcgacgataccgacggtctcgccgacatcgaccagcttgttggtggccagggaccagccatagcacttggcgcacacaccgcgcttggactcgcaggtcagcacggaacggcacttgacttcctcgacaccgtgggccacgaggtcgttgagcacgtccatggacagggcgtcgtcgcgcttgtacagcacggtctgtccgtcggccgggtcgatgacgtcggcggcgagcagacgggagtacgggccaccgtcggcggccttgacgagcaccaggttgccgtcgttgtcgcgctcggcgacgcggatgggcagaccggccttggtgccgcagtcctcttcgcgcacgatgacgtcctgggagacatcgaccagacgacgggtcaggtaaccggattctgcggtacgcagtgcggtatcggccagacccttacgtgcaccgtgctgggagatgaagtactccagcacggacaggccgtcgcggtagttggacttcacaggacgaggaatgatctcgcccttcgggttggccacgaggcctcgcatacctgcgatctggttgatctgcatcatgttgcctcgtgcaccggactgcacgatgatggccaggttggaggtcgggtcgaacttctcctcgacttccttggacacctcggcggtgcactcggtccacaggtcgatgagttcctgacggcgagcttcctcggtcagcagacccatctcgtagttggcgttgaccttgtcggccttggcctcgtactcggcgatcttctcgtcgcgctcgggcggctcgttcacgtcggagaacgcgaaggacacaccggaccacggtgcacgggtgaagccaagatccttcagggcatccagcgtggcggccacctgctgggtggagtaacgcatggcgatgtcgtcgacgatcttggacagacggcccttggccacctgctcgttgacgaacgggtagtcggtcggcagagtctcgttgaacaggatgcggccgtaggaggtggcgaacagcacggtgccgtcgtggaagcgctcttccttgacgacctcgtcctcaccttcgcgcgggtcgagcaccttgacctcgccgggctcccagttcttcggcagtacgaagctctcgggcaggcggatgagcaccttggcctgcatgtcgatctcgtggcggtcgagggccatttcggcctcttccagcgaggagaacacgcggccctggcccttggcgccttccagcacggtggacaggtagtacagaccgaggatcatgtcctgggacggcatggtcacggtgtgaccgtcagccggcttcaggatgttgtcggaagccatcatcagcgagcgggcctcggcctgggcttcggcggacaggggcaggtggactgccatctggtcaccatcgaagtcggcgttgaaggcggcgcaggccagcggcggcaggtggatggccttgccttccaccaggatcggctcgaatgcctgaatacccagacggtgcagcgtaggtgcacggttgagcagcacggggtgctcggagatgacctcctcgagcacgccccacacttcggcgtcgccgcggtccacgagacgcttggcggacttcatgttctgcgcgtagttcaggtccacgaggcgcttgatgacgaacggcttgaacagctcgagggccatcggcttcggcagaccgcactggtgcatgcgcagggacgggccgaccacgatcacggaacggccggagtagtcgactcgcttaccgaggaggttctggcggaaacgaccctgcttacccttgagcatgtcggacagggacttcagcggacggttggaggcaccggtgaccgggcgaccacgacggccgttgtcgaacagggagtcgacggcttcctggagcatgcgcttctcgttgttgagcatgatttcaggggcgccgagctcgatcagtcgcttcagacggttgttacggttgatcacacggcggtacaggtcgttgaggtcggaggtggcgaaacggccaccgtcgagctggaccatcgggcgcaggtccggcgggatgaccgggatcacgtcgagcaccatggcctccggcttgttgccggtggtcaggaaggcgttgacgaccttgaggcgcttcagagccttggtcttacgctgctcggaagcgtccttgatctcctcgcgcagttccttggagatggtctccaggtcgagggactgcaggcgcttcttgatggcttcggcgcccatgcagccgtcgaagtaatcgccgtagcggtcctgcatctcgcgccacaggtccacgtcgtcgaccatgtcgccgggcttgagcttcttgaacttgtcgaagacggcgtccacacgggcgatctggtcgttgtagcgggtgcggatggcggccatatcgcgctcggcaccgttacgcagcttggtgcgggccgggcccttggcctcgccggcctcctcaagggcggcgagatcctcttcgaccttcttggcgcgggcttcgatgtcggagtcacggcgctgctcaaggcgcttgatctcggaatcgaactcgtcctgcaggccgggcagatcgttgtggcgctcgtcctcgttcacctcggtgaccatgtaggaggcgaagtagatcacgcgctccagatccttcggggtgacgttcagcaggtagccgaggcgggaaggcacacctttgaagaaccagatgtgcgtcaccggggcggcgagctcgatgtggcccatgcgctcacggcgcacgcggctgcgggtcacttcgacgccgcatcgctcgcagacgatgcccttgaagcgcacgcgcttgtacttgccgcaggcgcactcccagtcacgggtcgggccgaagatctgttcgccgaacagaccgtccttctcaggcttcagcgtacggtagttgatggtttcaggcttcttgacctcaccgtggctccaaccacggatgtcatcggcggtggcaaggccgatgcgaatcttgtcaaatgcgttgacgtccagcacttgttaatccgtttctgttcttgagaccttcccaagctccccttgtcaggggagctgtcagccaaggctgactgaggggtagtgcaaaccggaaaggtctctgtacgttatctatttcacgttggcggagctacacgcggcgtattgaccgcatgcagcccgagggatcactggtattcgggctcttcggccttctggtcttccttggcggccgcgtcggggcgggcgccaatgttgaagccgaggtcgtcagcggagctggccggatcgtcatcctcatccttcatgtcgatggccacgccttcggcgttgagcacttcgacgttcagggacagggactgcatttccttcaggagcaccttgaacgactcagggatacctgccggcggcaggttatcgcccttgacgatggcaccgtagacgcgcacgcggccgtcgacgtcatcggacttggtggtcatcatctcgtgcagcgtgtaggcggcaccgtaggcctcaagggcccacacctccatctcgccgaagcgctggccaccgaactgggccttaccaccgagcggctgctgggtgatcatggagtacgggccggtggagcgggcgtgaatcttgtcgtcgaccaggtggtgcagcttcaacatgtacatgtagccaacggaaatcggcttggtgtacggctcaccggtacggccatcgaacagggtggccttgccgtcggggccgaccagacggtcgccgtcacggttcggcagcgtagtggacagcagacccttcaggacttcaggcttgacaccgtcgaacaccggggtggcgaccggggtgttcggctcggccttctcggcaccggacggaatcagcttcttccactcggcttccatgttcgggtcaagggagatatcccaaccggagtgggcgatccagccaaggtgcagttcgagcacctgaccgaggttcattcgggaaggcacacccagcgggttcaacatgatgtcgaccggagtaccgtcggcaaggaacggcatatcctcttccggcaggatgcgggagatgcagcccttgttgccgtggcggccggagagcttgtcgcccaccgtgatcttgcggtgctgggcgatgtagacgcgaatcatctggttgacgccgttgggcagctcgtcaccgtcctcctcggcatcctcgcgggtgatctccttgacgccgatgacggtaccggtctcgccgtgaggcacgcgcagggaggtgtcgcgcacctcgcgggacttctcgccgaagatggcgcgcagcaggcgctcctccggggtcagctcggtctcgcccttcggggtgaccttaccgaccaggatgtcgccggcctcgacctcggcgccgatgcggatgatgccgcgctcgtcgaggttggccacagcgtcctcgccgacgttcggcaggtcgcgggtgatctcttcggcgcccagcttggtttcgcgggcgtcgatctcgtactcctcgatgtggatggaggagagggtgtcgtcctgcacgaggcgctgggagatgatcacagcatcctcgtagttgtagccgttccacggcatgaaggcgatgagcaggttcttgcccagggccaggtcgcccttctggatggcaggaccatcggccagcaccgagccggcctccacacgctcgccatcatggatgatcgggcgctggttgtagcaggtggtctggttggagcgctggaacttggccagcttgtaggagctggtggtgccgtcgtcgttcatcacgcggatcaggtcggcggacacgtaggtgaccacaccgtccttctcggacttgatgacgtcgccggaatcgttggcggcgcgccattcggagccggtgcccaccagtgggcgctcggattcgatcagcggcactgcctgacgctgcatgttggtacccatcagcgcacggtggccctcatcatgctccaggaacggaatcagggaggcaccgagggagaccatctgacgcggggagacatccatgtaatccacggagctcaccggcacatcgaccgcctcttcctcgccgactcgggcaagggcggacttggagacgaagttgccgttctcgtcaagttcctggttggcctgggcgatgacgtggtcgagatcacggtcagcggtcatgtactcgacctcgtcggtcacgtggccgttgacgaccttgcggtacggggtctcgatgaagccgaacgggttgacgcggccgaaggtcgccagggagccgatcagaccgatgttcgggccttcaggagactcgatcgggcacatacggccgaagtgggacgggtgcacgtcgcgcacttccatggaggcgcggtcgcgggacagaccgccggggcccagtgcggaaagacgacgcttgttcgtcacaccggacagcgggttgttctgatccatgaactgggagagctgggaagtgccgaagaactccttgatggtggcgttcaccgggcggatgttgatcagggactgcggggtgatggcctcggcgtcctgagtggtcatacgctcgcgcaccacgcgctccatacggctcagaccggtacgcagctggttctggatcagctcgccgacttggcggatacgacggttgccgaagtgatcgatatcgtcgacgtccacgcgcaggtcaacgtcttcgccgttgcgcttgcccgggaaggtcgccgcaccgtcgtgcagggccaccagatacttgatcgtggcgatgatgtcttcctggtggagggaacggtcgttgaaatcggcctcgacacccagcttgcggttgatcttgtagcggccgacgcgggccagatcgtagcgcttggtgttgaagtagaaggagtccagcaggttcttgccggcctcgggggtcggggtgtcggccggacgaatcttgcggtagaggtcgacgagggcctcgtcctgggtctcgagggtttccttctccagggcgtcgagcaccagcgggtagtccttgaaggcctgggcgatctcggacttggtcatgccgatggccatgaggaacacgatggcggactgcttgcgcttgcggtccacgcgcacctgcggctggtccttcttgtcgatctcgaactcgagccatgcaccgcggctcgggatgatcttcgcgccgaagacttccttatcggaggtgcggtcctgctggcggtcgaagtagacgcccggggaacgcacgagctgggagacgatgactcgctcggtaccgccgatgatgaaggtgccgtgcggggtctgcagcgggaagtcgcccatgaacacggtctgggacttgatctcgccggtgtcgccgttctcgaattcggcgttcacgtacagcggagcggagtaggtgtaatccttctccttgcactcctgcacggtgtggcgcggctcctcgaagtacgggtccgagaaggtcagggacatggtctgtgcaaagttctcgatcggggagatctcgttgaagacctcgtcgaggccggaggtgtgggccacggtgttggtgccgttggcctcatcctcctcgacgcgcttcttccagcggtcggagccgatcagccaatcgaagctgtcggtctgcacgcccagcaggtagggcacatcgatgggttccttgatggaaccgaagttcacgcgatccgatgccttgtgcagatcaatgtcatgctggtcggcgcgtgcgatgatggtggtggtgttcgtcgtagactcagtagccaatggacgttccttatcgctcgctaatatgtggtaattcccctgggagcgccggcatggccaccatatgcctatgcggacgcttcattgtcgacggcatgcccgcaatatgacacacctcatgcaaagtcaaaagaatactgatatgcgaggacatttttagctcccgctgacgagggagctgtcgagcggagcgagactgagggagagacccagtgtccaaacaccaaccgcaggtcctaccccaccgtaaacgtcaccggatcgctcttcaccttcggatgatccttcaaactcagctgcgccacgtacgttcccgcattgaccttggcccaatccgactcatccgtgcattcggtgagcgtggcgttcgcatcggtattccacgtgaccttctgaacgtccttatcacccttggacatcagcagcagacgtgaatccgccggacacacatcggacttgtaaatcgtttcctgaccggaagtaatggtgagcacacggccggaatcggccccgtccaccaaacagttgcctgacccctcgtgcacgatggtcgcggtgaaatcaagcgatcctcctaccggcacggattgggaggccgcggaaagctgcaatgtcacatcactggccgagcaatccttgacgttgctgactttcttcggagccggcgtggcgtcgcgggaaatcgcatacacctcgtcatggtgaatcatcgtgttcacggcaccgataccccggccaaggctgtacacgcagaatacaatcagcgcgattatcagcagcaacaccgtgccggccacgatacgccgacgacgatagatggcctgctgctttttgctgatcctgcgcttgcgcggcttgccggaacggtcgtttcgggcgggcccgccggatggcccattggccccggtgccggctccgcgtgccgttctcgcgcctgatgtgttcctctgcactgccataacccttccagtctacggtcaccacacccatacacgcttggggagcccgccattttcacaatgtcagctgggtaatcgcaggccgccgtccagaatctcgatcaggccgtcatcgtcaaggctggcgatgcaggcggcaagctgaatctggtccttccaaagcttgtcggcatcttccctgggcaacgtgactccagcgggaagctcgcgcagcgcggcgagcaccagaccgcgcacctgtcgatccgtgccttggaatcgttggcgtgggcgggtgcgacgctcccccagtccggggcggccggccttgaggaacgcgcaatcgtcggcaatcgggcaggtgtcgcataacggcgatttggccgtgcagatcaccgcccccagttccattaccgactggttccatgtgaccgatgggcgttcgccacgatgcagtcgggagcgtttgccgccacggatagtgctgttcacggtatgttcggcgctaccggcattatcggcgacgtcagcatcgcgcccgagaatctcgtctttgggcagcatgcggttcgccagcgcgcgttcggccgggctggccgctcccccgcgcgattcgacgccaaggaacacacggctcagcacgcggcggatgttggtatcgatcacggcgattcgttcgccgaacgcaaagctcagcaccgcggaggcggtgtaatcgccgatgccgggcaatgcagtgagttcgtcatacgtacgcggcagtttgtcggcgtactgctcggccaccacgcgggcgcattcctgcaatcgcagcgcacggcgaggatagccaagccggccccatgcggtgatcacatcggctttaggtgctgcggcaagagcacgggcgtcaggccagcgtgccatccaatcgttccaatacggcaccacacggctcatctgcgtctgctggctcatgacttcggataccagcacgccccacggcgtggcccgtccgaagcgccatggcaagtcacgcgcattggcctcccaccatgctcccaatcgcaaagaaattgctgtgtcgttcatcgttcttattcttagcagctatgacgaacgagacaaaacacaacccccagagcacaccgaatccagcaaatcccgaaaccaaagtcgagaaaatgttcgaatacggctatcgcaagtcgaattacgggccggacgagctggtgaccgacgcacacggcaaccccatctccgtggtggacgcgatgctttccgccgagaaggccgccgccaccgaaaccgtgacgccgcacctgtgctattactcgccgcgtattcccggcaacaccggttcggccatccgcctgtgcgcagtgaccggcacgattctgcatctggtggagccgctgggcttcaacctgcgcgacaccaagctgcgccgtgcgggcctcgactaccatgacatggcccacgtggtgttgcacccgaatttcgacaacctggtggagtcgatgcccaattcgcgcatcatcgcgttcaccgcgcacgccaccaagctctacaccgaggtggaatacaagccgactgacatcctgctgttcggccccgagcccggcgacatccccgacccgatggacatcatggagggccctcatgtggccgaacaagtgcggctgcccatgcgcccgtccctgcgttccctaaacctcaccaactgcgcatccatcgccatctacgaagcctggcgccagctcaattttgcgggcggagcgtgaggagaaggcccggtgggccttcgagtaacgacgccgaacgaacgccgacaggcgcgagagcggaaacactgagcttcgcgcagtgatgaacgctgaatataaggccacctgcgtttcgaggggcggatttggcatccgccggaggtctactgccgcttcaaggggctgtcaaaggacgagaccccgagtatggccgttgaaatatcaatgcttgtactcggggtcttcatatataccagcccctcgaaacggaagtagacctccagaaaggtcggaatcagcccctcgaaacgggaatagacctccagaaaggtaattcgagctggtatctgccttcaaagaggtacattcgagcgtttgcagaatgctatctgccttcaaagaggtaccgcaatcgagaaaccccgggtatgagtgttgatattccaacgctcatacccggggtttccgcatataggtacctctttgaaagcagatagctctccgcgaggggccaaatgtacctctctgaaagcagataccctaccgaatcaattcttgaagctgtgaatcggcgcagggattcggccgccacgggtcacgaaggcctcgcagctggtctggttcaccggaatgatcggcgcatagcccatcaggccgccgaagttggccatctcccctacgcctttgccttccaccggaatcacgcgcacggcggtggtcttctggttgaccatgccgatcgcggcctcgtcggcgatgatgccggaaatggtggctgcggtggtgtctcccggaatggcaatcatgtcgaggccgacggagcacacgcaggtcatggcctcaagcttttcgatcttcaggcagccattggttgccgcgtcgatcatgttcttgtcttcggagaccgggatgaacgcgccggacaagccgcccacgtaggaggacgccatgatgccgcccttcttgacctggtcgttgagcatggcgagcgccgcggtagtgcccggtgcgccgacctgctcgaggccgatcttctccagcacttcacccacggagtcgcccacggccggggtcggggcgagcgacaggtcgatgatgccgaacgggatgccgaggcggcgggaagcctcctgagccacaagctgacccacgcgcgtgatcttgaacgcggtgcgcttgatggtctcgcacaggaactcgaaatccttgcccttggcctcgtccaatgcacgggagaccacacccgggccggaaacgccgacattaatcaccgcgtcgccttcggtcacgccatggaagccgcctgccatgaacgggttgtcgtcaggcacgttgcagaaggccacgaacttgacgcagccgtaggagtcgttgtcggcggtgcgctcggcaacgtccttgatgatgtggccgagcagttcgaccgcgttcatgtcgatgccggtcttggtggaaccgacgttcacggacgagcagacgatgtcggtctcggaaagggcttgcggcagggagcggatgagcaactcctcggccggggtcatggacttggagacgagtgcggagtagccgccgatcaggtcgacgccgacctccttggccgccttgtcaagcgcgtgggcgatcttgacgaagtcctcgctcgtcttgcaggagctggcaccgaccagcgagatcggggtgacggtgatgcgcttgttgacgatcgggatgccgtagtcgcgttcgatggccttgccggtggaaacgaggtccttggcataggtagtgatcttgcggtagatgttgtcgcaggtcttgtcgacgtcgtccgaggcgcagtcgagcaacgagatgcccatggtgatggtgcggacgtcgagcttctcctgctcgatcatctgattggtctcgtggacctccatgatgttcagcatggtttgttccttacaggatatttaaagactagtttggcggtcaccctcatcagagggataaggatggctccgtcagcggaaagcccaccgggctttccgcctcctcgcgtgcggcggcctgctgagcgggccgcctcaaatacggtgcatcttggtgaagatttcctcacgctggcagcggatgcgcacgccgatgtcgtcgccgaggtcctcaaggttgccgaccatcgcgccgaagtccttgtccgcgttggcgtagtcgacaatcatcatcatgttgaagtaaccgtcgatgatggtctgggaaatgtcaagcacgttgacctgatgttcggaaaggtatgtgcagacgcgtgcgatgatgccgacagtatcctgaccgacgacggtgatgattgccttgttcatggaactccctaaacgtgaggtgtgaatatccagttaccgtcttggcgaattgccggacgtgccctcaagtatagggaaggcacgtgccaaaacacgtgcctttcgtctgttttgccttacatactgagatgactgccggttaccacctaccgctgcagcaactgtatgtcaccgccagatgccgtcaagcacacgcacatccacgcaatcgaccttgccgtcagcaacaaaacggaactcgccatcgccgtccgcaccttggaacagcatactgccggccgcttcgccgttgttaaggaagacttccaccacattacggtcgaagaagatttcgacgcgacgcacatcggcgatgccgctatcgaaatcgatgtcgtccacgactgttcccttcgtgaccagtcgggtcacgccgtcgcgacgctgcagctgcaattccatcgaattaccattggcggaattggtaccagtcgcgatgagcattgtgaaatcgtcatcgtcagccagatgcatgtccgtgtaatacgcgttgttcggcacaataaagaaggtcccgttttcgtctgcatgcgcttccaaacgatcgcctagcagctgctcgtacacttccttgacaggacggctggtcaagcggccgtcacgcacgtgcagttcacgtggcagcgacatcatgccgttagcgatgcacggcttttccacacgcatcgcgggaaagtcggtataccagccgaacacgatacgacgcccgtcgtcggcagcaaagctttgtgtcgcgtagtagccggtaccgaaatcgcaccaatcgctgttccctacctgcaaacgtgggccatcggcggtgtccttgagatcaccaacataccaacgcacctgctggaaacgaccttgcttgtcacggtagtgcatcaaagctccgatggcgaccgtcttgccgtcgagctggaacaggtcaggacattcgtaggtacgtgacagctggtggccgaagtcggcgagcaccggtccttcatactgccacgtcacgttgcgcttgagcggtttcttcgcggagaagagcgccatggcaggcaccgtatccatattgggcttgtcggtgccgggcatgccttgcggaccgcacgtaaaccagccgtctgtaccctgtacgctgatgccaggcgccgcggaggacacagcatcagtatcgaattcggcgaccggcagattcgtggcggtcaccatgtaagcgcgttccggatcgatcgcctcgccgcccatgccggtttccaccttcggatcacggaaatcgaagccaaaaccatcgttaacgcgcaacgcgaccggagattcgacactcacatgcacgccatcctcacacaagcaggtggtctggtattcagtaacagacgattcgtctccgcgagtctccaggtgccgggttagatacaggcgaatagcggccgcatcatcacccttgcagggattgtcacacgcatccaccgtcaccgcggatccggagaacgcgccgccaacgatgcgttcgtcgatatgcagctccggctgcggttcgaggaagattggcagatgcgtccaatgcaccagatcgcggctcactgcatggccccagtgcatattgtcccagccaaaaccatacggattgaattggtagaacagatggtagcgtccttggaaacgacacaggccgttaggatcattcatccagcgagcgaatggctcgaaatgcgccgcagggcgagcgaaacgatcatagatctgatccagcgtcggctgcgtatcccattcattgtcatatggattcatgctgatgaaacgcacgccttcatcaagaagattctcacactcggacaagtaggcgaaccgcacggtcagttggcgcgctctcaccgtgagacacacgtttgtcggcaccggaatcaagaaacggtggcgacgctcggccaccggcatggcatggctggcgatttgatggccgtccccgtctgtaatggtgacggcagcgtcatcgccgcatctttcggcgaacaattccagcaagcggtagccgccggtttcgatggcaacggaatagttgtcaggcataataatttcctccacagcgccacatgatcagatatcatgtggctacgcattgaaaaacagataattagaaaaacaaatacggaaaaaggaaacgtccgtcacgacacgatggaatcgcgttcgatgatgcggcagcgcaatgctgttttgctgccatcacgttgcctctgcaccgccatgccacgatcggactcaagatcggctacggccttgtcgccgtcaagtatggtgacaagttgccgaaccgcttcaaaacccatctcataatggggtagttccagcgtagtcagtgatggtttgatcacattagtgatgaacggctggttatcgatgctgatcaccgacacgtcagcgccgatgcgcactccgcgttcgcgtgcggcttcgtagatgaaagtggcgcgcacatcgttgaaacaaaagatgccgtccggcttgatttcgtcgaacacccgcgccgcttcatcgtccgcgttagtaaattccgatacttcgacgaccaaagcgtcatcgaatggaatgcccgcttccgcaagcgcacgtcggtaaccagtcagacgttgctcttgcgcgacgatggatgttgcggaaccgtagtagacgatgcgtctgcatccagcttggatcagacggttggtggcgtcataccccgccagttcatcatcggggtagaccgagggaactcgccccgctgcatcctcactgtccaccaccacggtcgggctgccttccaagacttcgggaatgtccactttgcggtggaacatcatggcgtataggaagccatccacgttatatcggagcagggcggatatttcttggttctcgagttcggcgtcattattggtgttcgtggtaagcagtatgtatccgagcttgctcgcggcatcctgcgcaccttcgagtaccttgctcgcatacggagtcgtggctatctcatcggtgacgaatcccagagtattggatttgctggtgcgtaaggtgcgcgccacggaattaggcttgtaccccatgttctcggcagtcgcacggattttctgcgcaaccgccttgctgacgcgattgtgatccttgttgttc

SEQ ID NO: 2579 - DNA, 64038 bp, Unknown
  R222_15m  MAG No. k141_1244
cagcggagcaatgtggcgctttccagcggggaatacagcacagtgagcgagtcagctgcgccgcagtttgggcaagtgccgtgcagcaggccggtgtttggctgaactgcaatagctgcgcagatggcggcgaacatagggaatcggcctagggccaatggttccaagtatggttcgggcatctcgtactgctgtctgatttccgcagagttttccgtgtgtgcaggtgtaatcgtcgttgtctcatttctgctgagaagcggagcgttcgtgacattcgcatgccgtatggccgccaaatcggcggcagtgagccggctatcgcagctgtaactgttgtagccgctgtaatcggcatggccttgaggtccgctttgttgatcgaacaggtcgatgattttcaatccaagtgcaccggcaatggaagcggcatcgcagtgttccgctccgaagcagtgcagcatggttttgccgttggactggtcgtaggtgatgtgcagcgaagtgccgccgtctccgtcatgggcggggcagctgcactgagcgtgttgtcttccggaggtgtcgcgcggaagctcttggagcctaggatctcgagaatagcgtctcgcggcttcgagcactcgctcgtatgaggttgccatgctcactcctcacctgcgaattcgcgcacgctggtgagaatcaccagaaacgtgttgcctaccttgcgagcgcgtatctttccggttctgatcaatccgtaaacgcttttcacgtccttgtagcccagcatctccgccacttgcgctggcctggcggtgaggcgcgggtagtcatttttcgttggaattgcagccatatgtttccatgctctcgtgcggaacagagcctgaggagcgaagtgcttccgtcgaattcggacgcacttcgccctagatggttctgttgtggttgttggctgcaccggtgcatgttccccaggtttttgccggcccctgggaagctggaattcagaatatgacgttattccaaggagcgcaaaggttgaaaacggctgaagcttgaactagatgtgtggtcgtgaaatcgttggaatttcaacgaaaacaagtgattctgcggtgaaataaggcgttcagaataagacgaataggctttgttggttgcaatgagattggcttatggcatgttgtctttgatgagcccgtttgtcttggttgagtccagtggccttggagtttgttggcttctggcagaaattggttgaatttgttaagtggatttctccgtatccgcgcttgtgatctcaagcattccttcatactcgtcgaggttggttacgcgggtgtccttcagcagttcccgcagggacgggatacccgtctgcggggttcgtgcctccgtgtttttgatggcccgcagcttgcggaagaatgattcgacgatgctgatgtattccttggccgtccgtatgcgcgacaccgttttgccggcggcccacgccgccgccgtcaattcgttccggatgtcgtgcgcctccttcttggtgggcggcccgatgatgcgcgacctgtccggggccttttccgggtcggttagggaatcgtatatcttggcgagtgttttcctgcctttgcggcggatgggttctgggcgcatgccttctccttggcggtcatggcggtgccggtgccgttcgctggcgaatacccgggggaggttgccggcggtagggtctgccggtttctcctcgggcccatccgaccgacgaacgttcctcggcttcctgtctatgcatcaaggagttgatcgacggttcgaatggaccttcatggcacccgtatgcgttcgtgtggcgttcatcggagggggtcagggggaaccttcgcgctgggccgaccggtattcgctgcgatgcgcttgcgatacggaggctgggattgttgcgaaccaaaacgaaaaaactgcgcggagaacatgaagggactcgaatcggcccactgacgggacacatgggacgcggtcgggcttcgatgacgaacacgcggcgggcgggggccagaaggcgttttcggaatcgtcggttccgatatgtgacacgcgcggcgggtcggggccaaaggtgtccaaacggagggtacctggagggaaccgacaatcggaagtaaccaaagcaaaaccccggaaaccgaatgatttcaacggtttccagggctccaatccgggcggaggatacgagattcgaactcgtgaggctgttacaccaacacgctttccaagcgtgcgccatagaccactaggcgaatcctccatgctttgcagcgcgcagttgaactgtgttccgcaggcaactcgaataagttaccacaggtttcggataagtgcacgcttcggcgtggcgcgtgtcgcgacgcggatgtgaagaatgatcactgcgagtgaaagactcactggaaagtcccgcgcaacacccgcacaaggaccgcatgcttgtgcagggcccacacacccgcgcgcacctacacaaccgttgtagatgactttgttttagcttgtcgctagagcgaagtcatctgcatggcctcgttgccaaggccagctccaagcctcacgcgactctcgccgccgcttggttcgcgtttcgccggatgccgcattgtcccgcctttggggtgggcctgtcttacgcttcctccacgcgcgtttaacgtctccggggcactcccggcgacttggatgttgatggccgcgttcacatcacggtcgatgacaagcccgcactcctcgcaatggtagacgcgctcggacaggggcagtttggctttcaccgtcccgcagttcgagcaggtcttcgagcttggataccaccggtcgatgacgtgcagtctcgcgccggcgcgtgcggtcttgtattccagttggcggcggaactcgcggaagtccgcgtccagtacgtgcttggcaagcctcctgttatggctcatgccctgcacgttgaggtcttcgatgctgatgtccgtgtaattgtcggcgagccacgtggtgagcttgccgatgctgtcggctcgttgggcggctatgcgagcgtggattcggcgcacgcgctccaacgccctgttgcaccgtttcgacccgtatccgtggttcgcgcccctgtcgcggcggctcaacgcctgttgggcgtggcggagtttccgctgcgtgcggacgtagttgcgtggattggggaacgtggtgccatccgacagggtggcgagggtcctgacgcccaaatccacgccgacctgacgatcatggttcttccgtttcctgtttttcacgggaacgctttcggcgggacgttcgacggtgagggccgcataccagaagcccgcatggcgactgacggtcatgcgcacgattcgtctgccgtggacgcgttcggcggcgttctccatgcagtgcatgcgtccgatgcgcggcagtctcaacgccttcgggtcgtcctcgataaggccgaagctgccggtcgtgtatgcgaaacgcgggacactggagcgtttcgacttgtatttcggccagcccaccctgcggcccgcgcgcctgcccttcctgctgtccgaccagttcctcaacgcctgggacagccattcgaacgcgctgctgtacgcctccttgctgttctcccgccaccacggggcgatttcgtccttccactcgttccaccagcggcgcatcgcgtacaacgtccagtccggtttctcacccaaggagatttggcgctggacgtgcgcgagcatcagattgtacgcgaaacgcgcgccacccgcatgggactccaacatccgtgtctgccgtggggtcgggtcgagacggattctgacggcctcatacgcgctcatcgcgcatcgcctccaacgccttctccgcacggtgttcggccccgcggcgtccgtacagccgggcgcagaacgaggtcagcacctcggtcacgtcgcgcaccagatcgtcgtcgagttccgtgtcgtccacgacgacgacgcgtctgccctgcgccttcaacgcgttctccaccagtcccatgttcatgcgggcgagccggtcgcgatgctccacgattatcgtgccgacggtcgggtcggcgagcagccggttgagcttcctccggttctcgttcacgccggagccggtctccgtgacgatttcgggatgttcgatgcccatgccaacggcgaacgccttcaaccggtcggcctgacgttgcaaatcgcccttccgcccaccgctggacactcgcgcgtagcagacggtacgagagcccgcgggactcggctgcgatgcggtctcgtatttcgggtcgtggatgagccacatgccggtcggcgtctgctccacaggaacgggcatggtgccctgacggcaccacttccacacggtctgcggatgcaatccttccagtctggcccattcctttaccaacatgagatttattatagtataagattacttaagaaaacaaaacagttcagtaacagacaacaacccccggtaaagaaatcaccgtatccgggtgaattttcgatgttcgcccggcgcgcgcccgcaatcgcgcctaggctgttgagtcatgaacgaggggacagcggccgacgtaaccgcagcacatggcggccggtcgcgccaatcgaagaaacactcaaagacgtaccgcagcatatccgcgatccttagttggctcacggcccgccgcccgaccacgttatccacatcgctgcgcgcgcgattcctcccttacctgctcacgctcgctatcgcctggctgccgtggctcatactcacttggccgggctcgatgcgcgacgatacgcttgcccaatatctgcaatcgtccggtctgcaccactactacacccagcatccgctgtttgatacgctcacgttcggcctgttctggcatatcggcagcgcactcggctcccctctgatcgggcaggccctgtacaccgtaacccaagcggttctactcgccgccgggtgcgcgcttctgctgtgctacatccgcaaaatcggctcgccgcgctggctcatcggtctcggccttgtctatcttgccaccaactatgtggtggtcggcgcaatcaccacgatgggcaaggactcgttgcatgccgtgttctatctgccgttggccgtgctgttcgtggaggcttgtctgacgcgcggctcggtactggctcgccgcccggtggcattcgcgttcgtcatcctgctgttcgccaccatcgtctccaagcggacggcgctcataatcgtgctatgcgccggctgctgtttgctcgccgtctgcacgcccaaaggcgcgcggcgtcgtgcgttcgcgtgtcttgcggttgccatcgttgtggcgcagggcgtgtggacgccattaagcgcggccgccacgcatgcgaatcgatcgcccggacgtgaggtgtggggcctggtcacccagccagtggcccggctcgcgcacgatgatcccagcgcgatagacaagattcagcggcagcggctgaacgcgatcatggatctcgactgggccgccgtcggcatcaacccgcaccgcaccgatgagaccttccgcactctgcgcgagcaccctaggccaaccgcggcgcaacaactcgcggccctgcaggtctgggcgcagctcggcctcgcgcatccggttgaatatgccacggcctatgccggggtgactcgcggatggtgggacccgcgcgtcaatttcgcgtaccccactgattccgactacctgttcacgcctagctatctcaggcaatgggcgtctttcctgtctgaaggtgcttggaagcatacttccgacggcgatgccgataccgtggcggccgaacgacttgccgccatcgaacatgaccttgcaccgctgaggggtacctccgataagccgcaatggcagaaaaacatattgcgggcgattcatcggtgggtgcgttcggatggtcatgtcggtgttcgcaaaggcaatccgctgacttcgatggccctgtacgtcacgtggattccgctggctgctggtcttgcgctggcggtgcggcctgcgcgacgacgctacggccccgcactggccgcttacggcttgctggcattcacggtgctgtcgctgtatgcctcacccgtggcactattttggtatccgattccggtattcctcacgttgccgctttttgtggtgttgccgttcacattccgggaaagccatcctctctgagcatagttatctcagatagtgaaataattgcggggttgaaaagcactaaaacgccttctattacctcgcacccgtcaaaaaatcaagactgttgttcaagaatttttttctatagagttcatagttgtttttggaccattcgagtacttgaagtgagaggaattcagcatggttcgtcgcgcctgcgcgcagtccgctgaaatgaacacgatgcgggaacgtgatacgcgcgttgccgtttctcgcgtgcgcgcgaagtcgggcagcaccggtcgtctgcagtcggccacggtctcggctcgtgcatttgcggtcatcgtttttctgtttgcgatgatcgccgcgaccttcctcccctccgccatcattccgcagtccgcgttcgccgtgacgccggcaaccactgccactgctgccaccgtcaagagcgacgacaccaccagcgtcgattacgcgacctgggccgacgttgccaaggccgtcgaagcgcagttgcaggaaggccttaaggaatacaaggacggcaacccaatgggtgccaagtccgatttcggggctgcatacaccaccgtctacgtgacgtccaacttcaacaaagtggtgagcgacaccatcggcgcagacaagcagaccgcgcagcagcaggccttccaggacctacaaagccaggtgttcacgtcagaccaggccgatcagcttacccagaaggtcaacgacctgaccgccgacctcgacgccacggcccagcagctcgacgccaacaccagcctcgccaacccgaagcagtactccgaagacctccagaagcagatcgccaaggagcgcaaggagctcgacgccaagaagaagcgcaccgaggaaacggccaagacttggaaggaagtcgcggatgcgatgcttccgatcctggacaacgcctacaaggcctatgagggtggcgacgccgccaagggcgccacgctcgtgaacgacgcctactaccagcactacgagaagctcggcttcgagaagaccgtgctgagcgccatcagcggcaaccgcgtctcccaggtggaataccagttcaagctgtgccgctcctcgatgaacaccggcaagcctgcttccgaagtcaagaagtacatcgacgacctgaagaacatgctggccaccgatgccgccaagctcgacggcggcgcggccgatgaggagggtggcttcctcaagttcatcaccagctcggtcggccaggcgttcctgattctgatccgcgagggtctcgaggccctgctcgtggtcgccgctgtggtggcctacctcgtcaagtccggcaacaagcgcttcaccaagtggatctacgtgggcgtgctcgccggtctggccggcgcaggcatcgtggcggtcatcttcatgctcgcgttcggcggctccggcccgctgcaggagatcatggaaggcgtgtgcgcgctcgtcgccatgtgcatgctgctgtggaccagcaactggatgctcaacaagtcctcggtggaagcgtggaaccgctacatcagggaaaagaccgaagccgcggtggcctctgtctcctcgcaggtcgaatccggcgagaaggtggcttcccgcacggtgatttcgctcgccatgctgagcttcctcgccgtgttccgtgagggcgccgaaaccgtgatcttctaccagtccatctacacgatgagccaggatacgcatggcatggtggtcggcgcactcgccgccgccgtggtgctcgtgatcatcttcctggtgattcgcttcacctccgtaaagattccgattggcccgttcttcctggtcacctcgatcctcatgtccgtgctggtggttgtcttcgccggcggcggcgtgcacgcgctcatcgagggcgacctgctgcccgccaactacctgccgggcgttcccaccaacgactggctcggattctacccgtacgccgaatgcatcatcgcccaggtactggcagccatcgccgtcatcgcgctgttcgtggttggctttgccaaacagcgtaaggccaaggcccggcttgcggccggtgcgagcaagtcggacgcgaaggctgacgaggagagcgcgcaggcgtagcacaacgcccggtgcgaccatctcgcgcaacacaacttgcgacatggcaatggaagcgattccagcccacgccgccacaactaaaaacagataagtcgtgaataatccattcaccacaacagaaggaataagagaaatgatgaagaacaagaagcttgccgctctgctcggcgtgctgctcgccggctccatggctgtttcgatggctgcttgcggttccaccaacaacgcttccgataccaagtcctcgaccagctcctccgacaccgccaagaaagacgactccaagaaggccgacgccccgactgagacctccggcttcgaagaggtcccggtcggcccctccggcaccgccaaggagcaggacaaggccgctggcccgctgaccgtgggtgccgtctacttccagcccatcgacatgtaccctgcttccatgggtctgaaggctgctgacgcttccttccacctggaagccgacatccacgcctcccaggaaggcaccgactacggctacggcaagggcgacttcgtccctgaccttactgtgaactacaccatcatcgacaagtccaccggcaaggaagtcgagggcggccaggccacctccggtaccttcatgcagatgaacgcctccgacggcccgcactacggcgccaacgtcaagctcgacaaggccggcacctaccaactcaagctctccatcgagtcccctgagaagaacggctggatgctccatgttgacccggagaccggtgtcaagaaccacaagttctggaccgagcccatcgaggtcaccttcgacaactgggactacaccccgcgtcagtggtgattgactaagcagacagccccctcgtcagagggggctttacgccgctttagggagataattcttaggacggtctaaaaactcccctcagtccgctttgcggacagctcccctcagggaggggagcctaagatgaacagagaaaggacgcgaatgcttgaacaattcgtggcagtgatgccgggcaccttggcccccgcattgctggtgatgagcctgagcgtgatgctcacggtcggcgaggggcgagataagccgataagctcgcattggcgtctcatcggcctgatcgccggcctgatcgccgctatcacattcgccggcctgcgcgcctcggccgtgatcaaccagcgcacgttcgtcaactatccggtgctgtggtgcgcgatcattgccgacatcctcaccatcgtcgtggtggtgttcgcacgccgcatcaccaccaattggcagcagcacaaggtgttcatgcacattgcgaacgccgtggccgccatcgacatcgcgctcaccctgttctacgcgctgccggacgtgatcctgcagctgaccatctgggtggagcccggcgacccgatcttcacgtccgacatgttgctgcgcgcgctcggcttcgcgctgggcctggccatgtcgatcatcgtggccgtgatcttccgcacgatgcgttcgaccgcggtgcgtgcctcgttcaccgccgccgttctcgcggtgctggtgattctgttcgtcaggcacctgaccggtgtcatgcagatcctgcaggcacgcggtttcccgataggccacacgggattcgtggccctcgcctggtcgatcaaccacaacgactggatgatcatggcccaggcgttcgtgttcctgattccggccgtcgcctccgtggtggccggcttccgcatgccgctgaccggcgcgaacgaagccatcggccgcaagcacaaggcgttccgccgccgcgccgtggcctccgccgtctggagcctcgtggccatgatcggcgtcacgctgaccctcaccgtcggcgtcgccgcgacccatcagaccatcactctttcgccgccggaagcctactcgctcaaggacggcgtggccaccattcccttcagccaggtcgaggacggccacctgcaccgtttcgaatacaaggccaaggacggcaccgtcatgcgcttcatcatcatccgaaagaacggtggcgcgtacggcatcggcctggacgcctgcgagaactgcggcgacgccggctactacgagaaggacggcaagatcatctgcaagaagtgcgaggtggccatcaacctggcgaccatcggcttcaagggtggctgcaacccgataccattcccgtacaagaccggccacggcaagatcaccattcagactacggatctggacgcgctgagcgcccacttccagtgagtcaggcaggagacaagaatcatgttctttctgcgtatgattactcgctcgttcacccgacagctgcgccggcgcctgcttatcgcgctgaccgtatgcctgtcggcgaccgtgtccgtatcgatgctgggcgtcgtgttcgacgtgggcgacaagctcaacgccgagctgtccacctacggttcgaacatcaccgtgcagcccaaggcggacgcggtcgtttccgacctgtacaacaccgagtcgggcggcgcggcgtccaccagcgacccgaccgcttttctgaaggagtcggacgcggccaagatcaagacgatcttctggtcgttcaacatcaccaacttcgcgccgcagctcaacatccatgccacggtgaacggtgccaacgtgccggtcgtcggcacgtggttcaacaaggacctcaagatctccaccggcgagaccaccgtcgtgggcgtggaaggcatgcgctcgtggtggcagctggacggcaagtggcccaaggacgattccgaccagggcgtgatcggcaagacgctggcctccgaactcggtgtgaccaccggcgacaccatcaccctcaacaagaccaccgcctcgggcaagaagaacgagcagaaaatcaagctcaccggcgtctacgattccggcgacgaggacaacggctcgctctacatcgcctcctccacggcccaggtgctcgccgacctgcccgattcggtcgacaagatcgaggtcaaggccctgaccacgccggagaacgacctggcccgtaaggccgccgcgaacccggccgcgctgagccaggaggaatgggagacctggtactgcaccgcctacccgagctcgatcgcctaccagatcgaagaggtgattccgggcgcggtggccaagcaggtgcgtcaggtcgccgcgttgcagggcaatgtgctgcagaagacgcaggccgtgatgattctgatgaccgtgctgagcctgatcgccgcagccgtggccgtggccaacctgatggtcgcctcgatcggcgaacggtctggcgagctggcgctgctcaaggcgctcggtgccaccgatgccgcggtatcccgcctgatgctggccgaaacggcggcaatctcgctgctgggcgcgattgtgggcgcgttgcttggttccggcgtggcccagctgataggccgggtggtattcggttccggcatcacgatgcggccgatggtgttcgtgctggtgttcgtgctgctggctgtcaccgtgctgctggcgtccgcctcctcgattcgttcgattctgaatctcaagcccgcggaggtgctccatggccgctgagtttatctacgtaggtgtggaaggaggaaaccgatgaccaacaccggtatgttcttcagaatgctgttcagcgccgtgttccgccggcgttcgcgcgcggtgatggccgtggtggcgtcgctggtcggtgcggccacactgttctgcctggcgatgatctgcctcgccgtgccgcagcagatgaacgaggagatgcgcgcgtacggcgcgaacctgattgtcacgcccaccgaatcgaccaatgccgacggcaaggccggcatcgacaaggcgatggtgcagcacaccactgaaatggtcaaggccaagggttccgcgaaatacgccacttaccgctacgagaacgtgcgcgtcaacgcctcgccgtacgtgatggccggcgtgaatgcggcgcaggtcaagaacctcaaccatcactgggtggtcgacggctcgtggccgaccgacggcaaggtgctggtcggacgtgacatcgccgacgccatcggtctgagaatcggctccgccatcaccatcggctaccgtgcatccgataacgccagcaccaacggcacttcgtcgaactcctcgatcgaccagcaaaccaaagacggccgtgtctccagtgacatcatggacacctccggcaccgaattccgcgtggccggcatcgtggacaccggtggcagcgaagactcgatcatctacgccaccaacgccgacgtcaacaagctcaccggcatcacgcgcggcgtggacgtcatcgagtattcggccggctccagcgacctcgcaggcctggtgtccagcatcaacgacatgacctccatgcacgtcaaggcgcagcaggtcaccaagatcaccgcctccgacacccgcatcatcaccatgctgcagacgctgttctggatcgtctcgttggtggtgctggtgctgacgctcgtcggcgtcggcaccacaatcagctcgatcgtctcgcagcgacgcaacgagatcggcctgcgcaaggccctcggtgccagctcgcgtgccatcggcaccgagttctacatcgaatcatcgctctacggcctgatcggcggcctcatcggcaccgcaatcggctacggactcgccagttggctgtgcgtggcggtgttcgaacgctccatcggattcaactggtggctggcgctgatctccgtgctgttcagcgcgctggtcgccatcgtcgcctccatcccgcccgtccaccgcgccacccgcatcgaccccgccgtcgtgcttcgcgaagaataaagaaagagaaacgtcatgctacttgaactcgaccacatctcgaagatctacggcgacctgcatgccgtggacgacctcaatttgaccgtgccggaaggcgaatggctcgccatcgtcggctcctccggctcaggcaagaccacgctgatgaacatgatcggctgcatggacacgccctccaagggctccgtgaagctggaaggccgcaagctggaggacctgaacgccacgcagctggccgacgtgcgcaagaacctcatcggactggtgttccagaagttctatctggtgccgcacctgaccgccgtggaaaacgtgatggtggcccagtactaccattcggtggtcgatgagaagcaggccatggaggcgctggaaaaggtcggcctgaaggaccgcgcccaccacctgcccggccagctctccggcggcgagcagcagcgcgtgtgcgtggcccgcgcgctgatcaacgacccgaagctgattctggccgatgagcccaccggcaacctcgacgagaagaacgagaaaatcgtgctcgacctgttccgcaagctgcacgagcagggcaccacgattatcgtggtcacccacgatgcgcttgtcgccagctgcgcgcagcgcgagatcatgctcaaccatggcgtgctcgtcggtgagaagtggaatgacgaggatgcgcgcaaggcctacgaggcggccggcggcaagcccgcctccacgggtgcacaggtcgagggcgcgcagaacggcgagaccgccattggtttcgctgaccccaccaaggccgcgaaaaccggcggcgaggagtagggccgtcaggggcatcgagcagtatgtgaggaatacatggcaagctgatggtctctcccccagtcagcttcgctgacagccccctcgtcagagggggcttaaggagcgtgaatatgaccgaaaagaatacgttgaagaaatccgcgacattgacggcggccggactggtcgtggctggcgcgctgctggccgggtgcggcgaatccaaggccacgccgatggacgatgcgtacgccggcaactcgggcgagaccgagaagtcgcaggaagagcagtcgcaatcccagtcgaacggctccgatagctccgacggctccgattccggctcatcgcacaacgacccgtccaccaccacgtccgacaagaaggacaccggcaactacaaggacggcaactactcgatcaacggccagtacggcccggtcggcgaggattccatcgacgtccatctgaccatcaaggacggcaacgtcgagaccgtcaaaatcattgggcacccgttcaccacgatttccaagaaccatcaggacgacttcgccaaagccatcaacggcgtagtggacggcaagcccctgaagggactcaaagtggacaaggtcgccggtgccagctggacctccgacgccttcaacaaagccctcgaagtcgcccgccaggaggcttcgattcaggagtaagaccgctacttcagcaatgctggccacagcagatcggccatgcgcgaggcccaggcggtgtcgtcgtccatcgctttgccctcgatggcctcatacgccaccaaagacccgataatcgtggacaacagcaacttctcgtcaacgtcctcgcgaaacacgccctgcgcgactccctgcttgaggaacgcccccacatgctccagccacggggtcaccacctggtcgacgatgtgctggaagaactcggcctcgctggacaatacaatgcccacgcgcttgacgtcgatgtcgttgtcgcgcacccaatcgaccaatcgctgcaatagttgcgtgaaatgctcacgcgtggggctgggcactgggtcggaatccgggatggccagatacatcgcgctgatctcgcgcagcagctcgtcggcattatggtatcggcggtaaatcgtggttttggccacgccggagcgccgggccacctcctcgatggtcacgccgctgatgccgcggtccaccgcaatctgcagcgtggctcgcatgagcttgcgatccgtcgcctcgcgcgtgcgctcaccgcgcggtgtcgccgtcgtacctgtcatctccgtcatctcttctcttcgaaatatgctcccgtacgctcccgttggcgggagctggctggcaaagccagactgagggtggtaagtccatgccgtttgtaggcaacccccggataatacctactagcccagcactttagtgctctcgactttggccacataccactggttgaaccgcaccagtggcttcctgagcaacagcccaagcaacagcagcggcggcacgaacgccagcagcattccggcggcccgccagtaatccatgtcgtagatgccggcgatggccgcacgcatcatcgtcaccgcatgggtgagcggcaagaacggactgactttggcgatgaagtcgggcaacatctgcaccgggtaggcagcgttcgcacccgaaatctgcacgatgagcataagcacgccgattgccttacccacattgccgaaactcaccaccatcgtataggtgaagaacgagaacaccagcgaggccagccatccggacaacataaacagcagcggatgcacggcctgcacgcgcaggaacagcagatcgccgccgagcgacaccgtggattgcagcagcgcaatcagcgcgaacaccccgtaatgcccaaggaagagccgatgcggccgcggatcgcccaatgctttgcgtgtccggcgagacacggtggttttcagcgtcaccaccatcagcagcgcgcccacccacaacggcagcagcgtgtagaacggcgccatcgacgaaccgaaattcgccaccgggaatacggccttgcgcctgagctgcaccggcgcggccaacgtactggccagcgtttcgggatcattgcccagcacctctttgaccatgctcatatcgccactgtttagtgcgtcgctcagtgtgctgttgaacgaagccagttcggcaccggcggaacgcagtttgccggacaccttgcccaaggtggtgcgagcgtcgctgagcatatcgctggcgtcgtcggaagtccttttcaggtcgccgagcgtggagtccaactgggtggcgccggaactcagtatgccggaggcgtcagagacggtggacgacagggagtcgatttgcggtttcaccgtggccgtgaaatccgacttgatattggcgatactgttctgcgcttgatcggccagatccttgacctgcgcatgctgatcctgcgcgtcctgattaccttggcgaatatcggtcgccgccgtattcagcgcttgccgcagcctgttctgccgtgcgattgaacggtcaatcgccgtgatgatggatgagtcgttgcccagtatgccggccaacgtgttgcgaatttcagtgtatttctccgtctgcttgccaatggccgtggcttgacggtccaattcgtcggcggccgtggtggcaccatcattcgcgtcggaatacagcttgtctatggaatcggacaccgcgccgaaactggaggcgctcgcgtccagtgagctgctcatcgcgtcagcggtggtgcccagggctccgaccacgtcggtgactccctgcttggcgctggcgagatccttgcctccttgtttggcggcagaggaaacctgcgtgatcagcgagttcgaggtgtcgagcaaggcgccggccgtatcggtcaatgcgctgtatgtgccaagcaaatccgccgtatcgtcaagccgtgtggcgaaatcggcgatattggcgttgaaggtattcagttgctctttggcttcgggcttggacagctgatcggccagcgaagacgcgatttccagccctgccgaagtgatggtcttggcgaacgtggtgttgatttccgccgccacctcgtccgtgccctcgttgagcagattcggtgccagcgcattcttcttctcgttgcggtaataggtcagttcggcatgctgcacatcgtcggagaagaaggtcatcatgtctttgctgaacgacttcggaattacgatggccgcgtagtatttgccggatcgtgcgccctcgacggcatcggctttggacgtgatcgtccaatcgagctgactgttggcgcgcagcgcgttcaccacctgatcaccgaccgtgactttcaccgggatcaggtcggaacgatacccctcatccacattcgccaccgcgaatttcaggttcttcatattcgagaacgggtcccagcatgcagccacgttgaaccaggtgaacaggccgggaatcatcaccaagccgatcacgatgatgatggagaccacgttgctggtcaggcgtttgatgtcgccggtaaatagtttccacatggtgttcatcgtgcgtgcctgccttccttggtcggcggaatagtggggatgattgcggtaacggcggcgctcgggtccgcttcttcgtggcgttcggcggaggtgtcgcgacgcttggccttatgcccgtacagcatggcgcggatcgactcgtcggaaaggttgccgagctcggtttggcggcggatggaatcgcgcatgaattccacgaccatcaggaagcccatgatgatgagcacccatgccagccatgtgcccatgaccacgattttctcgctggtggtcagcacaaacacgataatgagcgcggccggcaccatgaatccggcgataagcgcacccagcagcagccggggataacggtaggcgaatttggcggcccgacgttcgatggcatgacggtattcgtcgcggtcggccagtgccgcaatggcctgagtgacacggtattcgctgccaggcaggtgcaccggctcgccgataatcatgtcgctttccttgatttcccgcgcgaacaggcggttgagattggccagtttcggccgggcgccgaggccaagcacaaaggccagaaccgcgaaaaccagcaatttgccgatataggcgaaccagaggccgtcgtagaagccgccgatggtttcacgcattgcgtcaatcgaataggtgaacggcagcagcggatagatggcgcggaagaacgcgggcatcatttcaatcgggtacaggccggaggcgcccggcacctgcagaatgaccagcgccacgcacacgcctttgcccacgtgcatgaacgtggtggagagggcgaaaatcaccgacatatacaccagtgaggtgatgacgcaggtgagcagaaacaccggggcgctcgcgcattgaatgccgatgacaagatcgccgatggccgtgaccaggccttggacggcagccagcgtggccagcagcaggaaacggccgagatagccttgggttggcgtgagatcgtcgatgccctcgtcgtcggtttcgagtttgggaatgaccacgagcacgaacgcgcccacccacaaagacagggttgtgaacagcggtgccatgccggaaccataggaggcgaccgggtagacggcccgttcgctgataacagtgggggagagcatgaagtcggcgattgtggcggcatccagtttgccgtcggtgccgatcagggaactgagtgaactggagatgctcagggctttgatgtcggtggtcagcgtatcgagcttggtttgcacgccggccagcgccttatcggtgtcgtgcagggcggtcaccgtggtggaggcggctttgtcgagttgatcgagggtgctcttcgactgatcgatgagtgagccttgcgacgtgatgccggtcgacagagtgttggcggtcgagctgagggtgttgaggccggtgttgagctgaggaatggcgccggagatgatggtgccgcgagcggtattggcctcgcgcaccgtggtttgggtggcggtattgagatgctgcgccaatccggcggtgtctgtggaggcattgccgatagtggtgttcaggctatcgaggttgcccagtgcgccggcaagctcgctattgcggctttccagtgtggcaatggcggattgcagcggttctcgatcggcgttcggcagccctttgagttggtcgatgatgtcggcgttcgcttggttgatgtcttccgccgtattgatcagtccgcctacctgctgattggcggcgctgatggttccggctaccgtgcccacgctttggttggcctgtgctgcggcctggctcagcaggcttgagccttggtcaagcgcttcggacgtggaggtgacgaagccgttcagactggcttgggtagtgccgatcagggtggagacgccggccagaccttccgcggtgtcgatgccaagtgcgcgcgcgtcgtccagcgcctgacgtgcggtgcgtgtctgctccggggtatcggtgagtttggtggtgagcttggcgatggtgctgcgtgtgtgctgcacgtcgccggaggcctcggcaagggccgtgagggccttggctttggtggtgtcttcggtgctgatggctttgccgccaaccgtattgatgacttcggtaagtacttcggatacggtggagacgaatgtggaattgaccgtgcggtccacagtggacgcgcctacgtcggtgactttgggggcgatggcgctggctttttcgttgacgtaatactccagagtgggccgactcttgccgccggtcaccacgccggcgagatcgtcggaaaagtctttggggatgatgatggctgcgtatgccttgccggattccacctggtccatggcctcggcttcggtgacgaaggtccagccgagctggtcgttgcttttcagctgcttgacgatttgatcgccgaggttttgcttgccgatgagcgcgttgtcggtgccgtcgtcattgttggcgatggcgacggtgatgcctttggtattgccgtacgggtcccagaagccgacgatgttgtaccacgaatacagtggcgggataaacaccatgccgaacaggatcacccatgcggccggcaccttgaacaggcgcaggaagtcgcgtttgaggaccttgaagatattgcccactgatacctccggagcttggtgttgcttgattgctacgttttccgtagcgatacgttaatcgtagcgctacggttgtagtagcgtaatacggctgccggagattattggggtgattgatgatggttttggcggaataacgccgctgcccagcggcttatcgtgtgtctctgggcagtgtgcctaattttttgtggctggggtgctgtgtggccgggtgtgctgtgtgtgttggtgtgaggctgccctccatggggcggtaaaaccttcattgggtggtaagtggcccatggggcggtaaaattcccatggggcggtggcttaaaatggctttattccgcggaatgcggttttgggctaaccgccccatggggtaattaccgcctcatgagagagctaccgccccatgggtaaaccgttgtatcagctttcgatggtgccggattggccatcaatggccgactgctcgttctggctggatgactggtcggagttggagttaccggaagtatcagaacctgtgccggagctgctgccggtgccggactggccatcagtgccttggctggagcgaaaggcgttctggaacttattgacaagatttctggatggtttttggatgtttcctgaaagcgatagcgggctcggtgtccggcaatgtagacagacatgtaccggctatccatcaagttcggcaaaactgcaatcgggtgatagtgtaaggggacgctatgtggggaggaaaccatggttgaattcaaggacgatggcacggccactacccctggcaagccgcgggagaaccgtgacgccgagtccgcagtcgtggctgatctggtggccgtcgaactggacgacgccggcttgaacccgaacgccaagcggttaccgattctggcgcgcatctatggcgcggtcgtgctgctggacggactcgccacattgccgattatggtgatttccatcctctatgccgtgcgcgagattctggatggtcatgtgcacgtcgatgcgatgagcctgactttcatcctgtccgcgattcatgcggtggtgctggtagtcagtgccgcatgcctgattgtgttcggcgtgatgctgctgcgcaatcatcgccggtatgccgcgcgctggacctacgtgctgatgccgttgacgttggccgacggcatgctgtcgctggccctgaccggccttggcttcaacctgctgctgccgctgattcagatgattattctcgtcgtgatttcggtgaccgccgatccctccctgagcgaggaacgccgtttgcagcgcgcgctcaaacgcatggacgatcgcgatgattatgaatcggcggtggcggccggcatgctgggccgcgaccaatccggcaagggctatattgcactggacttcttcaatatcttctggctgtttaccatcgcttcggtgggtggcctgattatggagacgatctaccatatggcgctgtataacggtgaacttcaggaccgcgcgggtttgctgtggggcccgttctcgccgatttacggctgtggtgcggtattggtaaccgtgtgcctgaatcgcctgtggaaggcgaatccgttcttgatcttctgcgcttcggcggtgatcggcggcgcgttcgaatactgcaccagctggttcatggaagtggcgttcggtattaccgcgtgggattacaccggccgttggctgtccatcgacggacgtacttcgggccaattcatgttcttctggggactgattggtgtggtgtgggtcaagtggctgttgccgcgactgctggctctgattaatcgcattccatggaaagtacggtattcgctgactgcggtatgcacggtgctgatggtgatcgacattgccttcacgctgatggccttggattgctggtatgggcgcatggccggccagccgcaggattcaccggtcgcgatgtggttcagcgaacgctacagcgacgcttacatggccaatcgcttccagaccatgcatatcgacccttccaaggccgggcgtatgtgaatggctggcaagtaattacgcttcgcgggcagaaggtgcgtagaacctaagacagccttcgcgtgtgggtggtaagtgggatacactttcgagcgttgaaggaatgattccctccgctgatgcgctgttttgtgacgcgcgtgatgacgatgggacaatcaaacgaaaggcaaggcacatggccgaagctacagcaaacattggtgtgattggactggccacgatgggctccaatctggcgcgtaatctggcgcaccatggcaacacggtggcgttgttcaaccgtcactactcgcgtaccgagaagctcatgaacgagcatggcgccgaaggcaacttcgtgccggccgaaacgctcgaggaattcgccgcgtccctgaagcgtccgcgtaccgccatcatcatggtcaaggccggtgctccgaccgacgcaactatcgcgcagctggaagaggtgttcgaaccgggcgacatcatcgtcgacggtggcaactccttcttcaaggacaccatcaagcgtgagaaggaagtacgtgccaagggcttccacttcgtgggttgcggcgtgtccggtggtgaggaaggcgcgctcaacggcccgtctctgatgcctggtggcactgcggaatcctggaagaccttgggcccgattcttcagtccatcgccgccaaggtgaacggcgaaccgtgcgtgacccacatcggcaccgatggtgccggtcactttgtcaagatggtgcacaacggcatcgagtatgccgatatgcaggtgattggtgaggcgtatgacattctgcgccgtggactcggcatggataccgaggagattggcgacgtgttcgctgaatggaacaagggcgaccttgactcctacctgatcgagatcaccgctgagattctgcaccacaaggatgccgagaccggcaagccgttcgtggacgtggtcgtggatcatgccggcatgaagggtactggtacttggaccgtgcaggctggtctggaatttggttctcctgtggctgctatcggtgaagccgtgttcactcgtgcactgtcttcgcacggtgagctgcgtgaagacgctcagaaagaaggtctggctggcccgaacaagaccatcgatctggccggagaagacaaggccgcgttcgtcgaggacgtgcgcaaggccctgttcgcttccaaggtcgtggcctatgctcagggcctgaacgagattcaggacggtgctaaggaatacggctgggatatcaacctgtccgaagtggcccgcatttggcgtggcggctgcattattcgcgcccagttcctgctcgaccgcatcaccgaggccttcaagggcgataatttgccggcttccctgttgttcgatccgtacttcgagaagatcatcggcgaatcgcaggatgcatggcgtcgtgtagtcgtgcgtgccgtggaggccggtatcccgaccccggtgttctccagctccctggcgtactacgatggtctgcgctccaagcgtctgcccaccgccctgacccagtcccagcgtgacttcttcggtgcccacacctacggccgcgtcgacaagcccggcgtgttccacaccctctgggcgcaggaaggccagcccgaggaacagcaggcttgagcgtctgcgacaatctgtgggccgggcccctcattcagggtccggcccacaggaggcgccatcacaactcggtgacggtttcttcggtggagaaccaggtgaactcgtccactccgttggcgtaggaggacgggtaatccgggttgttgggccgctcgaagacatgggccagcgattcggctttgccggcaccggcggcgaagaaccatgtacggcgcgagcgggcaatcagcggcgcggtcaacgagacgcgcaacggcggcatcttgggggagtggttcacacccacggtgagcctatcggtaaccttgacctcatcatgacccgggaacagcgacgcatagtgaccgtccggtcccatgccgagaatcatcagatcgatgaccggttccggccccaattcattcaccaactcgcgctcatagtcgctcgcggcatcgtccagcagcgcatcattcgcggcatcggcggcggcgcgaacggaagcgtcatcactatcggcctgatccatcacatcggcgatgtcatcggctgaacgggtatcggccgccatctcatgaatattcgattcaggcagcttgccatccgccaccagctggtcaagcagcaggcgacgggcctccagagcattgcgatcggtgtcgtaagccggcacaaaacgttcgtcgctccaccagaaatgcacgcgcgaccaatcaaccgcatcagccagtggatcgttcagcgccaaacccaacggctgtgcggccgaaccgccagacagcgccacatccacacgtgtgcgatgcgtgccatcaggcaatcgttcggcgagcaaatcgagtagcgccaagacaaaacgttgcgcgccagcctgaatcatcagatctttattcggatacacaatgagttttcgagttgccatgtatggtccttatatggggtatgtgtcgtactttgcaatgtggattgtgttgtcagttgacaacgcataatacgggtggcatgccgggaatccagccatttgcagcaatgaaatgtgttgtcagttgacaacacaatgtacattgtgcgacatcgcatatgtcactttattactccgcggtcatgagcttcggcatcgcatgaggtaggaaacgatgagcaacggcgttggcatggctcgaccacaattgccgaactcatgccaacgccgctgtggcaacggttctaccgacttcagtgacgaatcagatcccagccttcgttgatgacctcggcgtagatctcatcgggatcgatgcggcgcagttcctcggtcagacagtcctcgatggtgcgcatcggcacggacacttcctgcggagtctggccgggcagcgagatcagcgcttggtcctcatacgggcgttccagtgagatcacaccgtcctcacgggtcaggtacacgccggtcacggcctgcgcgtcgggcacgaactcagtttcgactggtacgccgagtttcagacgcagccatgcgcacagcatttccagaggcaggaagtcggccttgccggtcaccttcacggcggtgatgggcaggtgcggcggctgatcgagcatcgaggcgagcattgcgcgccagacggtcagtcgtgtccaggacaagtcgatgtcttccggtgtccaattgcggcgcaaacgctcgatcgtggcctccggattattggagtgcagcgcgtcggtgatgcgactgcgggccatcgcacccatcagatccttggccgggttcgacggcggtgtggtcggccaccacgccactacaggcgcatccggcacaagcagcgggataaccagcgtatccgggtggttgataaggccaccgcgcggacgcaagatgataatctcaccggcaccggcgtccgcgccgaatcgcacttgggcgttcagattggaatcgttcggatcgttcgggccgtcggtcaaatcgacggccggattatcgcgattcgcgctcacctcggcggccacttcggtctcgttcggttcgccttcgccggactgatcggcaggattggtatccggtactacggcaatcacgcggcacgggtgctcacggctggccgagttcgcgatttccagcgcatgctctaggtccgcgtcctcggtggcgatgagtagcgtcaacacgcggccggtcgccgattcgccgcgctcctcgtgcagctgttcgattttgtgcgcaatctcgcgggtgcgggtgttcggcatatcgatgatcatggcatcctccagtggcggccgtcgcgcgccagcatttcgtcggcctgtgccggaccccacgtaccggcgcggtaggcctgcggctggccaagcgtggaccagaattgttcaatcggatcgaggatctcccagctgaggttcacctcttcggtggtcgggaacaacggcggatcaccgagcagcacgtccagaatcagtcgctcataggcttccggcgagttctcggtgaaggagcggccgtagctgaagtccatgttcacgtcacggacctccatggtggagccgcccggcaccttggctccgaagcgcatggtaacgccctcgtcgggctgcacgcgaatcacgatggcgttcttgccgagttcgcgcacggcggtctgctcgaacggcagatgcggggcgcgcttgaacgccacggcgatttcggttacacgcttgccgaggcgcttgccgcaacgcaggtagaacggcacgccagcccagcggcgggtgtcgatatcgaggcggatggcggcgtacgtttcagtggtgctcttggggtcgatgcctttttcttccaagtagccgaccacttcgtgcgagccctgccagcccttggcgtactgaccgcgcgcggtgttggcggcgaggtccttgggcaggcgcacggcggaaagcaccttggtcttttcggcggtcaggtccttggcggtgaagctcaccggctcctccatggcggtcagagccatgagctgaagcaggtggttctggatgacgtcgcgtgcggcgccgatgccgtcgtaatagccggcgcggccgccgatgccgatgtcctcggccatcgtgatctgcacgtggtccacatagttggcgttccagatcggctcgtacatggcgttggcgaaacgcagggccagcaggttctgcacggtttccttgccgaggtagtggtcgatgcggaacacggagctcgggtcgaacacttcggataccacgctgtcgagttccttggcgctggccagatcatggccgaacggcttctcgatgatcacgcggcgccatgcgccctcggacgagcgcgacaggccggaggcggccaactgcttggcaacctgcgggaaggcgcgcggcggcaccgacatgtagaaggcatggttaccctgcgtgccgcggtcgcggtcaagctcctgcacggtggcgctcagacgctcgaaggcctccggatcgtcgaacgtaccctgcacgaagcggatgccggcggccagattgcgccaagtcgactccttgaacggcgtacggcaatgcgcccggacggcggccttgacgaattcgatgaaccgctcctgtgtccagtctcggcgggcgaagccggtcaggccgaagctcggcggcagtaggccacggttcgccaggtcgtagacggccggcagcagtttcttttgtgccagatcgcccgtgacaccgaaaatgacgaggctgcacgggccggcgatacggggcagtctgaggtcgcgcgaatcgcgcaggggattgctccaattgggggattcactcataatgtacaagggtagccgccggcggctatctatcgctagaggcgatatgcgatttgggctgcgatttgggccacattgcgtgtgctgtgccgtgcgttgggccaatcgcgtacgcaaacgtgtacgcaacgccgtagttgaaatatcccaaaacggtgtgtattttagaagagttgcccctttagctcaacggttagagcagcgtccttttaagtcgtgggttgtgggttcgaatcccacagggggcacaacaaatccttggaatcgcaatggttccaaggattttttgtttcgaccagcctggctcctagagtggtgccccatgtcatgcaccacgattcttgtcggcaaaaatgccagttacgacggttccaccatcatcgcccgcgatgacgattcgggctcgggccgttacgatcccaagcgcttcgtcgccgtcgcccccgacgaccagccgcgccactaccgcagcgtgctgagccatgtcgaaatcgaactaccggacaatccttgccggtacaccatcgcaccgaacgtgctgaataatcgtggcattctggccgaagccggtgccaacgaacacaacgtggcgatgagcgccaccgaaaccatcgctgtcaacgagcgcgtgctcggtgcggacccgatggtcgagttgcggccggctgtcggcgggccggacagcaccgattatcaggccgagcagcccggcggtatcggtgaggaagacatcatcacccttgtgctgccgtacgtcaccaccgcgcgcgagggcgtcgcgcggttgggcgaactgctcgaaacctacggcacctacgaatcgaacggcgtgattatttcggatgcggacgagatctggtacgtcgagaccatcggcggccatcattggatcgcccgccgagtgcccgacgactgctatgccacgatccccaaccagctcggcatcgacgacttcgacctcgccgatgcgttcggcgagcagcgcgaatacctatgcagcgccgacctgcgcgagttcatggccacgcatcaccttgaccgcacaatgggaacgtcggtctcttccaacggccgtcacgtgcatagcgccggattcggaacaaccgttgcccttcccacccgcttcaacccgcgcaaggccttcggcaccgcgacgccgaaggaccatatctacaacacgccgcgtgcctggtacatgcaacgccgcctcaaccccagcgaggactgggattcgccggccgcccgctgcacgcccgaatccgacgacatcccgtggtgccgcgtgccggaagacaaggtgagcctcgaagacgttgatttcctgctgtcctcgcacttcgaaggcacgccgtacgacccgtacggcacgaccggcacggcggaatcgcgccaccgttaccgtccgatcggcgtgaaccgcaccggccatatggtggcgattcaggtccgcccgtatgtgccggcggccaatcgcacggtgatgtgggtatcgttcggctccggtccgttcaccgccgccgcgccgttctacgcgaacgtcaacgacacgcctgcctacctgcgcgacaccacgcccgaagtctccaccggcaacctgtattggacgaaccgcctgatcgccgtcgtggccgacgcgcattggtatgagacgaaccggttcatcgagggctatgcggaaggcgtgcgcgcgttcgggcaccggctcatcgagcgcacggatgagcagttgcttgctcgaagcgatgccgaatcgacgggtacgaatgcatggccgctcgatggcggccacggcgatgagaaggatgtgcagggcgtggcggatgtgctcgaagcggccaacgacgagatggccgactacctgcgcgagcatacaaccaagctgctgaacgacgtgctatacacctccagcaacctgatgcacaacagcttcgcaatgtccgaccgttgggccgagtagcaaaacctcggctggggaggtaatagggatgccctgctgataacgcgtcagcagggcaaagccacaatccgaatcagttgaagccgacgatgcgttcggcgatgagatagccgttgcgcacgatccagcggccggttttaccaggcagattgagcgcgcgggacatcagcttcgagcgcacatccttgccgatggccggagaataggcgtcaatcgcatcccacagctcggttttcttaacgtagttggccggatcgcgcgagagaatcaggaacgccgaggtaacgcatgattcgatcgtcaggaagtgaatcatgtaccggtacagcccctccggcaccgtaccacgttcgggcgtggcctcggtcatcagccgattgacgagccgcagctgatccacacgcttaatcatcacgtcggtctgcacgctctgaccctcgcgcccgatgaagtagtggtagaacggcacgtcgagatactggatgcgcttcacccacgggaacggctggtacgagtaatagaaatcgacgtagaacgtatgctccggcagcttcagcccggaatcgcgcaccacctgcgtgcggaaagtgagcgcatgcatgatgatgtactgcgccagaccgaacttgcccaggtcatcccagccgagcacgcggccggcctccatcacatgacggaagttcaccacgatcttgtggcgcttggtcactttgtcatacacatagttggtcaccagcatgtcgatcggctcgctggcctcacgttgcgcgcgcaacgtggccagaaccgtgtcgatggcctgcgggtcgacccaatcatccgcatccaccaccttgacatacatgccggtcgccgccgtgataccggtgttcactgcgccgccgtggcctttgttctcctggtgaatcgcgcgcacgacacctggattggtgcgttccagtttgcgcgcgtactccagcgtgccgtctttcgaaccgtcgtccacaatcagcacttcgaggtcgcgggtgtcgttcgccgaaagcagcgagttcacgcaacggtcgagataggactccatattgtatgcggggatcacaaaggtgagcgtctttgccgtgctggccatgaaagtcttacgtcctcacatatttagtcgttatgttcagtttcctgttcaaaccgtagcacctcgtctcccgactcggcagagtgttgcgcaacctgtgcccctgaactcgtgttctgcaaccctgaatcttccccgggggcgcgatcggaatccgattgggcggaacttgtctggtctgaatccggaccgccggaatcggactcgcgcttggctcggcgctcggcctccttccgcgccttggccccctcaaagaacaactggggcttggagtcaagccggctcaggccatgccaggccaaatccacaatgtatgcggccagctgctccttgctcacctttggtcggtcggcccagtactgtccggtgaacacggtcatgcccaccagcatctgcgcatagtacggcacgcctttggtggagagtttctgccgtttgaatgtttcggaaaggatgtcttcgacgcgcacggcgatgtctcccagcagtgagctgaacgagccggacggttcggtgctgggcgagtcgcgcgccagcacctggaatccctcggcgttctcctcgatataggagagcagcgcaagcgccgtgcgttccacgatctggcgcgggtgcagggtcgggtcgtcgagcgcggcggtcagcgtaccggtcagcgcgcgcatctcgcggtccacgatcacggcgtacagtccctccttgccgccgaaatgctcgtagacgatgggtttcgacacttttgcggtggcggcgatctcctccacgctcactgcttcaaaacccttcgacgcgaacagcgaacgaccgatttcgatgagctgctcgcgccgctgatacgacgtcattctggatgtattggccatgctgtccagtttttcacgccccgtggatagctccctgaccgtccgcccccacgtatcgtccgattctggcgaatcggacattcgtggtgcgtccgcggggcggagccggtgtgtccgttgcgcttcttaggctggagccatggatacgaatgtgattattgcgattgtcgccgtcgccgtcatcgcggcaattctggtgatcggcggatggtggttcggcaagagccgcaaggctgccgtggccaagtccaccgaagccgcgaaagccaaggccgacgcccgtcttgctgcggaagcggagtcggccgcatctgattcttccacggtgaagccgtccgttgattccaatgttgatgcagctgaaaaagcttcggctgaaagtcagcagaagtcctcagctcaagcttcctcttccgaaacggcggctcctgcaccagccaccgaagccaagcccgaaccggttcatgacacccccgaatccgccggcacgcgcatgcagcgtcttaaggcgcggctgtcgaaatccggcaatccgttcggcaaggccctgttcaacattcttgcgaaggatcagctctccgaagccgattgggaagacgtcgaagacacccttctgctcgccgatgttggcgcggaagccagcgaacagctcgtcgaggaactacgcaacgacgcccgaatcgcaggccagtccgatccggccgaagtgcgtgccgcgctgaaagacaaactgttgaagctcgtcggcactgacgtcgaccgccggctcaacgccgacaaggacggcgcgaacaagccgagcgtcgtcatcatggtcggtgtgaacggcaccggcaaaaccaccaccgcgggcaagctttcccgcctgcttgtttccgaaggcaagcaggtcatgttgggcgcggccgatactttccgcgcggcggccgccgaccagctcgaaacctggggcgcacgcgtcaatgtgcctgtcgtccgctccgacaaggacggtgccgacccggcatccgtcgccttcgaggcatccgccaaggccaaggaagcgaacgccgacgtgctcatcatcgacaccgccggccgactgcagaacaagtcgaacctgatggacgagctcggcaagattcgccgcgtcaccgaaaagaacctgccggtggacgaggtgctgctcgtgctcgatgccaccaccggccaaaacggcatggcccaggccaaggtgttcgccgaagccatcggcattaccggtgtggtgctctccaagcttgacggttccgccaagggcggcatcgtgatcagcgtgcagaaggagctcggcgtgccggtcaagctcgtcggtcttggcgagggcccggacgatctggcgccgttcgatcccgaaggcttcgtagacggcattcttgcgtaagccaacgtccacgttgtgagagcgcaaaacgcgcgacttacctatagaccaagccccgaatcatgctcgaaacatggtcggggcttcgtcatatccgttggaatcgcgccaaaatttcctcgagcggccgcacgtacgcttccagccacgcttaacaatcgcgtaacttggcgtaacgaaaccaaaacgagaccggttttaactgacaaactgttagcccccataagggggacggtattgtagagacaaataagacgccggccgcacaaagcccccggtgccatgaacgaaagagagggaggtagacatgggagcgattgattccggtaacaccgcatggattctgacatccgcgtccttggttttcctcatgacgcctggtgtggcgttcttctacggtggtatggttcgcgccaaggccgtactgaacatgctgatgcttgaggcggccgcgctgtcggtcactatgattatttggactttgtggggttggtccatcgcatacgccggttccgacatcggaggcatcttcggcgacccggccagcggcttcctgctgaaggactccatggtcgcgcaggacggcgtgttcaccgccaccggtctgaacggcaacaactacccggtttctgtggacgtcgccttccaggtcgccttcgcgatgattaccgtaggcctgatctgtggcgccatcgccgagcgtgtgaagtacagcacctggatgatcttcgtggcgctgtgggttaccttcgactacgctcctatggcccacatggtctggaacggtggtctgctgtctgctgacggcgccatctccaaggccatcggcgcggccgcccacgatttcgcaggtggtaccgtggtgcacatcaacgccgcagtcgccgccctggttatcgtgctcatcatcggcaagcgtaagggcttcggcactcagccgttccgcccgcacaacgtgccgttcgtgatgctcggcgccttcctgctgtggttcggctggttcggcttcaacgctggttccgccttcgccgccaacggcaccgctggctacgcttgggtctccacttccgccgccactgccgctgccatgctctcctggggcttcaccgagaagattcgctccggccactacaccgctatgggtgccgcctcgggtatggtcgccggcctggttgccatcaccccggccgccgatgtggtttccccgctgtgggccatcgtgatgggtgccatcgctggtgttctgacctgcctggcctgcggtctcaagttcaagttcggctacgatgactccctcgacgtcgtcggcgtgcatggcgttggtggtttcaccggtactgtcctcgtcggcttcttcggcgaaggcaccggcctgctggctggcggcgactggaagcagcttgtcgttcagctggtcatcgctctcgtcgccatcctctactccgcggtgatcaccgcgatcatcgccttcgctctggagaagaccatcggttggcgcgtcaccgaagctcaggaagtcggcggcatcgatcttgccgaccagggcgaacgtgcttacgattttgctggtactgccagctctgttctcaaggaggtgaggtgagatgaagctcatcaccgctatcatccagccccataagctcgacgacgtcaaggaggccctcgcggccgccggagtgcacggtctgaccgtgtccgaggccaacggctacggccgtcagcgcggccacaccgaggtctaccgtggcgctgagtacaccgtggacctgattccgaagattcgcgttgaagtgctgtccgatgacgcggatgccgagacgctggtcggtgtgatcatcaagtccgccggcaccggcaccatcggtgacggcaaggtgtgggtcgctccgctggactccgtggcccgcgtgcgtaccggtgagaccggttccgccgcgatctgataacacagacgtccatgcctagaaggggatggactgcatgggaaaggtccccgcacgccgcgaattgacgccgtgcggggacctttttggcaatgaaagatgaagcaatgacttcagcagtagatggcttgaaacaacgattcatggatatgagccagccggatgacgatggtgtctaccggaatggtgcgaccaagcgtaaagcccgcacggaactggccatgcaatgcctcacggagctgtggaatgcggcctgcaaggatgtctctttccccgtgcccgactccggcatcggcttcgccgcggtaggctcgctggcacgtggtcaactgggccccagctccgacctcgacttggtcatcatctacgagcctcgcacgttgaacgaccagcagctcaacgagttggccaacaaactctggtacccgctatgggacagcggtctggacctcgaccactccatccgcacgcgcgcccaatgcgaggaagtcaccgaccatgaccttcccgccgccatgggctggctggacgtgaagcccatcgccggcgacactgctctgattaccaccaccgccacatccatcctcgaacgctggcgcaaggccgcccgcaagcgcctgcccgaactgctcgactccgccaaagcccgactcgacgaattcggccgcctccaatacgtcaatcagcccgacatcaaggagacccgtgggggtttgcgcgattcggtgctcgtctccgcgctcgccgtctcatggctggccgaccgcccgcacggcatctacgacgaagccgtggaacgtctgctcgacgtacgcgactgcatccatctggtggccggcaaggataccaacctgatgctgacgccctatcaggccaaagtggctgccatgcttggccttgccgatccgacttggcccgaaaacgagcgtgccgcctactcgatcgacgatttgcagacgctgcttgcccgtatcggccggcgcatctccttctcgcttgattccaccgcatcccgcgctggacattcgctgacccacgaaaagccgcgattcgcgttcttccagatgttctctcagcgctctggcggcaagcgtgaagccccgcaattcgacgtggtggctcccggcgtggccaagcacgaaggcgaattggtgttggcacccggtgccgagcctgccaaggatgccaagctggcgttgcgtatggccgtggcggccggcgaattcggtttgcccatcaatccgtctaccttggttaatctgaagcactgcccgattcacgacaaccagtgggatgacgaatcgcgcgagctgtttattcgcctgcttgcatgcgggccgaatcttatggaagtgtgggagagcatcgacttcgtggacattccgggtcgatggatgccggaatggctcggcgtccgcaaccgtccgtccgcctcggccgcccaccggtacaccatcgatcggcatatggtggaggtcacgtcgcgtctgggtcgtgagacaccgtccgggggacggtatgatgacgatcatttcaaggcgttgctgttggccggtattacccatgacatcggcaagcgcgcgttcgtggccgatcacgccgccgagggtgcccgccatgtgccggtgattctcaagcgtatgggctacgcgccggacatcgtcgactgggccaccgtgctggtgcgtgagcatttgaccctatccgaatttgccacgggtaaggacccctatgatccggccgtggcggaggagttggccgaccgcttgcaccacgacaagatgctgttggatatgctgttcgacctgacccgggccgacggctcctcgctcggtgccaccgccggtgagaccatcaccaagcaatacggctggtccaagtggcgcgaacaaatcgtgcgcggcatgtattccgccgctcgcgccgcgatgtaaacggaatcgcccagcacttcgcgcggccgatacctacttcatccatgcgtccgagcgcacgcgcagcccgttggacaggctgcgcccgcccatgagcaccacgttgaacgcggcccagagcacggcggtacgcatcaggtcgctcgtcagcgccggcgtcaccatattggccagtatgagtatgagcgtcacatacaccacggcggtcagcgtgcaggtgcctgccagatagcggtagtcgcgcgcgccgataagaatgccgtcgattgccatcatccagccttgcagtgggaagaagatgcccatcgtcaccatgccaacggcaatcaacgtctgaatatttggcgtaggggagaagaagtgcccggcgaacaggccgactaccgcaaaagccgtgccgattaccgcgccggtgaccagccccgcacgcccggtcgcccgcgtcaaccgccgcgcctgctgcacgctgccagcgcccagcgttgtggccaccagcgtctggccggcgatgcccacggaatccagcatgttcatcgcaaaattccaagaggagttcacggcctgaaacccggccaacacggcagtacccatgcgcgcggcacaggcgaccgtagccaccatggccgcacgaatcgccaatgtacgaatgaacaatggcagtccgtcgcccccggctgccgcaataccggccaaacgaggccgcagactcgcaccgtccgcccgggaccacagaatggcggggattaccaggaacagccccatgaaccactgagctatcagcgtcgccactccggagccggcaatgccccaattcagcacaataacgaacaacacatcaagcaccgtgttcaccaccgcgccgcccaccgcagcgatcagcgtgatacgaaccttctgcaatcctcggaaaatgccgttcgccgcatataccatcagcatgcctggcgcacccagcacgattgcgcgcgtataggtcacggcttgttccaatacttcgccctgaccgcccagtgcccggcataatggctcggcagccgcgaacaatcccaatcccagtacggtgccgatgctcaaggccagccacaggccgtcaatgcctgcctgcagtccctcgcgacgacgacccgctcccagcagatgcgccacctgcgcagtggtcgagtaggccaggaatatgcatagtccgactgccgtgaggatgatggtggagccgattgacaggccggccaacgccgcatccccgatatggccgacgatggctgtgtcgataaggatgaaggtcggttcggcgatgagctggccgaaggtcggcagggccagcgccatgatccgacggttggtggagcgggcgtcggtcgggccgttgctggtgtttgtgtttgcgccggcatgcggggttccgaagccatcgcggcgtgtggtatcgccggaactggtggctttggcgtcggaagagtctatgtgcacgctcacacgcatatcacgcctggctacattgcgcaagcacctgttgtggacgcggaatgttatccccagactatccaccaagttatccccagtatgtggataacttagtggattatccccagaattatccccaaaatgtggataactattttttctatccacatttgacgcttcagcgtgtcgccgcgctgaccgcaaggtgaaccaacgatgaaattggtgcgcgatgattcggcacgacttgcactttcatgcgttcattaggtcgattgtgcattcattaggtcggtggactttgagagatattgatcgagcgcctcagaatgccgccattccaagcgcatggtttgtggtgttaccaagcacagtgacctaatgagtgaggaatcgacctaatgaacgtagtcgtgcgatatcttccgctcgccacgccacctcctatacttgagggctatggcagaaggaagtgaacactcgtatcagaatgggttcggcagtggctcggatcgtggcgatcgtggcgaccgcgcggaccggggcggcgcgcaggcggcggcagctggcgacccgattttcgaccgcgtgcccccgcacgatgacgacgcggaaatggccgtgctcggcggcatgctgatgagtaaggatgccatcggcgaagtttcgcagaccattgacgtcaccgatttctaccagcccaagcaccagacgatctacaacgcaatcattgatctgttttccgccagccagccggtggacgtggtgctcgtggccaaccagctgttggcggacggcaacctcgacaaggtcggcggcgcggactatctgcacagcctcgtcgcatccgtaccgaccgccgccaatgccatgtactacgcggagatcgtccatcagcgggccattttgcgcaatgtgatcgccgccggcaccaaaatcgcccagctcggttattccgccgagggatcgcaggctgaggatgtggttaacctcgcccagtccgagatctacgagatgtcgatgggcaaggtgcgtcaggactatgccgccatcggcccggtggtccacgacgcgctcgaccagctggacaaactgcagcagggtctcgtcaacaagggcgtgccgaccggattccgcgacatcgacgacgtgacccagggcctgcagcccggacagatggtcgtcgtcgcaggacgtccggccatgggtaagtccacgctcggcatcgacttcgcccgcgccgccgcgttgcaccacaacatgacttccgtggtcttcagcttggagatgagcaaggtggagctcgctcagcgtattatctccgccgaaaccaatattccgatggccgccctgcgccgcgccgacgacatcacccccgaacgctggaacaccctgaaccagttctggaccaagatgcagaatgcgccactgttcattgacgacagcccgaacatgagcctcatggagatccgtgcgaaatgccgtcgtctgaagcagaccaacgatctgaaactcgtggtcatcgactacctgcagctgatgacctcgggcaaggccgtggaatcccgtcagcaagaggtgtccgaattctcccgtgccctgaagctcttggccaaggaactcgaagtgccggtcgtggccctttcccagctgaaccgtggcccggaaatgcgtaacgacaagaagccgcagctctccgacctgcgtgaatccggctcaatcgaacaggacgccgacgtggtgttcctggtccaccgccctgacttctacgacaaggaagaccgccccggcgaggccgatatcatcatggccaagcaccgtaacggcccgaccgaaaccttccacctcgccttcctcggtgccacgtccaaattcaaggacatgccgcaggactacaacagcaatcagggggtgtgatgatggcaagcaacgtttcacgcgatgtttcgcaagaccaatcgtccgtggtgcagacccgcaaaccgtggtatgcgttcgccaccgtggccgcaggccgcttcgtgcggtttgcatcccgcgtcaccaaacatggcggttcggctttgcccggcaaagtcgtagaaaagattgaccccggcttcctgacccgtacgctcgggcagttgccgcttggcgtggtattggtgtccggcacgaacggcaagaccaccaccacccgcatggtcgcctcgatgctctccgatctgggattgaaggtgttcaccaatccgaccggctcgaacttcgtgcgcggcgtggtctccgcactgctcaccgaagtcactttcggcggcaaattggacgcggacatcgccgtactcgagctcgatgaggcgtacgccgtccacttcgtcaagcaggtcaagccccgttatgcgttgctgctgaacgtgatgcgcgatcagcttgaccgattcggtgaaatcgacaccacggccaaactgctcagccatgtggctgcggcgactaccggcactgtggtactgaactgcgaggacccgcgtatcgccgcgctcgccgcgaaggccccggctggcaccacagtgcgatacttcggcctcgccgacgatttgcgccactatttcccgtccgatgacgacatggccacgaccgtgtcggtggaaggtatggccgggccgctcccttcagtcagtactcccctcagtccgcttcgcggacagctcccctcggagaggggagcttccgcaggcacggcagaactccccgccgacgtgacacttaccgccgtgggcgaccacaaggccaccttccagatggacagccaggactacgccaccgacgtcaaacttgaaggcgtctacaacctgtacaacgcggccgccgcgctcgccgtggtacgtgcggtgatgcaagacaatgccgccgcatccaaggccactgccgcagccaacgcctgcgccgtgtccgccgacgagctcatcgccgccgtttcccgcgtcacgccggctttcggccgtggcgaggtcatcgacgtcaacggttccccggtcgaactgctgctggtcaagaacccgatgggcttccgcctctcgctcgccagcttcgacccggccaacgcggacaccatgatcgccatcaacgacgaatatgccgacggccgcgacatgagctggctatgggacgtggacttcacctctttgcgcgcgtccggtgtcgccatggtctccggcgtgcgcgcctgggacatggcactgcgcttggggtatgaccaagtgccagtcgccgatacgaacaccgacctcgaacaggctgtcaccgcattcgtcaacgccaatcccggcacacgcaagcacatctactgcacctacaccgccatgctcaaaacccgtgccgtactgggccgcatcaccgaagtacgggatgcgggcgtgggcaagtaaccaccctctagcgcccgcgcgccacctctcgcctgcgggaggacatggtgaggaataagacttccccttagcgggaagacatcgacaaggagaacgcgacatggccagaacaatcgatgtggtgtccctgtatcccaaagacatgaacatctacggcgattccggcaacgtgctgactatccgccgccgtctggaactgtacggttacgaaccggtcgtccaccagtacaatcaaggcgacgactggcccgaccaggtggaccttattctgggaggcggcggccaagacaccggccagaagaaaatcatcgacgacttctaccatcgcgccgacctgctgcgctcgcttgccgcagacggtacgccgatgctgatgatctgcggcctgtaccagctgttcggcgagtactttgaaaccgtggacggcacccgtctggatggcatcggcgttatcggtgcttataccgtgggccagaacgtgcgtatgatcggcaatcttgttgagcattccgaccagttcggcgatgtgattggctacgagaaccactccggccagaccttcctgcgcgaaggcgttcagccactcggcaccgtcgatcaggacggccgaggcaacaatggcgaagaccataccgagggcgcgcgcgtgcacaacgtgatcggcacctacatgcacggctcgttgctgcctaaaaaccccgccatcagcgatttccttatcgaaaccgccgtgactcgtcgttacggtacgttcgatacgtccgatcagacccccgaacaagccaaggagctcgcccggctcgatcaagtagccaccaacgcgcgcaaggctgccgccgaacgtcctcggtgaattctcggtgagtcctcggtaagtaccaatcagcgaaaaatcagtcgaaatcagtctgagggtctagtacattgccctgttgtttgcgctaggcttggtggtacgagacatggcaccaggccatgtcggacctcgaaggaggggtatcatggctgattttgatcttctgggtgatggcctgcgcaaggtcctgctggcgggcatcggagcccttgccaccggatatgagaagagcagcgagctcgtcgacgaactcgtcaagaagggtgagattacggtcgagcagggcaaggcgctgaacaccgagctcaagcgcaaggtgagcgagacggtggatgacgccaagaaggccgccgccgaagccggcgacaaagctgctgccgcagccgacaccagtgccgccgacaagcccgccgacgagggcaaggccgagtgaccaagctcacacgcactacgccggaatcagagtcgaccccgctttccagcagggtcgaccctattctgacgcctgcgaaagccgaacgtgaggcggcggcgaaccggtccgtcgacacgccggacacgctcaagcgggccgttaccaaggcgactccgagcgtatccgacgaaacgctggcactgttcggacgcaggaacgatttcgccacgcgctaccatctgacgcgccgtggcaagatcaaacgactggggcagatcaccagaatcgtcgagcaattcgacgtgctgcacggcctgactccggtcaaaatgcgcctcatgttcgaggcgctcggtcccacgttcgtcaaagtgggccagattctgtcgatgcgctccgagattctgccgcaaagcttctgcgacgaactcgccaaactgcgcgccgacgccgacccaatgccgtattccacggtgttggatgtgcttgccgccgaatacgggcgtcccgccgacgaggtgttcgcgcatatcgaccccaagccgttgggctctgcttcactggcgcaagtgcatcgcgccacgttgaaaaccggcgaagatgtggccattaaagtgcagcgcccgggtgtgcgcgaaatcatggcccaggacgtctccatcatgcgctccatagccaaggccgccactaaggtgattcgcacctcacagatcgtggacctgaagggcgtggtcgaggagctgtgggacaccttcgaatcggagactgactttctgatcgaggcccgcaatctcgccgaattcaagcgtttcgccgcccgattcaaatacatggactgcccgacggtgtacgccgaactgtgcaccgagcatgtggtggtcatggagtacatcgacggcatctccgtctcccacccgggccagctcatcgacgccggttatgacttgaaggagatcggcaccaagctcgtcgacaattacgccacacagattctcgacgacggcttcttccacgccgacccacatcccggcaatatcctcatccggggcggccagatcgtacttatcgacctcggtatgaccggtcggctcgaccagcgcacccgtgcagtcctcaaagaaatgattttcgccgtcgccaaacaggattcgcccgctctggccgaggggctgctgcgatttgccggcaccgaggccgatccggaggactatcccgcgctattggccgatctggacgtgatcgtcaaggaattcggcaccgtggatctggccgaactggacattgccgctttcctgaccgcactgacgcagatggccggccgccacaacatcgaggtgcccagtacggtgaccaccgtcggccgcgcgttggttacgctcgaaggcttgctggacgagttcattcctgatgtgaatatgatcgaaatcatttccgaccatatcgccacgtcgaaatcgctgaagaacgccaccaaagacgagatcaagtcgctgggcgttgaggggcatcaggctttgcatgccacgctcggcaccatgaccgaactcaagaccgtggcccgtatgctgacccgtggtcagttgcgcgtcaacatggaactggtcggctccgaagagccgttccagctgctttcggatatggcgaatcgtctgacgatggccctgattgtggtcggtttgttcgttggctcgtcgattgtctactacgccggcatgaagccgattatctttggcattccggtcatcggcttcatgggctacgtcgtggccttcgccctcggcgtatggatcgtcatcgacatctacttaaagggccgcaaaaccaagaagcggtagggtatcgattgatatcagtccagcgggagggtggattcgcgctggataaggcggcagggtacgtagtcgacaccgtgatgggggttgccttcgatggcatcgaccaagtatcgtgccgcgcggcggccgatggtctcggtttcattgtcgatcgacgtcagtgcgggcctcgagctggaggtcagcacagaccagttgtcatggccgataacagcgacatcatccggaatgcgcaggccctgctgcttgagcgcatcaatgcagcctctggccagctggtcgttttgacagaccacggcgtcgaacgtgacgccctgatcgagcagcagacgggtggcggcgcggccccaaccttcgtcccacttgccgtaccggattggcccggccggttcgatgcccagctcggccagtgcctcgaccgcacccttggtgcggtcggtggcggcggtataggtttcgtcgccaccgataatggcaatgtgccggcgaccacaagagatgagatggttgatggccatgcgcccggcgtccacattgtcacaggtgaccgaacaatcttcgatatcggtggaggggccgtagacgtagaccagtggcacgccccagtcatggccaagcgtgggccgggggttggtttcgcactgcacgatgagcaggccgtcgaccttgagggacagcagtttcttgacatgctgacgttccagcgcggcgtcgccacgagcgttggccaacaatactgaggtcgattgtgctcgcaactcgttctctgcgccgataagaatcggtgtggagaaacggccctgcagatcggaggtgaccaggccgatagtgccggtggtgccgcgggccagggattgggcgagtttgttgggggagtagttgagctggcgggcggcgtccagaacgcgctgcttggtttcttcgctaatgcggggcttgttgtgcagtgccttggacgcagtggccaaagagactcccgccaaagcggcaacgtcttcgagccgtgccgcgcgtccggtcaatgtctgggccataatgcctcgattcctcgtttctttctcagcagtatattgctgcactctttcgtgcgaaagtagtgattgtaccgatacccctttgtattgttttctattgtagacatgacgcgaaaactttcgcaagtctatttttttggcgtggcgcagtgatcatttttgtgcgattgaaaagagaatgaaagaaagcgttgtgttcacgttcgaatatgttggcttttggcgacacgccgtaagaaagcgctaaaaataagtgtttgtttgagtcaaacaatcgcgcaaaatgcatatcaaacctgttcgatatgcgaaaatatgcgaaagtgcgaaagcgtttttgcaaaaatggcgatgttcgtttatattgagaaaaggctttcgcagtgttacctgttccgagcaaaggagcgagcagggcgaagaccaaggaggcggaccgtccgccaccgcctctcatagttgagcggataaatagagaaagaagcgaacatggtgtctttcaataaactgacccgtactcttgctggcatcgctgccgccgcgttgattgttccgctggccgcctgtggtggctccggcaatggcggtaccgccaccgccgaaggcatcccggccaagggcaccgacgatggcaccgagatcaccctgtggacccgttccccgctggagcgtcaggccaagaacgtggtcgaggcttacaacaagagccacaagaaccaggtcaagctcgagatcatcccgaacgacgatatggaaggcaaggtcggcggtgcttcgcagaccgactctctgcctgacatcctcgccggcgacgtggtccgtattccgtactgggcttccgagggcatcttcactgacatcaccaagcagatcgacggtctggacaacaaggccgacctgcagcagggccacattgaggccggcaccgtggacggcaccgagtacaccctgccgttcatcaccgatgtttccgtgatggtctggaacaaggccctgtacaaggaagctggcctggacccggagcagggcccgaagtccatcgctgagttcaccgagcaggccaagaaggtcgccgccctcaacaaggatggcgttgccggttcctacctcgccggtcagtccggtggtgctctggtcttcgacctcttcccgtccgtgtgggctgacggtgaatccgttatgaacaaggatggctccgaggccactctggacaacgactccatgaagggcgttctggacgcttacaaggaactggccaacaccaccaacggtttgggcgcaggctccaaggaagagaccggtgccacttggaccgctccgttcgcgaacggcaagatcggtgtcatgccttacccgaacacctccaccactgctctgttcgatgctgagaaggacggaggcttcgaggtcggcgtcgctccgatcccgggcaccaaggaaggcaagacctccacgttcctcggtggcgatgccatgggtatctccaaggactccaagcacgttgctcaggcctggaacttcctctactggctgatgcagtctgacactcagaaggaagttttcgctgaccggggcgacaccgcctccaacatccagaccctgaagaccgcttacaacgacgctgacccgcgcatccagaccatcaactccgtgatcatcgacggcaacggccagaccccgaagtccccggccttcaatgaagccttcaacgccgctggctccccgtggcagctgctcgtgcagaacgccgtgtggggttccggtgacctcaaggccgacaacaaggccgtcaccgacgtcctgtctgcccagtgattcggtggtgatgctcctcaccatcgctcatcaaatcacagcaataactgaataacaactggacagattgagccggtcccttccttgtgagggcaggggccggctcaaccacataattgaacttctatcttcttcttcattccttttcttccttcatcattacatacctcttgaatgcggtgtgttggcggggcttcggagtcctccttcctcgaagccctgacatcggattgcattcggattccgtgactaccatttcacagttattccccaaaggagagagaaacatgtcgagtgtttccaagagcgccggggcggtgcccgtgcataagtccaaggcgaaggcggccgagacgcgtcgcggcctgttgtactcgctgccggactggttgatgatcgtcgtcctgttcttcgtgccgatcgtgctgctggtggtgatggcctgctcgcgttggagcctgctgggcggcaaccgcggcgtgaacttcccggacaacttcgtcaaggtgttcgagaacaaattgttctggccctcgatctggttcacgttggagtacaccgtgatcgtcacggtcttcctgctggtcctgggcctgggcatggccatgatcgtgcaggagagctcgaagtggaacaacgtgctgcgtacctgcttcctgctgccgtccgcgacgggcctggcgtccgcgtccctgctgttctacgcactgtattccccgcaggtgggccctgtcaccaagattctgagctcgttgggcctgatgcaggagggcggttcggtgctggccaccggccagtcggccctgtgggccacgattatcgtgattgtctggcgattctcgggctactacatgctgctgatgatgatcggtctgcaggccatccccggtgatctgtacgaggcggcccgcatggacggtgccggttcctggcgtatcttccgctcgatcaccctgccgctgatgaagccgaccatcgtgatgtgcctgatctactgcgtgaccggctcgatcctcgccttcgatcagttcttcattctgaccaagggtggtccgaacaactccaccatgaccgtggtgcagctcatctacaacttcgccttcgattccaagaaggatctgggtatggccgcggcgctctcgctgatcgtgctggtggccctggtcatcatcaactccatccagatgcgcggcatgcgcgacaacaccaagtgagaaaggggaggtaacacattatgactaccccattgtggaagcgcgtcatcgctcgaatccttgaggctctgctcgccatcatcttcatcagcccgctggtctgggtcatcatctgctcgttcagcccgcaggccggttcggcccagtccaagggctggggcgtggccaactacctgaccctgttcggttatcaggaaggtctgcccaagtacctgttcaactcgataatcgtgaccctggtcgcggtcgtgttctccgtggtcgtctgcacactggccggctactcgttctcccgcttcgactacccgggccgtaacctcggcttcatggtcaccttgtccatcctgatggtgccgtacgcctcgctgctgatcccgctgatggtctggtacaaggacatcggtctgaacgacagcctgctgggcgtcggcctagtcatcaccctgttccagctgcctatgagcacgttcatcatgcgtaacgcatttgacgcgatcccgaaggacatggaagaggccgccatggtcgacggctgcaacagcctccaggccttgttcaagattctggtgcctgtggtcaagccttcgatggttacggtcggcctgctcgccttccttgaagcatggaacaacttcatgattccgctgtacttgagctcttcgtccaagtccaccctgccgctggcgatggtgaacatgcgtcagcagaccatgggtgttatcgactacggtgccactgaggccggcgtcgtgatcctgctgattccctgcgccatcctgttcctcgcactccagaagtactacgtcaagggctttatggctggagccgtgaagggctgatcatgaacgttacaatcacttccccgttctggaagcggcgtcgcgaccagattgtcgaatccgtcatcccctaccagtggggcgtgatgaacgacgaaatcgacaccacagtgcccgacgacccggccggtaaccagctggctgacagcaaaagccacgcggtcgccaatctgaaggttgccgccggcgaattggacgacgaattccacggcatggtgttccaggattccgacgtctacaagtggcttgaggaagccgcttatgcgctggcctaccatccggatcccgaactcaaggcgctgtgcgatcgcacggtcgatctcatcgcccgcgctcagcagccggacggctacttggacactccgtaccagatcaagtccggcgtatgggccgaccgcccgcgcttcagcctgattcagcaaagccacgagatgtatgtgatgggtcactacatcgaagccgccgtcgcctaccatcaggtgaccggcaacgagcaggcccttgaagtcgccaagaagatggccgactgcctggatgccaacttcgggcccgaagaaggcaagattcatggcgccgacggccacccggaaatcgaactcgccctcgccaaactgtacgaggaaaccggcgaaaagcgttacctgacgctctcccaatacctcatcgacgtgcgcggccaagaccctcagttctacaccaagcagctgaaggccctgaacggcgacaacatcttccccgacctcggcttctacaagcccacctacttccaggccgccgaacctgtgcgcgaccagcagaccgcggatggccacgccgtgcgcgtcggctacctgtgcactggtgtggcccatgtgggccgactgctcggcgatcggggactgatcgacaccgccaagcgtttctggaagaacatcgtcacccgtcgtatgtatgtcaccggcgcgattggttccacccacgtgggcgagtcgttcacctacgactatgatctgccgaacgacacgatgtacggtgagacctgtgcttccgtggctatgagcatgttcgcccagcagatgctcgacctcgagcccaagggcgaatacgccgacgtgctggagaaggaactgttcaacggttccattgccggcatctcgctcgacggcaagcagtactactacgtcaatgcactggagaccacgcctgacggactggataacccggaccgtcaccacgtgctctcccaccgcgtcgactggttcggctgcgcctgctgcccggccaacatcgcccgactcatcgcctccgtggaccgctacatctacaccgagcgcgacggcggcaagaccgtgctgagccaccagttcatcgccaacacagccgaattcgcttccggcctgacggtcgagcagcgttcgaacttcccgtgggatggccatgtggaatacacggtgagcctgcccgccagcgccactgacagctcggtccgtttcggactgcgcatccccggctggtcgcggggctcctacacgctgaccgtgaacggcaagcccgcagtgggttcgctggaagacggcttcgtataccttgtggtcaacgccggcgatacgttggagattgcgctcgagctcgacatgtccgtgaagttcgtgcgcgccaactcccgcgtgcgctccgatgccggtcaggtggccgtgatgcgcggaccgctggtctactgcgccgaacaggtcgataatcccggtgatttgtggaactatcgtctggccgatggcgtcaccggtgcggatgccgctgtggctttccaggccgacttgctgggtggagtcgataccgttgatttgccggcagtgcgcgagcacgccgacgaggatgacgcgccgctgtacgtggatgccgacgaaccgcgtgcgggtgagcccgcgacgctgcgcttggtgccgtactactcgtgggccaaccgcgagataggcgagatgcgtgtcttccagcgtcgataaatatcggcgatatgccggcctgcgcgcaactggccggcaaaataatacttatgccgccatcgtctgcaataagtcgatgacggcataggccggatgtcagtatcgattggagccgaaaacacatccggggaatgaggtctcctgtgtggggtaatacccgtgcaggagatttttaattatatgctcccgctgtgagagctgtcggcggagtcgactgagggtggtcataagcggtaccgtgtaagccaccctcagtctcgctttgcgagccagctcccgccagcgggagcctgttggttcctgattcagcgaggctgaatcggcgcgccgtaggtactgcgacacggcgaaacgcagcaatgctctaatgcgaaagtaaatgcgaaaactgagaaattgccgggtttttgttgtataagatggttgatatcgctgagggaaagttgcgaaaccgtattcgctcggttatgatgtggaatcagcttcggtgaattgctccaaccgtgatatccatggcggatatcacaccagattcactgaagatactcattccggtgaacccaatagccaataaaggaaactgacggagaacgggctctgcggcccagcatccacagaagaagtcctggtctcatagatgcgacgtagcctgagcgaagacgcgaaagaccggggcggagaggtccaagcaggaatgcatcaatcaacacgaaagcggtggcttgcgtcaatcggcgcggttgcagcggtcgccacactggccaccggcggtgcagtcaccgcgcaggcagccgatgcgcccgtcatcaagaatgcggatgtggcatatccgtcgttcaagggatctgatgatccgatgaagacggcggcgaacaacaccacatataaccctgccgtcagctatctgcaggagacattcgataacgacgtgaagaacctggccggcatcgacaccgaccatgacttctggatcgataagattctcacccgtactggtgcacagccaactggtaaaggcacgaacgacaagggtgcttactcgtatgaaggctccgacggcaacaactacctgttcacccgtggtcgcgccgcctacatgtacacgcacacgcctaatcagctcggttttgtgggtgataccgcctactgggaccagaccagcaggagcggcttcaccgttaccgtaaacgctgatggatcaaaccagacccttaacgaagacgcctcccagcgcaagcagacgccgagctacttcacctccctgttccagaccggtggcaagagcctcaagatcaaggaagtcaagtacatcacctacaacaacgtgatggttgcgaacctcaccgtggaaagcacgcaggaccgcgatgtcacactgaccacggcctcgccgttcgccgccgagggtgctgatggtgccaccgaacttactggccgcgtgaacgtcaagaacaacctgacgaccatctatccgcgcttctccgccaacaaccaggacggttccaactggatcgtcagcggtggcaaactcaccagcacgttgagcctcaaggccaacgaaccgcagaccgtcaagattcagctcggcctgatcgccaacgaactgcctgactccaccaaggaatatgaggcccgttacaccggcgaccttaaggatgctgccgcctcctacaaggattccgtgaccacctacaacaagtggtgggtcgataacgctccctacgtggacactccggaagacaatatcgataagaccgtggtctaccgctggtggctgagccgtttcaacatgctcgacgccaacatgcctggcaacaccttccagtacccgacctccatcgagggtgtgctcggctacaacaaccaaatcgtgctcacctccggcatgttcatgatggacaccaagtggttccgcaaccccgagtactcctacggcacctggctttccgccggcgataccgccaagaagagcaaggcgggctattactactaccacgacaatccgggcgacccggccaactggaaccatagctacacgcagtacatcacgcgcgccggctgggactcctacaaggtgcacggcggtccgtccaccgtggccgaggagctggccgaccagggtgccgaggacgtgcaaggtctactcgcttccaagagcgagccggacaacaacgacaaccagaacaacaatgacaacagcttgattgactggtcctggtggtcgatgaccggtaacgatgccgacgccgtttccttctctgagccgggtcgctccggccagcgcatggatcgcgccgatggttccgccaatatgtgggccaacgccaatgcggctgctcaggcctacaaggccgctggcgataccgccaacgccgagaagatgcaggccatcgccgacaagatccagaaagaagtcaccactgaactgtgggacaagtccgacaacctgctcaagcacaagtggctgaacgacggtgctttcgccaagtacaaggagatcaataactactacccgtactccgaaggcctgatgcctaccggcaacgaagattacaacaaggctctgcgcctgttcgaggattccaacgagttcccgatcttcccgttcttcaccgccaaccaggcggacaaggcggcgctgaacttccccggttccaacaacttctccattatcaacgcacagccgctgctgcaggtctattcagccggcatccgcaattacgatgcagccaagaacggttacatcaccaatgagcagttcaagaaactgctgtactgggtggcgttcgcgcactatcagggcggcgataacaactaccttgatcaaaacgagttctggaacgaggataacaacaacgtcggcgatgtaaacggtgacggcgtgatcaacaacctcgacaagaaccttgacgccgcacagaacggcggcaagatcacctaccgctcctggatccaccacacccagctcggcaccacgaactggacgatggtcgaggacgtagccggtatggtgccgcgcgaggataacaagattgagctgaacccgattgagatccccggctggaactacttcacggtgaacaacctgagctaccacggtcaagatgtttccatcgtgtgggataaggacggcagccgctatggtggacctgctggctacagcctgtacgtggggggcaagctcgccttcacttccgacaagctcgcacacctcatttacgatccgtccacgggcaccgttgaggatgccgacaaggccggcgtaaccatcaccaatgccgctggttctgatatcaaggccgccaaccaggttgccttcaccgccgaccagcgtgtgaccgacctgttcgccaagtccggtgccaacgtcgactccgcttccaagtccaccacgaatgtggccaaggacgcggacgtgaccggtaccacctacgccgagaaggacaccaactacccggccaagaacgcggtggacggcaagaccgtgatggaatcgttctggggtaccaagggttctgagaacaagaccgacacgctcaatatcaagttcaaggacggcaagcagaagatcgacgacctccgcttgtacttctaccagagctcgtccagccagaccatctccggctatgccgagcccgccaactacaagttggagtaccagaaggatgacggcacatgggccccgattgcggatcaggtgcgcaccccgaactacgcgggcgcgaactacaaccgtatccagttcactccggtggagaccacgactatccgcgtcaccttcacgccgcaggccggcatggccgtcggtgtcaaggagatcgaagcctacaacaccggtatcaaggctgacggcacttccgagaaccaggctccgcaggtggatgcttacgtgtcttccagcacctcatccggtgccaagctcgtcggtacggtgaaggatgacggtctgcccgcagaaggcgacgtcaccactaagtgggagctggtttccggccccgagggcggtaccgcgaagttcgtggacgatactgctgccagcaccaccgtcaccttcaacgaggaaggcgactacgttctgaagctcaccgcttccgatggcgagaaggaaggctccaaggaaatcaccgttcacggcatcccctctgacggtaccgtgaacgtagccccgcagtcgagcgcctctgccagctacaccaacggctaccagccgaaggacaacgccaagaaggtcatcgacggtcaggtggtatacaccaacacgccgaacgagacctggaacaactggggcgacaacactggtgtggagccgtggctgcaactgaagtgggccggcaaggtgccactgaagaaggccaaggtcttcttctggaccgatggcggtggcgtgccgatggcctcatcttggaagctccagtacgctgacgctgacggtaactggcaggatgtgaagctggctgacggccagtcctacacggtcaatcagaacgaaggcaacgaagtgaagttcgccgacaccgtcgaaaccgacaagctgcgcgtggtcttcccgaagggcgccatcgtgggtgcttccgagttcgaggcgtacgccatcgagccggtgagcgtggacgaagtcaaccgactggtgcagaccggttccaaggccgatgatctgaagctgccctccaccgtgagcgccgtatacaccgacggttctcgccgtgacctcgccgtcacgtgggataaggtgaccgacgctcagctggccgccgatgccgtattcgatgtcaagggcatcgtcgctggtgcgctgagcggtacggttgcacacatcgcagctcgttccgataccgcattgcagaccgtgggtaatgcgcagccggttgagcagaccgtctaccagaacgccaagtccatcgacctgcccgccacggttccggtgaagttcccgaacggatacaacgacgaccgcaaggtcacgtggaaggatgccgacatcaaggccatcgacctgaccaaggttggtgactacgaggtggctggtaccgtcgacgacggttcgtcttccgcagctgccaagctcactgtccacgtggttgccgacccgaacggttcctccactcctgagcctgagcctgagccgttggtcggttggattgaaggcaaggcgaccaagaccaccatttcgcctgattccgaggcgacctggtcaccggccgaaggcaagctcaacgacggcgtagtcgtcgatgatacttggccgaccacggatgatcagaacgtcaacgacaaggtctggggttcttggggcaaggcaaaggacggcatgtacgcccagtacgacttcggtcagtccgtgaccgttgaccagagccgcgcccagttctgggccaacttcgctgagactgacgattcgaagggtggtctggaagtcccggacgcttggaagattcagtacctcgccgaggatggttcttggaaggatgtcgagcccaccgaggattacaccattgtgcgtaactcgccggcttctcgtgcggataccgatgccaaaggttggagcactgtgaccttcaagccggtcgccaccaagtcgctgcgactcgtgctcactccgcacaccggcagcagcaccttcggggccgccgtggccgagtggggcgtgcatggtattgacggcaccgagcctgaacctaccccggtcgacaagaccgcgctcgagtcggctcttgacacagccaacggcctcgatgcaagccgctacaccgccgcttcatgggctgagttccagcaaatcattgacgctgcccaggctgtgtacgacgatgccaacgccaccgcagaacaggtcgccgagcaggtgaccaagctcgaggacggccagaaggcactcgttgcgctcgccaccgacgtggagaagtccacgttgcaggcggccatcgatgcggccaaagccgaggccgcttccggcaagtacacggataagagtgtcgaggccttgaacaaggccatcgaggctgcggaaggtgtgctcaaggtcggtgaggtcggtgaggtcactcaggccgccgtccaggaagcgtccgcttcgctgaacaaggccgtcaaggccttggaagagaagcccgccgccgaaacggtgaagaaggagtccctcgaggcttccatcgagcaggccaagaaggctgacaagtcgaagtacaccgaggaggcatggcaggctctgcagagccagattgccgccgctcagaaggtgtacgacgacaaggatgccaagcaggccgatgtcgatgccgcacaggatgcccttgacaaggcattttgggccaccaaggttgagcagaagcccggctcccagcagcctggtgtgaccgacactgataaggatgataaggacaacaagggtgatcgtgtgcctccgactggtgccgcggtttccgtagttgctgcggctgccgtgctgctcaccgccgcaggcgtgaccatcctgaagcgtcgccagtccggcgaccacggttcggctcgccactcggcctgacccgcaacggagtcattctgccgagtgagccccctcacagagggggctctagccttttccttctacccatcattactcttttcactcactcaatgaggagcactatgagtttccatgtatccgcgcaatcggttcgcgcggtggccggtggactcgtcgccgcagcgacattgctgtcaggccttgcccttgcgccgaccgcaatggccgccgattcagccaccgctgacaacgcgcccagcgttgccggtcacgcgtataacgaactgccgtataacaatcctgatgtcaccgtcacccaaatcgacaatagcgcactgcccagctacatgcgcaaccccatcgggcagaacgagggtattgacaccccgaacgatctttcgcagaactactactctgcagatgcatccgcgcagagctatgacggcaaactcttcgtcttcaccggtcacgatgaggcttcgcccgactacggctccttcaacatgaaggactggggcgtatacgtcaccgatgaagacggcctgaatcaaggcaaatggacacattacaagaccatcgccaaggcagacctgttcagctgggccaccggcgatggcgcgtacgccggccaagtcgtagccgacgataacggcaccccgagcgacacttccgatgattggttctactactacgtgccggtgaaggacaaggcttctgaggcggctggacaggacccgttcgccatcggcgtggccaagtcgaagagtccgctcggcccgtggaaggatgccatcggcaagccgctgctcaccacatcgcaaacccagattgaaaccatcgatccggcattctttgtggacgaggatggcaccggatatttgcactttggtacgttcggcactcagctcgccatcaagatgaagaaggacgccacaaccggccgcacctcatacaccgaggtggaaaccaaggctgatggcaccacgccgaacctccacaccatgaaggacgcggacagcaacgcgaacggcccgaagggattcttcgaggcggcgtgggtgttccgtaagggcgatacctattacaacgtgtacgacggcggtaagcccggttcgggcacggccacctgcgtggaatcgaactatcaagcttgcatccagtactccacttccgacagcccgctcggcccatggaagtaccaaggcgtaatcgtgccttctggctcggccaccacgatgcacccctcggtgctccagttcggcgacaaatggtatgtgacctatcacaccggcgacaaggaaggcggcaccgatttccgccgtgccgtgtgcattgatgaagtcgattggaccgccgacggccagatggtttccaccgcccatccaaccaaggccgagaaaacgcagccctccaccaacgtggctccgtacgcaaaggtgagcgccacgttcactgaaacgcctgcttggaagggttcggtgaacgacggccgtgtgttgcaaaccgctgtggtcccgccgaatcactggaccaactaccgttctatcccgcaatcgcagtccggcgattctctggtctaccaatgggatggcactgtgcgcgtcaactcgtctaaggtttggttcgacgtggattccaacgctctgcgcgcgcccgcctcgtggaagattcagtacttggacgcggacggcacatggaaggatgtcgccaacccgagtgcctatacaacgaccacaggcaaggccaaccccaacgccgtcaccttcgatgcggtgaccactactgccttaaagctcgacacgaccggtcaagctgtggatggcggctatgcctccgtggccgttgctgaatgggaagtcggctccgactccagcgaatcgccggcaatcactgcgccgaagagcgtgaccaccgccaccggtactgcgcctactctgccggccacagtggatgtgaagtacgggaacccaaccgttgcctccccagtaatttggcgtccagttgatgcttcctcgtatgccaaggtcggttcgtttacggcctacggcgtggtcgccggcgtgcccggtgaggcaagcgagcagggcaatgtgtcggtaaatgtcaccgtgcaggacggctaccagcctgccgctgataccacgaagccgactgtaaccgttgccgttactgctaacgcaggcaatagcgagtggctcaccaccgctccgttcgccaccgtgcaggccacggacgacaccgcacctatcgccaagctggagatttccgctgatcaaggcaagagctggaccaccatcgccgcgaatgcaaacgcggccattgccacgctttcccagcagggcgatgtcgaagtgtgggctcgcgccaccgatcaggccggcaacgtttccgacgtggccaaggccggcggcaaggtggactccgccgcgccaaccgtgaccgccgccgccgataaggaggagcgcacgctgaccttgaccgctgatgacggcaccggttccggtgtcgcatcaattgaataccgcattggcacagacggtcaatgggccacgtacagcaagccgattgctgcaccgagcgcgtcgcgcgccaccgtgtactaccgcgccaccgataaggccggcaacgtgtccgcttcggcgaaaaccgacattccatccgacacttccgtgccgctgaccggctacattgagggcgatgccaccgccaccgatgtggacggcaaggcatccggctgggtcaagggtgccgccgcgttgaacgacggcaagatcattcccgatatcaccattgccaacgaggatgtctggggcacttggcccaacaccggtgagatgcgcctcgactacgagtgggaccgtgaagtgactatcgactctagccgcgtgcaattcacctcggatgatggcggattgggtattccggcatcgtgggaattgcagtactgggacgccttggcgaacaacggtgccggcaacttcgtggatattcccgacgccacctacactgtgaccgccaattcaccgtctgctggctgggccaccggcgatgccaaggggtggtctgatggcacgtggaacactccggtcaagactaccaagttgcgtatggttatcacgtccggctcggcttctccggctgttgccgaatggcaggttcatgccattgacgacagtatgcctgagccgcctgagcccacaccgatcgacaagaccgagctcaagcaggcgctcgctgactcgcctaaggctgacgatgcctccaagtacaccgagacttcatgggcggagtacgcggcggtattggattcggcgcagcaggtgtataaggctgaggatgccaccgaagctgcggtggtggatgccgcaacccagctgaagcaggcagcgaagaagctggtgcttgtagctacggtgcaagatcgtgccgcgctgagcgctcagctcgatgccgctgctgccgtggatcgcacaaagtggactgatgaatcgctggccgtgcttgattcggcagtcgctacggcgaatgcgctgacgagtgatggtcaggccgcccagtctgacgtacaggctgcgactgaggcaatcagcgatgccatcgcgggtctggttgagaagagcaccacgaagcctggccagggtggcgataagcccggttccggcacggacaagcccaaccaaggcaacgattccaaccagaacaagggtgatgcagactccggcaagcacaagaagatacctgacaccggtgcagccgtgcttggtgttggcatcctcgccgtggtacttgctgttgcgggtgtaatcatcctcaagcgccgcaagtccggtacctgctagtcccactcgctcggcctagcatcaccaagcccccgcgcatgaacagcgggggcttcacttttgttcaataacaagcattatgtgcgcgtatgagactacgatggtggggaatctacgaacaggggcagcaatgacggcatacatggaccataaggatctcgccaacgaagttatcgatcaggcgcgcgcacaagagattactgatggtgtgcatcgcgtgcttgaccggattgcctcagcggagtccgcagccgggcgtgctgccggttcggtccaattgctggctgccaccaagacgcgcgatgtcggcgagattctggcggctatcgatgctggtattcgcgtgattggtgagaatcgtccacaggagattactgtcaaggctgacggtctggcaaaacgactgggggagcgtggttattcgctaggcgtgattgatgccgctgaggctgacacggccaatgccgcagctgcaacgcatattcctttccatctcatcggccaattgcaagccaataaaatcggcaaggtgctgccggtagtggacaccatcgaatccgtggattccatcgaactggcggaaaagatcgcccgccgtgccaccatgcgcggcatcacggtcggcgtgttgctggaggtgaacgaatccggcgaggaatcgaagtccggctgtgcacccagccacgccatcgacttggcccagcgcatcggtgcgatgggcggactgcgcttgcagggattgatgaccattggcgcccatgtggatgatgagcgcacgattcgtgcgggcttcgcgcatctgcgccgcacgcgcgaccagattattgcctccggtgccgaaggcacggccgactgcaccgaactgtccatgggcatgacccacgacatgacctacgccatcgaagaaggctccaccatcgtgcgcgtcggcaccgccatcttcggcgagcgcgccttcatctgattggagctatacgaaaaaacgccgcttgatcaatagccaagcggcgtttttcgtaaggattttcggcgtatcaatcacgcatagatattgcgcggacgcatgtcctcgggcaggccgtcgagcagaatcgccacggaaccttcctcgaacacggagcgaatacccgcggccagcagcggtgcgcaagacagtacggtcatattcggcaggcgcttctcttcgggaatcggcacggtgtccataaacacgatttcatgcgcgccgcagtgagacaggcgctccacggccgggccggagagcaggccatgggtggcgaccagcgtcaccgacttggcgccggattcgttcagggtgcgcacggcttcgcagatagtaccggcggtatcgaccatgtcgtcgatgaccacgcagtcgcggccgtcgacatcgccgataatgccatgtgcctcggcatggttcggacgagtaatatcacgctgtttgtggatgaatgccagcggcagattgcctagcttggcggcccactgttcggacaccttgatacggccggcatccggggacacgatggtggtgttgcccagatcaagggtggaacgcacgtaatcgagcagcaccggcatggcggttagatgatcgaccggaccatcgaagaaaccctgctcctgagcggcgtgcagatcgaccgtcataatgcggtctgcaccggcggcgtggaacagatcgaaaatcagacgggcggtgatgggctcacgaccgcggtgcttcttatcctggcgcgagtagccgaggaagggcgccaccacggtaatcgacttggcggaggcgcgcttcaaagcgtcgatcatgatgagctgttccatgatccacttgttgatatcgcccgaatgacactgcagcacgaacacgtccgcaccacgcaccggttcggtgaaacgcacgtacatctcgccattggcaaagtcataggacgtggtttcgaggatttcggttcccaaacattcggccaccttctcagctagctcggggtaggcgcggcccgtgaccaatacgagtcgtttatccggagtgccttcaagaatcgccgacatgc

SEQ ID NO: 2580 - DNA, 22624 bp, Unknown
  R222_15m  MAG No. k141_1652
gagacgcccggtcccattccgaacccggaagctaaggcctggcacggcgatggtactgcacccgacagggtgtgggagagtagcacgccgccgcaccacacgtacaggaagccccgatacccctcaaaggtaccggggcttcccgcatatcaggacacttgcgcgtggggggggggtgtatctcgcgtccttgggccccggcaggagtatcccgtcggggcccagtgcgttttgggcggcaacccgctgaatacccggtaagatgtctgaggtatcaacaaacaggtcaggaggtgacgcgcatggtggcgccaagccgtgatgaccgtagcgtagatgcattggtgaaatccaaggcagtacttgatgtattggcggaactgggaccaagcaccgcaaaaaccataagcgaacgtactggtgaacccgtaagctcaacgtatcgtttgctggataatctcgtcgcagtcggttgggtggaacggggcatcaatcgtggcgagtatcggcttggcatcgattgcgtacgtatcggcggccaaatcgaaagcagactggacattcagcagatcgctcgccgtaccttccgcgcccatcacggccagttcggcatctggggtctgttcgttcggaggcgattgcgcacggtgtgcatcgagacacgcacccgtgagacattgcaaagctatgcacagctggtgggcaatagcttgcctctgagcatgagcgctccctctcatgtactgacggcctggcttcccccggctcgctacgagcagctgttggaacactatgcctataccaacgagctcggcggcacattctccacgatgcgtgccacagcaatgggacaggctcgtcatatacgcgaatgcggcttcacctatgacgtcggccagaccatggccggctccgtgactatcagcgtaccggtattcaatcacgccggagagattcaagcggcaatcgccctgagtggcctttcccgctccttggaacccgagctggcctgtctggtagatgggcaaccggcaacggcatcggctcaagacatggtgcgattggtgcagactgccggccgtgaggtgtcgcgaggccttggatacagtggtgatcatcttggcctgaacagttgaatatgatgagtcagggataagtcaggggaaggaacgtcgacgatggcggaagacaaacgtgaaccgacccgcgctttagacaaggcgagtcgtgtgatggacgcattggcggcggagaatggcctgtcgccggcagatatcgccgacgcctgtgatatcccgcgatcctccgtataccgcgtgctggatggactggtcgatgtggggtgggccgtaacggatacggatggtaactactcattatcactggactggctgcgattggctgatgccgctcgcacgtctcgtgccgaatggcagtctgcgattgcggtcatgcatgccatcaccgcgcaaaccggcatgacctcattcctcagtgtggtctccggcactgaattggtatgcgtggaatgtgcgcaaggtcatgccatcgattcgctgatcctgcgcccgggccgcgtgctgcctctgcatgctggcgcggccggccgcgtggccttggcgtatttcgaggatgccgatgtcgaacgctatcttgcaggagcgccgtttccggcatataacgagaacacgctggtcagtgtggaacagttgcgcgaggatattcgcttgactcgcgaacgtggatatgcactgtcggatgaggatgtgacgttgggtgtcggtgccgtcggtgtaccgattgtggacaacgggtccggtcgcgtgatcgccagcctgtccgccggtggattcgtggacgaagtgttagccactcaagaatccttggccgcgttactgcgcgatggcgtacgcgaaattcaggcagcctgattcggcccgctaggctgtcgggctggacggttatgtccggtcagctatggcctttgccggctacggttctgctggttatgcttctgcccgactacgctgcggtccgttacgcttcggccacacgacccaacgcgatggcggtgatcagcacgtacgcctcgcgcgggtcggtggcatcccagccggtggattcggcggcgcgcttcaaacggtagcggatcgtattgggatgtacgttgagctccttggccgtggtctcgagcgaaccgccgaacttcaggaatgtggagacggtgagcagcgtcggatcatccgggcctgctgctgtcaggcttccgtagaccacgcggaccagttcgtcacgggcgtccgcgtcgccgatcaacgcacgttcgggcagggcgtcgtcggtgcgtaacgggcgcggcaatggctgcacggtggcggccagggccggcgcggcctgaagacagtagagcgtggcctgaatcgaacgcatcgcgccatcggcaccggtgcgctgtggacccaaggcgattggccgatcggcggcgaacgacggggcgatggtattgcagatgatttccggcgtggccgcaccgaccggacgaatcaacgccactacggcggtgctgttgccgatcgggcgcttggcggtcagacacacaccgccgaaatcggccacgattttctcgatttccttggccgtacgtgcggcggaccgggcagggtatccggcgatggtgtaacaatcgaagtcatgctcgaaaccgaggatggtgaacagggactccactcgttcgtcggccagatgattgaacaggcactcgaacagtacggtgcgtacgcggttggtcgcggtgatgccgggtgcggccgaatcggatgaatcgggcgcacccggcataccggatgcaccggacgaatcggcaacgtcggcagcaagaagttcgagaaaatctgacatagtcactagtgtagcgtcgctgattggcgttgcctttcagccaaagactctcgccaatacgtcagcaccacgaatccgaatacaaacgcaaccggcaacatgtgccgctcgaaattattggccggcgcggtaatcatcacgcccatcagcagtagcagcggaatatgggtcatgagggtgagccaacgtcggcgaatcacctcggccgcgccgatcagcaatgtcatcgccacgtagaaattgccgtgcgtaggccagccgagcacgggaatactgccccatacgcgagtgaagccggcgatgtgctcacgccagtcatggttgtaatccttgatccatgtggagtttttctgcacgtaatcgctggccacgtaataatccatcgatacgtacggctgatcgttcacattgaagtatccgaagcatttggccagcaacgcatccagcgcgatgatcggattgtccttgacgatttcgaaccatgccttgttgaaattggtcatatcctcgggcgtcaccgtgcgccacttgtagctgaccttcttggcctgaataccggaggatttcaccgggtcggcatcctgctgggagtaagcgtcggccatctgatcgagattgaagacgggcgcgaggttctttttggcttcgtctgaaataccgtccggattgcgctgagccacgcgggcgatcatttgcagctgtacgccgcggctttcgattggatcgccgccgatgatcgcaccagaggagatggcgaaggagatgccgccgtgaatcagtacggtggggatgagcagtgccacgacgtaagtcgcccagcgtttgcggtcggcgatcagagccagcacgatttgcagagcgatgatgtaccacgcatatttcgcggaaatcagcatcaccgacgtggccaggatgaaggcgatgaagctgtggcacggcaagtggacgggcgtggcgatggcaggggtctgaggatgtttgcgggtgccggcggggtgccaggtctggacgagttcataccagacgctgaaccaccagacgaacgagaacgcgaacagcggcgatttggtgatggagatagtggaaaacacggccagcgggcagaccatgaagaacagcagaatcaggaatctggccaatcctccggcctgtgggggaacggcggaatccgttgccgtttttcctatccaaggtcggttcaggaatcgattggcggcggcagcgcagcagaacacggcgaacagcgtctgcagggcagccaacgtcacgatgccggcatcgtttgagccggtcagatgcctcgcaaacgtgactatcgcgccatagaacacagtgagtaccacattgtgctggtcggtcagatacgtgggatcggacggccacatgtagtgcgcggtggggtagatgtccatcggcacgaaggagaagaagccgatatagggctgtttcaggccggtccactggttccaggcccagctgaattcgcggatctgtgagcggaggtccgcgccgaatgcggccagcagagtggtcggcacccagagccagccgacaaaaaacaccagcataagcttccagaaccggttcgtgccgcgtgtgatccagcggtccagaacagtgacggtggacgtgacgatagcgcgaacggtacgacgggtcttggctggttggctggcctgctgatcggcggcgggccgtgatgtttcgctattctgctgatggtggcgtaggcgctcgccgatggtcttcggcagtatgcgctggcctgctgcgaatcgcgccatcagcgtgatgattccgagatatatcaggaacgacacgacgaatattgcggtattggcccagttccaatgggcgagggtgccgttctcctcgtcccggtacagcgggccgaccgccgagcacagtgcaagccacaggcaggccagcacggccagtgtccagcgcgcggcagcgcccacgcgcgcaagatgcgggtgggactggcggctggatacggcggcaagcttcgcggtggctggtgacgtcatgacaatatatggtagccgcacaggtcaacggttgatattcgatgtctgccgggcatcgccattgttcgcaagccaatacgacggccgggtgcatgcgtgggctcggcgaatgcggaatttccgaagttgtgaacgctaacacgggctgtccggcccaaaatggttgattttgtgcgcttttccgtggaatatcgcgggcaaaaaacggcgcaaccgaggtaacgtagtgtccatgatgattgcattgaaagctgcaacgccgcagctacccagaactacagccgtcgcggatcatgtgatcgccgtggacgaaaccgattcgaccaacgcgctggccgcgcagatgatcggcgacgggtcgttgacgctgcccgaccaccaggatggcgaactggcggtggccgtggtggccgccgaccggcagatcgccggccgtggccgcaatggtcacaagtggatcagtcagcccggccgttgctcgacgatgtcctatgccgtgcgcattccgcgcgcgatcgccaccgacgaatccgtcaatggctggctgcagatgatcgccggactggtcacgctggacgccctgaacggcatgatcgaggaatacggtgccgcgccgaaccagccggactgcttgctggaactcaaatggccgaacgacgtgttctgccacgggctcaagctgggcgggctgctctcggaactggtgattccgccgtcgtccggtactgatgctgatgccgatgacgacgtcgtcatcgtgttcggcgtaggcctgaatctggcgctgggtgcctgttggctgcccacgccgcagtcgacttcgctgcagctgcatgtcacgggcttgccgtcgtttggcgagatgcgcgatgcggtggccgaacgtcaggtcgagggcttccgtgaacgactggcgaagttcatcgcggacccgaagggccaggccgagtcgttgcgcgaggaaatgaaggcggtgtgctgggcgcgcggccgtcaggtcgaggcgcatttcacggacggcaccacgctgaccggcgaagccatcggcctcaacgaagacgcctcactgatcctgagaacacaagacggcacggaccatacggtccgcaccgccgatgtgggagtgctgtaatagccggccagtagctagctagtagctcaggtcagcgaccgagcttggacaggccggcggcggccagagaggccaccacggccttgatggcgtcgccgacgacgaagcccatggaggccagggccacggcggcgagcggcgcaccggtcaacgcggactggatgatgaagccgaaggcgtacaccaccacgacgccgccgaccagcgcggccagcaggtagcggcccgcggtgcgcgcggcggccgcgaaggacgaagtgtcggacttgccgcgcaacagggcgatgaccaccacacccggcaggaagccgaagaggaagccggcgctcgggccgaccagggccagcgtggaggtgccgccggcgaacaccggcaggccgaccgcaccggccgccagataggtggcgacggcggcaccggcctgacgccacggcagcatgagaccggcgagcatcaccacgaacgtctgcagcgtgatcggcaccggcgtgcccggaatcggaatctcgccggcggccgcggacagccacatcagcacggcgaacagcaccggcttccaggatgcggcgacgatacgacgggcgagcggcgtggtggccgctgcggatgcggtggtgtgtgaagtctgcatatcaataacccctatgttgtgtgatatcgccgtgaacggcgggcggtatgcgatggatgaggggaggttccggcgggccgtgcggtatccccgacagcccgaaccgtccatatggtggacggtcccaaatgaatccggccctgtgcgggcgaatcgtgcggcgatggaccgatgccggtccggtcgccttccgttcgcccgcagatgagccttcccccgaacttacggttgccatcgtagaggtgttcgatttcgtgcggtttcgtaccaacttacaaaattgtcgatttcgatttgtcataagttgacgaacgcaaccgtaacgtcaacttcttgaaccggagcgcaaggatgtgcaatcggcggatttgcaacgtttttgatagccggcgccaacggttacgttgccggagcctacgcgcgcgtttgttcgtagcctacaaaagggcgtgaaagcttttgtgcgaacgcggcttgccctctcctctatatggagagcacaatttgacactatggctcatactgtcaaaaaactgctgattgcgaaccgaggtgagatcgctctgcgcgtggtgcgcacggccaaggagatgggtatctccaccgtggccgtctactccgaacaggaccgcaatagccgctatgtggacatggccgacgaggcatacctgctctccggcgacacctacaaggacacgtacctcaacgaggatctgctgatcgacatcctgcacaaaaccggtgcggacgccgtgcaccccggctacggattcctttccgaagtgccgagcttcgcgcagaaggtcgaggatgccggtgccatctgggtgggtccgcaccacaccgcgctggtggatttgggcgacaagatcaccgcccgccgagtggccttgcgcgccaaagtgccgccggtgcctggcctgtccgaaccggtgaccgacgtgcgaacgctgctcgacttcgcacacacccacggctacccgatcatgatgaagcgcactgatggcggtggcggccacggcatcaccgtggtgcatgacgacgaggagctgcgccgcttctacatgaaccacgacgcgctgcaaggcggcgatctgaaggaatacttcatcgagaagttcgtggacaaggcacgccacgtcgagacccagtccgggcgcgactcgcacggcaacttcaccgtgtactccacccgtgactgctcgctgcagcgccgcaaccagaaactcgtggaagaggcgcccgcgcccttcctgtccgaggaaatcgtcagcacgctggaggaatactcccgccgcctgttcaccacggtcggctacgtgggcctgggcacctgcgaattcatggtgaccccgaacggcaaagtgtacttcctggaagtcaacccgcgtctgcaggtggagcacaccgtctccgaagaggtcagcggcctcgacctggtgcgcgaacagctcaatatcgccgccggtggcgagctcacccgcgcccccgaaccgcgcggccacagcttcgaactgcgcatcaccagcgaagacccggccaccaacctgacccccggctccggcaccttggagaagatccagtggccggccggccccggcgtgcgcatcgataccggtgttgaacagggcgacaccatctccccgaagttcgattcgatgatgggcaaggtcatcgtcactgcccagaaccgtctcgatgccgtggcccgtgtgcgccgcgtgctcgacgagctcgtgatcgaaggcgtgcccacgccgattccgctgttcaaggagatcttccgcaacgacgacttcaccgccgagcatggccatccgttcgccgtgtccaccaagtggctggagcgcacgtacctgaaccgcacaccggcttccgccgcctccggccagccggcctccttggccaccgccccgggtgccgctgccccggccgcgcctgacaagtccaagtcggagacgttcgtcatcgagatgaacaaccgccgcgtcaagctcaccgtgccactcgacatcgtggagaacatcaccggctcggcccgcgcccgcggtgccaagcgccccacccagccgttgcgcggcgcaggcttgcacaacgtggcctccggtgccgccacggccaacgacggtgccaaatccggcgtcatcgcctccccgatgcaggccgtggtcacgcgcatcaacgtgtccgaaggccagcaagtggccaagggcgaccttctggtggtgctcgaatccatgaagatggagaactacgtgtacgcgccggccgccggcgaagtgaagaagattttcgttggcccggccgatggcgtggaggccggcgacacgctggtcacgctggacgtgaacgccggcaaggccaaggccgccgacgccaagaaggagggcggcaatgactgacatcatggattcgccggccgtgaaggccgcggctgcggcctcggccgccaacgccgcccagccctcggcccaccagccgctgcgcaccgccgtggtcaaggccgccgaactggcccgcgccgccgaagagcgcgcccgcgacaagcagcacgctaaaggcaagaaaaccgcgcgcgaacgcctcgacctgctcttcgacaccggcacgttcgaggagatcggccgcttccagggcggcaacatcgccggcggcaacgccggtgcagctgtcatcaccggcttcggccaggtctacggccgcaaagtggccgtctacgcccaggacttctccgtcaagggcggcaccctcggcaccgccgaaggcgagaagatctgccgactgatggacatggctatcgacctcaaagtgccgatcgtggccatcgtggactccggcggcgcccgcatacaggagggcgtggccgctctgacccagtacggccgcatcttccgcaagacttgcgaggccagcggcttcgtgccccagctgagcctgattctcggcccctgcgccggcggtgccgtctactgcccggccctgacggacctcatcatcatgacccgtgagaactcgaacatgttcgtcaccgggccggacgtggtcaaggcctcgaccggcgagaccatctccatggccgaccttggcggcggcgaagtgcataaccgggtgtccggcgtggcccactacctcggcgaggacgaatccgacgccatcgactatgcgcgcaccgtgctcgcctacctgccgtccaacagcgaaagcaagccgccggtctacgcctacgccgtcacccgcgccgaacgcgagaccgccaagcgactcgccaccatcgtgcccgccaacgaacgtcagccctacgacatgctcgaagtgattcgttgcatcgtcgattacggcgaattcgtgcaggtgcaggaactgttcggcgcctccgcgctcgtcggcttcacctgcatcgacggcaagccggtcggcatcgtggcgaaccagccgaacgtgctcgccggcatcctggacgtcgactcgtccgagaaggtcgcccgattcgtacgcctgtgcgacgcgttcaacctgcccgtggtcaccctcgtggatgtgcccggctacaagcccggctccgaccaggaacacgccggcatcatccgccgcggcgccaaggtgatctacgcctacgccaacgcgcaagtgccgatggtgaccgtggtgttgcgcaaggcgttcggcggcgcgtacatcgtgatgggctccaaagccatcggcgcggacctgaacttcgcgtggccctcctcccagatcgcggtgctcggcgcggccggcgcggtgaacatcatccaccgccacgacctggccaaggccaaagcctctgggcaggacgtcgatgcgctgcgggccaagtacatcaaggagtacgagaccagcaccgtcaacgcgaacctgtcgctggaaatcgggcagatcgacggcatgatcgaccccgaacagacccgtgaggtgatcgtcgaatcgctggccacgctcgccaccaagcggcgcgtcaagcgcaccaccaaacaccacggcaaccagcccctctgatttctgaagacatcaaccaaacacaagtaaggaaagcaatgaccaccttcttcctcaatcgcctggccaccgagccccatgcgctcgccttcgccggccagtccaccccgtggccggtagccctggcagaccagaccaccgatcccagccttgacgaggccctgcgcggccatatcgccgcagccaaccgactgctcaccccggtcgccgccgacctgctgaccaccaccggccgtccggtcgacctgttcggcttcactccgaacccggcccgcctcggcgccgcagccgacgccaccgcgtccgtggaaggcgtggcactgacccagctcggcgccctgctcgacctcgaacacctcggctacagcgtggcccaggccaagccgctcgccgtgctcggccactcccagggcgtgctcgccgtgcacatggcccgcgccatcgaggccgccggctccatcgaggccgccggcaagaccctcgacgagattctggccgtcgccgccctgatcggtgcagccggcactcgccgcgtgcgcgaactgggcctgaaccccaagtatggcgaagccagtccgatgctctccgtcaagggcgccacccgcgaacaggttgaggctctggtcaagcgcgtgaacaacgcccgaggcccgatctccatcgccgtcaccaactccgacaaccaccacgtgctttccggctacccggaagacctggcagcactcgccctcgaagccgagcgcgaacaccagcatcaggccaagctgcgcgagcagaagctccacggcggcaccgtgttcaacccgaccctcgaataccttgaggtcaccctgcccttccactctccgctcatggccgaagccgtcgagcagaccgtggcctgggccggcgcctgcggcttcgaccagaagcgcacccgtgcgcttgccgaggaagtgctgctcaaccatgtggactggaacgcccgcgtcaaggcgctgttcgacgccgccgacccggccaagctgtggattgtggacctcggccccggcaacacgctcggcaagctgatcggcaacgtggtgcagggcaccggcatcggcgtggtcgaagccaccacgctgtccgaacgctccacgctctccacgctggaaagcgagcctgagcgcacccagaactggaaggcgttcgccccgcgcgtcatcaacaccccggccggcgccaagctggtcaccaagttctccaagctcaccggcaagccgccggtactgctgcccggcatgacccccaccaccgtggaaccggaaatcgtggccgccgcggccaacgccggctactgggccgagctcgccggcggcggccaggtgaccgccgaagtgttcgaccgccacatcgccgccctcgaagacgagctggaggaaggccgcacggtcgaattcaacgcgatgttcatggaccgttacctgtggaacctgcagttcggctcctcccgcatcgtgcccaagaagcgtgcttccggcgcgccgatcgacggcgtggtcgtctccgccggcatccccgagctggacgaagccgtggccctgatcgagtcgctgcaggcggacggtctgccgtacgtgagtttcaagcccggcaccgtggaccagattcgccaggtcgtgcgcatcgccaaggccgtgtcccccaccaccatcatggttcaggtcgagggcggtgaagccggcggccaccacagctgggaagcgctggacgacctgcttgccgccacctacgccgaagtgcgcgcctgcgacaacctcgtgctggtcgccggcggcggcatcggcacccccgaacgcgcggccgactacatttccggccagtgggcccacgcctacggcctgcccgacatgccggtcgacggcgtgcttatcggtaccgccgcgatgaccgccaaggaggctcacaccagccccgaagtcaagcagctgctcgtcaagacgcccggtattccggccgacgccaagtccgacgacgtgttcgccccgcaggccgcccactgggtgccgtccggcaagtccgtcggtggcatgtcctccggcctgagccacctgcacgccgacatttacgagctcgagaacgactccgccgaatgcggccgtctgctcgtgcgcgtcatgaagcaccccgaagagctcgactcccgccgcaaggaaatcatcgaagccctgaacaagaccgccaagccttacttcggcgacctggcctccatgacctaccttgagtgggcgcagcgcttcgccgaactcgccttcccgtgggtcgacccgacttacgccgaccgcttccagcacctgctgcagcgcatcgaagcccgtgtgaacgacacggactccggcgaattcacctccaagctgttcgccgctgatggcgtttctgctgaagaggcagctgccgctggcctgctgacccacgacgacattctcgccgacccggcccccgcgctcgaaaagctcgcactggcctacccgcagaccgccgaactcaaggtggtcccaaccgacgtggcttggttcccggtgctcgtgcgcgaataccccaagcccatgccgttcgtacccgtcatcgacaacgacctgctacgttggtggggtcaggaccagctctggcagtccgaagaccagcgctactccgccgattccgtgcgtgccatccccggcccgatctccgttgccggcatcaccaccatcgacgagccgatcgccgacatcctcggccgcttcgaaaccgccgccatcaagcgcgtgcaggacgaacagcaagccgccgatgccgctgagaacgacgatttcgccgcacttggcgaggccaccagcgccgaagacttcatccgcaagtccccgaacatctcctgggtcggccacatcaccgacaacccggcctacggcaccgccctgggcgaccagtactacgaaatccgcgcgtttgacgccgcggccggcaagtacgatctggacatccacctcgacacctactgggacaacgacccggacggcggcacctccaagcacgccgtgcgcgatatcgtcatcccgctcatcgtggaaggcaccgagcctggccgtgtgccggtcgtggaccgcgaacgcctgattccggacgtctacgcgatgctcgccgccaccgcaggcatcggcaacaccgccatcaccggcgacaagctcaccgagatgccgaagcttgacgacaagacctctgacgagcgtccgttcggtaccgcaaccgcaacctacaccctatccgccaacctcggcttcgaccacgaagcggccactggcgccgctctgccgaccaccctgcagcccagccgcatcgcccccgatgcgctggtcggccctgcctggccggcaatctacacggcgctcggctccgtgtacgtcaagggctacccggtgattgaaggcctgctcaacgccgtccacctcgaccacctcatcgaacttgaggtgaacgaggaggacctgctcaagcacaccggcgaaaccatcaccctgaagtcttgggccgaggattacttcgagtccgcctccggccgcgtggtcaccatccacgtgacccacaccgccgccgacggcacgccgcttgcccgcgaaaccgagcgtttcgcgatccgcggccgcgtctactccgatgctttgcctgcagacgcccccgagtatggtggtgccctcctgaataaggaagcggatggctccgtcgccggacagtccactggactgtccgcctcctcgcgcggcctgcaagtagtgcaggccactccgcgccgtctgctgcgccgcgtgaaggtcgtcgccccacacgacatgaccgccttcgcccgcacttccggcgacttcaacccgatccacacctccactcgtggcgctcgcatctccggcctggccgccccgctcgtgcacggcatgtggctgtccgccaccgcccagcacgccgtgcaggcgaccgacgagaagggtgcccactacgagattgccggctggacctacaacatgtacggcatggtccagcttgacgacaccgtcgaaatctccgtcgagcgcgtcggcaaagtgcgccacggcggcatgaccctcgaagtcacctgccgtatcgacggccagctcgtctcccgcggcaccgcactggtccgtgcgccgcgcgtcgccttcgtctaccccggccagggcatccagaagcagggcatggttctggacgagcgcgccaagtccgccgccgcccgcgacgtgtgggagcgcgccgacaagctcacccgctccaagctcggcttctcgatcctgggcctcgtgcgtgacaacccgaaggaactcaccgccaacggcgtgacctaccgtcaccccgaaggcctgctcaacctgacgcagttcacgcaggtggcgctcgcgacggttgcttttgcccagaccgcccgtctgcgcgaagccggcgccgacatctggcccgcctacttcgccggccactcgctcggcgaatacaacgcgttgtccgcgttcgccgacgtgattccgctggaaaccgtgctggagctcgtgttccaccgtggttccaccatgcaccacctcatcgagcgtgacgcacagggtcgctccaactaccgcatgggtgcccttcgtccgaaccagttcggtgtggacgacgcgcacgtcaaggaatatgtggaatccgtggccaaggcgtccggcgaattcctggagattgtgaactacaacctcgccggccagcagtacgccatcgccggtacgatcgccggactcaaggccctgaaggccgattccgcccgccgcgtggccgcattcggtggcaagcccgcgttcatgctggtgcccggcatcgatgtgccgttccactccacgctactgcgcaagggcgtgccggaattccgcgacaagctcgacgcgctgcttcctgcttacatcgactaccgtggccgtctggtggaccgctacatcccgaacctggtggccaccccgttcgagatgaccaaggaattcgccgccaagatcctcgaagccgtgccgtccgaacgcatcaaggccgtgctcgacgacccggccgtgtgggattcctacgccgccgacgaccagaagctcggccgtctgctcttgaccgaactgctctcctggcagttcgcctccccggtgcgttggattgaaacccaggcgctgctcttcggtcagcgcgaacagggcggcctcggcgtggaagaatacgtcgaagtcggcctcggcaacgccccgaccctggccaacctcggtaccaagaccctacgtctgcccgagttcgccggcaacgatacggtcgtctacaacgtcggccgcgatgaaggccgcgtctacatgaccgacaccgattcgctggttcccgacgacgagccggaagaggctgcggcctcggcctcggtcgaaaccgctcctgccggtggttccgccgtcgccaagctcggatcgggtgctgctccggcaaatgccgcgactgaggctgctcagacaacggatggctccgtcgccggacagtccactggactgtccgcctcctcgcgcggcctgcaatcagggcaggccgctgctggcgcaccgtctggtgccgccgtcgccgacctgcccttcaaggcttccgatgccatcggcgtactcatggcctactccgccaaggtgcgcctcgaccagatcggcagcaacgacaccaccgacaccctgaccaacggtgtctcttctcgccgcaaccagctgctcatggacatcagctccgagctgggagtcgccagcgtggacggtgctgctgaagcgacgctcgacaagctcgcccaaatcgtcaacaaggccgccccgaactacaagccgttcggtgccgtgctctccgaggcgctgcgcgaccgcctgcgctcgctgttcggtgccgccggcgtcaaacagcagtacatccgcgaccgtgtggccaacgtatggcagctcggcgaaggctgggtggccagcgtgctcgccgcactgctgctcgacactcgcgagggtgccagctcccgtggcggcgatctggccaagctgcccaccgccgccgtgcagaacaagccggaagccgacaagctgatcgatgcggccgttgagatcgtcgcccagctcaagggtgttgccgtggccctgccgtccgccggtggtgccgctggtggcgctgtggtcgattccgccgcgctcgacgccttcgccgagaaggtcaccggttccaacggcgtgctcgccgccaccgcccgcttcgtgctgaacgagctcggcgtggccgctccggctccggaagaatccgaggacgagaacgccgccgtcgtggccgcggtcgaagccgaacttggttccgactggcccaagcaggtcgctccgcgcttcgacgccaacaaggccatcctcttcgatgaccggtgggcctccgcccgtgaagacctcgcccgcgcctactacggcaacgaccccgccgccttgaacggcagcttcatcggccttggcaagaccatcgccgccgaagcccagtggttcgccaacgagtcggagagcgaggagcttaaggccgccttccagaaggccggctccgaggccctcgaacaggtcgcttccaacaagaacgcctcccgttacgcgaatgatatcgccatcgtcaccggcgtgagcccgaactcgattgccgctcaggtggtcgaaggcctgctcgcaggcggtgccactgtggtggccacttcgcacagcttcaagccgtccatcaaggcttgggccaagcaggcctaccgcgagcacgccaccggcaacgccaagctgtggctggttccggccaacctctccagctaccgcgacgtcgacgctctggtcgactgggtggggcacgagcagaagaagacctccggtgccaccaccacgattctgaagcccgcgtgggagccgaccctgttcttcccgttcgccgctccgccggtccatggcacgctcgccgactccggcgacctgttcgaatcacaggcgcgactgatgctgtggggcgtggaacgcgccatcgccggcttcagccacatcggtgccgacaccaacgtgcagcacaagctccacgtggtgctgcccggctccccgaaccgcggcgtattcggcggcgacggtgcctacggcgaagtcaagagcgcctttgacgccatcgtcaaccgtgcccgcgctgaaaaggtgtggtcgagccgcgtcaccttcgctcacccgaagatcggctgggtgcgtggcaccggcctgatgggcggtaacgacccgctggtcgccgtcgttgagcgtcacggcatccacacctactccaccgcgcagattgcggccaagctgctcgacctgtgcactgccgaatcgcgcgagcaggccctcaaggccccgctcgatgtggacctgaccggtggcctcggctccgagcccatcgacatcaaggcgttgcgcgcggaggccatggccgatgcggagaaggaagctgctgcggcctcgtctcaggaaacggatggctccgtcgccggacagtccactggactgtccgactcctcgcgtgggcagcaaatcaaggcgctgcccaccccgatcatcaccaagcaggcttcggtcgacctcaacgactggaccaacgtcaccgccaagccggaagacgaaatcgtcatcgtttccgtcggtgagctgggcccgtggggctccggtcgtacgcgcacccaggccgagctcggcatccactcggacggcactgtcgacctgagcgccggcgcagtgctcgaacttgcgtggaacatgggtctgctgacttgggccgacagcccgaagcccggctggtacgacaccgacggcaacctggtgcccgaagaggacatcgccgagcgctaccacgatgaggtcgtggctcgctccggtatccgcccgttcgaggaaggcatgggcaacgactacaaggacggtgccgacgaagaagaagccgaggtcttcctcgaccacgacgtcaccttctctgtgcccacccgcgaagtcgccgccgaatacgtcaagttggacgaggctcacaccaccatcgccccggatgaggaatccggcgaatggaacgtgacccgccacgccggctcgatgatccgcgtgccgcgccgcgccaccatgacccgcacagtcggcggccagttcccgaagggcttcgacccgacccgttggggcatccccgcttcgatggtcggcgacgtcgacaagatcgccctgtggaacatcgtcaccactgtggacgcctatctgggcgccggcttcaccccggccgaaatcctcgagtccatccacccctcgctggtggcttcgacccagggcaccggcttcggcggcatgatgtcgatgcgcaagctgtacctcgaccgcttcctcaaccacgagatcccgacagatatcctgcaggaggccctgccgaatgtggtcgcggctcacgtgatgcagtcctacatcggcggttacggcaacatgatccagcccgtctccgcctgcgccaccgcggccgtctcccttgaagagggcgtcgacaagatcgccctcggcaaggccgacttcgtggtcaccggtgcgatcgacgacatcggcgtggaatccgtgatcggcttcggcaacatgaacgccaccgccaactcggaggaaatgtacggcaagggcatcgacgcgcgcttcttcagccgcgcgaacgatcgtcgccgtggcggcttcctggaatcccagggcggcggcacgatcctcgtgacccgcggtgacatcgccgaaaagctcggcctgccggtcgcggccgtggtcggcttcatccactcctacgcggatggtgcccacacctcgatcccggctccgggcctcggtgccctggctgccggcctcggtggcaaggactccaagctcgtgcacgacctggctaagctcggcgtctcagccgacgacatcgccgtggtctccaagcacgacacgtccaccaacgccaacgacccgaacgaatccgagctgcacaacacgctggcccacgccatcggccgcaccgacggcaacccgctgttcgtgatctcgcagaagacgcttaccggccacgccaagggtggtgcctgcatcttccaggtcaacggtctgacgcagctgttcaagtccggcgtgattccggcgaacgcagcgctcgattgcgtggatccgaagctccagcgcgacgaccacatggtctgggttaggaagcccctgcgcatcggcggtggcgaggacgagttcggtcgcgagaccgctggtcgcccggtcaaggccggtctggccacctcgctcggcttcggacatgtttccggcttcgtggccctggttcatccgggtgccttcgaagcggccgtggccaaggccgatggcgaggccgcgctggaagcctggcgtgagcgtgccaacgcccgcctggccgccggccagcgtcacctcgaggaaggcatgatgggtcgcgccgcgctctacgagccgatcgacaaccgtcgcttccgcgaggatcaccgtggctacgaccaccacgaggtcgaaaaggcgatgctcctcaacccggacgtccgcctcggtgccgacggctactacgaggcctgattcctctggctcccctcggttgatgggagccagtagcgcaccggatctcggctcccctctttgaggggagctcccgcgaagcgggtgaggggagtttcccctggagctttctcgctggcacaaactcagtgagagaaatatgcagaacatacgaaagcccctccctcggagtgagctttctgcgtttcaaggggctgatttggcattcgccggaggtctacttccgtttcaaggggctgttgcccaagtagacaaggcgtaaaaacggcggaatggcgttggcgttatgctgcggatactcgtggtatggaggatgaccagccccttgaaacggaagtagacctccggaacggtcaaaatccgcccctcgaaacggagatagacctccggggcggggcgcggatgtttttttggacggctaggcggccagcccaagatgtttgcggtgttgcgcgaggtcatccagcctagtgaatcttttcccccgaaatggaaatcaggccccaattctgatgaggtgtagagattacgcgcgaagcggtacacaataggaagcatgaatacttgtggtttggggcatgacgtggtggatgtggccgcattcgccgaacagttggcggagccggggtctcgcatgcgtgctctgttctccgtgcgtgaggtgcggcaggcatccgaccgcgcgcgccagaagaatgacggggaggccgtgcatctggccgccaagtgggcaggcaaggaggcgttcctcaaagcgtggtgcgattatcttggcaatgccccctatccgttcacgcttgataatttcccgtggcctgaaatcgagatcttggatgattcccgtggtgtgccgcatgtgtctctgggtaagggggcggcgtcagtcttccaaactgattacgcgaattcggctgccggcgctcgctattcctctgcttattcccctgcttccgataacgggccttatgcagtgatgcaggagcggcggaatgcgcgttcggcgcagcgctcggctctcggtgcggggtcgatgccgcatatccatatttccctgagccacgatggtccgattgcctccgcggtggtgacgatttctgtggaatagcgcccgaggcccccgagtgctacatgctgtacaacgtctccatcatggttaacctgtggagcgcgctcaccggccgcgacgtgcgcctgctcaagaaccagatcgacaagctcgactcgctgcccgaaaactgctggttcgtgattctgaatgcgatgggcgccgacctccaaccatacgagtcccagctcatccatttgtgatttcgacggtttccagctcccctctctgaagggagctgtcgccgtaggcggctgaggggagtcctcggcaaagccacaatccatcaactagattggctggtcctgctgcagccacacgcgtttgccatccccgaagaaatatgtataataactcaagtcgccaaaagcgacgcttaacgcggatgtagctcaatggtagagcctcagtcttccaaactgattacgcgggttcgattcccgtcatccgctccactatttatatgttggtgtatctaattgggaataccggaagggtgagctaccccgagtagtattagtactcatggtgttgagaatcgacgaagctgaactgcgtgccaagctctttgagcacaaagagcagattggtttcgggccgattgccaatggggtcgtcatcatcatcgaaggattgttttacattcctgctgctctcacatctggactcgaccaaatgtttcaaggattgctccttgcattgagcattatcttcatattctatggagtatggagtttgattactgcttgcagaaataagtatgatgccataacactgtatgaggatatcgccaacatggatagaaccgaacgaagaagctcgatcattgcggtgaaagatgctaaccgatatcttctgtatcgtgatttaggttggggaagcgactttttccctaatcatgcaaccgcaagcagtactgatgaggatgttcgtcagctgacgacgtattttgccgatgaattcgaaattcctgctaaagactttactctgtctcacatttgtgtgaaggattctgagaagccatccacggagcatgatggagagattcgttattacgaatacacgctataccgcgctagcgtaacggtaatgcctgacgcctggcgttccactgagttccatgttggtgccaaggactgccgctggatgactcttgatgagatgcttgccgaccccggcatcaacaaa

SEQ ID NO: 2581 - DNA, 105256 bp, Unknown
  R222_15m  MAG No. k141_2521
gctgacggcttcgcacaggccgacgccgcccgcgtgagggcagaccttgacgccgaacttcttggcgagcaggtattcgaggacgatctcctggggaccggcgactcgggtcgcgtcaatctgcatgaccttgaagctgccagcctgcaggtactgcttgtacatgactcggttctgcatctgttcgccggtggccaccggaatcggatcgatggccttctggattgcggcatgtccaagcacgtcatccgggcaggtcggttcctcaacccatgcgaggtcgtagtccttgaatttgccaatccattcgatggcctgcggcacatcccagacctgattggcgtcgacggcgatggcgatgtccgggccgaccgcttcacgggcgagcttgagcctgcgcaggtcatcctcgaggttctggccgaccttgagcttgatctgcttgaagcccatgacctcggtctcctgcttggccaggcggaccatcttctcgtcggaatagccaagccatccggcggcggtcgaatatcccggataaccgacttccttgaggtgggcgatacgctccgccttgccttcctgggcggcgcgcaggatatcgatggcctcctgcgcagtgagggcgtcggtcaggtaacggaagtcaagcgtcgcaacgagctcttcaggctccatctcggaaaggagcagccagagcggcttgccggcgcgcttggctttgaggtcccacagagccgaaagcacggcgccaatggccatatgctcgacgcccttctcagggccgagccagcgcagctgcgaatcgcgcacgaacagatcccacgcgagacgcatgttgtcgagcagttcctcgacgttacggccgataagggtttcagacatggagtcgatggctcggacgacgacatcattgccgcggccgatggtgaagacgaatccgttgccggaatcaccggcatccgtgctgatgacaacataggcggaggaataatccggatcagggttcatggcgtcggagccggagaaggtggccgacgtcgggaatcggaaatcataggtggtgactttggtaataacgctcacgatgcgcttccttctttggaaaatggttaatctcaaaaagggaggacggccattcggccgccctccctagcagtggcgggccggatgtcagtcggcgtcggtggtgaccttgaagccgttgtcctttgcgtaggtcttgagcttctgctgagccttggccatagcgccgaccatgtcaccgccaaccttcatttcaggagtgatgacatccttgtatacgactccaacctgagacatgaacggaagatactcccaatcagtattgaccttgtccatggactcgaagtagacggagttcacgtcagtattgacaaagtatccatctgtttccttcatgttgcggatgtcttcgctattttggtaagcagaagctgccatgaagtagttgccgtggttgttatcctgccaagactgaattgcttccttgtcggaatcaagccaattgatgaaggcaagggctgcagcctgcttgtccttagggcatgccgcggaaacactcatcatggagccgacggaagaagacttgaaatcatcggcagaatcaccgaatgcaggtggcagcgttacctgaatcagacccttaagagatggattctgtcccttgtaggagttaccttgccagttctgagaaatataagtggcataggtgccctcattcgtggcgcggttgaacgcatcggtccagcctggagcggcctccatgaccccatcctgaaggcacttttgcaggaattcaatgaactccttggtagtgccagaagtcatgctcaagctgatgtcatcgacagaattgaccttccaagggcgcgcaccagccgaacgcagcaaatccgtaaagcaggagatatcgttattgatgaggacgcccatgtacttgctgggatcttccttgtgaagtttgacgccttcttcatagaattcctgccaagtggttggcaccttgagattatgctcgtcgagaatgtccttacgcacatacatggccaaaggagtggcgtcagtcggcacgccccacaggccaccagcataatgcacctggctccaagcggtctttgcataaagcttgctccacgccttttcgatatcatcgttggcgaaattcagcagagctccagaaatagcgtactgttcgaatcggtcagcactcatctgcacgacatccggaacatctttattggcagcaacgacattctggaacttggtgaaatggtcgcttgccgcgccggtgttggtgaatttaattttgatgtgcgggtacttcttctggaaagcttcaatcggtcctgccatctgcttcccggagaatccccatacgttcagctcgatttttttggaagtatcggtgagagcgttgttaatgtcttctacagtgactgcagttttagtgtccttggcaccagtacttgagccacaagctgcaacgctggctaccatagtaagcgccgccagcgcactgacgattttggtcatcttcttcatgattactcctttgtgtgtcatgaatcactgtcttattgttgttcttcaaatggatgtggatgccgcacggtcattagagcaacgaatgggtgatcgccaataaccgtgcggcgaggattcactgcttgactgcaccagccgaaaggccagactgccagtacttctgcaggaacatgaatgcgatgatcaacggggcaactgcaatgaggcatccggtgacaatgtagttgttcggaatctgaccgtccgcggtaccttcggcacccatcttcaaccacatgttcaaaccgaccgtcatcgggtagtcgttggtgtccgagagcatgatcagcggcaggaagtagttgttccagacaccgaccagcgtgaacagcagtacggtgacgaaacctggagacagcagcgggaaggcaaccttccagaagatggtccacgaatttgcaccatcgagcttagccgcttcaaggagagaagtaggcaccgatgtttgcgcataaataatcatcaggtacagtccgaacggcgtggccagctgtggaataatcactgcccatggggtaccgaccagaccaatcttcgagtacatgaggaacagcgggacagagatgaccgtggccggaatggacatgaatgccaaggtgatcgccaacagactattacgtccggggaaccgcattgtggcaatggcgtagcctgcaagtgtagcgatgatagtggcaccaaatccggcgacaactgcatacatcactgtgttaagcaaccaccgtgcgtatgtaccatgctgatatgcaagagtttcctgaacattctgccagaacacattcttgtcatcgaaccacagaccaaaggagctaaacatgccctcgttggtctttgtcgcagagaagaacacccacagcaacggcacgagacagtagatgaccatcaggcccatgataatgtgcagcagccagttaagcacacgctgcttgccggtcagctttggagctgcctcacgctgctgcatacgcttatagcgttggctcgccttgagcgccagcttagcgtctctgcgctgcagcgacttggaacgtggttttgcgattgcttcactcatcacttgttctcccacttattgccaatgaccttcacgactgcgacaagacccataacgatgacaccaatcaccaaggagaccgctgcagcatagttgaggttctggccgttgaacgcaaggttatatgcgtagagattcggcgtgtagttactggtgatcacattcggcgcggaattcatcaagatgctcggttcgttgaacaactgaagcgtgccgatcaccgagaagagcacggtcatcataatggatcccttaatctgcggaatctttaccgaccatgcgatacgcagctcggatgcgccatcgatacgagcggattcgtacagctcgttcggaataccgatcagtgcagaataataaatcagcatgttgtagccaagagaacaccaagtgcagatgtttgcgatggcgaacagcatgagcttttcagaaagcatgttcggcgcagtggccccgatcatagacgcaatctggccgacaaggccatacttgtcgccatagatatatccccacatcagtgctgcgatgacgcctgggacggcataaggcaggaacagcaggattcgcggcactgcgatatggcggattctctgggaatccagaatgagcgccgccacaagggaaaggatcaaattgagaggaatctgaatcgccgcataaatcagcactcttctgaaaccgctccacagcgcttcatccttaaatgcagctatgaagttgtcgaagcctgcgaatgtggtgccgccaagaagggactgcttgaagaagctgagataaagcgcgtagaacatcgggatgatcatgccgaataggaagaccaccacgtatggaagacaatataacatgcctatgtactcgcgcttcggcttgcgcatcccggaagtatccggtttcgccgttgcatttgtcatagtttttctctttcttcttaacccgtctgaatgagcccgccaacaacatcgttgccattgccgtttcattcatcggtacgttcaatatacaaggttttacaaaaaagagcaaataaaacttcgttgcgcgtggcgaaattttctttatcttgttttttcgccttaaaagggctttattgcaacgatatgcacaaatcgtactcatcgaagaaacagcagccaatccatgtctacaacacccatttccgctatatagacagcaatacgccgataaaaaagctgttttagagtagcgaaaatttcgctactctatatataacgctttttttgcagcgtcgcatacgaaaagagaagagtcatggccacaatcaaaacaacaaacagaccgaaggtctccgacatcgcccaagcggcgggagtatcccccgctaccgtgtccaaggtcatcaacggccgtgatggagtctccgacgagacccgcgatagggtggaactgctcctcgaagaagccggattccgcaaaaaacttcccacaacaaaaaccatacggtcaatcgaactggtcgtcagcgaaatgaccaacaacggcaccgtggaaatggtcaaggagacagcttcatacgccagagattttggcctcggcatcaccgtaagctgcgccggaccggattccggagaatacgcaacaagaaacgaggccagcagctgcctccgtaacgccatcgaacgcaacccactaggcgtcatacttctcttatcgaatatctcatcggccgaggaatcgctgctgcagacgaggaacatcccatatgtaattgtcgatccggtcggccaggtctccgctgacgcattgggagtgggcattgataactggaccgggggaatgctcgccacgcaatatttcatatcattggggcatcgacgaatcgccgtcatcactggccctactaattcacagtcctcgcaggcgcgactgagcggatacatggcggcgctgcagaaaaacggcatcagcgcggatccacatctcatcaaggttggcgactacgtatctgacaaggcatacaaggcggcatgcgatctcctggaaatgagggagcaggaccgaccgaccgccatcttcgcgttcaacgatctcggcgcgatcaacgtctatcgcgccgcccgacagcacggcatcagtctgcccgaacaattatcgatcatcggtttcgacgatgtctatcctgcggcaagcatgtgtccatccctgacgaccatcaggcagccattcgacctcatcgccagacaatgcatcaacctgattctcgaagcgcgggaaggaaaggtggaacagaattacttcatttttcccacgcagcttgtcgaacgcgaaagctgcgtatcgccagcacgtccgtaactcagcaacggaacacagaatcagcttccacgaagcacccatgcatatgcaatccgtctctggcacaagcatttacttctgtttaccagatgaaaatacaatatcgtgcgattacggggggcgcagccctagcctcagctggaggtcaggaaggtttcgttgcctcgggtgaagtcgaggacggcaccggcgagttggacctcgtctgccagttcggggtcggcagccagaagctgctcggcacgggtgcgggcgtcggcgatcatgtcggcgtccttgaccacgcgcaggagcttcaggctggacttgccgccggattgggcgtcgccgagcacatcgccggcaccgcggaattccaagtcggcttgggcgatttcggcaccgtcgagcgagtggtgaatcacttcgagccgttgctcggccggggagccgggttccgcacgggaaataaggaacgcccacgagttggtgccgccacgccccacgcggccgcgcagctgatgcaactgagagaggccgtatcggtcggcatcaaagatgacgatgcagctggcctgtttcacatccacaccgacttcgatcaccgtggtggacaccaggatcggagtctcgccgccggcaaaatcggccatgacctgggttttgacgtcatccttgtcgcggccggtcagagtcgcaaaccgaatgccttggaattgcgggagtttctgcaaccggtcggcgatttcggccaccgcatgcaatggcgggcgagccacggtttcgccgttttcgtcgaaggtttcgtaggggtcgtcgatgccgatggcgtcggccgccgcgcgcgttgcacggccgcccgcagctgtgcgggcactggaaccagatgctgcggcgcgtccgcgggcagaaccggctgctgccgaaacgccggaaccgccttcgttcccctcatcatccgcatcaatgcgcgggcacacgatataggcccgctcccccgcgtcgactcgcgcgcgaatgtgcgcgaacatacggcccatggtggcggcgtcggcctcattgaccaccacggtgcgaatcggtttgcggccgccaggcaattcggtgagccaggaaatatcgagatcaccgaaccaagtcatggcggcagtgcgcgggatgggcgtggcggtcatcaccagtagatgcggcgtggtgccgtcatcggttttggcgttgagactttcgcgctgctccacgccgaaccggtgctgctcgtcgattaccaccaaggccaagtgcggggcttggaaggtcttggaaaacgccgcgtgcgtggccacgataatgcccggctcgccactggacgccgcagcaagtgctttacgtcgcgcagcaagcttcatgccgcccgtcaacaacgtgactggaatcgctggcttgagttgctccaccatccggccaatggtttcggcatgctgctcggccagcacctgagtcggggcaacaagcacggcctgatagccggcgtctacggcttggagcatggcagcgagcgccactacggttttgccggagcccacctcgccttgcagcagacgctgcattggccagtcatgagccaaatcggcggcaatatcatgaataacctgctgctgccctgcagtgagggagaacggcagggatgcgatgaactgatcgcgcagactgtcggttaccaacgggcaagagtgagccgcggatttatgggcgtgcgacctggctttaagcagcgaggtctgcgaaacgaaagcctcctcatagcgcagggttccgatggcctccttgaaccgggtcgtggaggccggatcatgaatggccaggaacgcctcagcccgatgcatgaggttcttggccttgcgcaccgattcgggcagcacatctgggatggattgggagagcgcctcagcaccggattcggcggtcgtgccggaattctcttccccgttttggacggcgatggtgtcggtcgcgggagccacaatgccggctgacccagcgccagcgagttgcccgtcaggcgtggatgacgtgcgggcccccatcatccacagcaatcccagaatcgtctcatgaatatgttcggacgagatacgcgaactggcgtgatataccgggcggggccggcagacgcgggtaagcgcctcttgcacggtatcggcgtcgtatttcagcgcggccccggaagaggcagccgcggccggcggatacgcggactgcacactggcatacggatcggtacttcccgcaaacgcaccattgccggatgccgcaccccgagcgtaaccctcaagccccgctcctgctccggccgacccgggcgcgacagtgaggatttcggggtgcgtgaattgcagctgccccatgtattcgctgggcataccggagaccaccacagacgtgccggcgcgcagccgcatgctgacccaatccacatacgatttacgatacgaaaagaacgtgagccgggccgtgctgccgggtacgcgacgcgaacgggcaaagtcggcgtcgtcaaccgtcgcctcgagtcggtagccgcggcgagcgttcatcggcaccacgcgcatgtctcgtatcacggcggcaaatgccatctgctggccgggtgcggcctcgcggatggcgcgaagcggcaccggttcggtgacgcggaagggatagtaggtcagggcgtcgccgacagtgacgattcccagcgatttgagcgcggacacgcgacgcttgttggtgaccagcgaagcgagagtggtgtccatagtgatgctcatattggcctattctattcgcacggcctctttagaccgcagaaacaacaaaacccgctgagccgaagctcaaacgggttttgctccacgttagtacgcgattcacgcggccacgcgctgaaccttgccggccttgaggcacttgacgcacacgcgcagacgagtgttctcgccatcaatcgtggtgcgtacagactgcaggttcgggcggaagctacgcttggtacgacggtgcgaatgggaaacggtgaaaccggtctgcggtcccttgccgcacactgcgcaacgagctgccatgatggactcccttaaccttgatgtgtcaagtctttcacgcattcgaccgccggtttcacccgacatgccgaacacacaacttcacaaatatatagcccaataccgacaaccgcaactcttgcgtgtatcatgggcgaacttcggcggttcacgcgcggttcgagcgtaacttgcgagtgggccatcagcggttcgcgagcggttcggcattggttcgccagcggtccgcaagtagttcgccagcagttcgccagcggttcgccagcggcgaattacgctgcaaatcgtagcgtttacccgataaaacacgccggactgcctattccgcatccaacaaactctcatataatctcggtataagagacggcaagggacgaaggggtcctcgtgcaacttacgacgaaggaggctgtcatgttgaatctcaggcgaggtatcggcactcacgagcccagcgtgatttcactgggtcaagtctgggtggacattatgctcaatgtggacgaggtgccggcacagggcggattcgccgtggccgatcatccgaagccctccattggcggcagctatcgcgtgctgcaggcggccagccgcatgggcgtgccgaccgagcacgccggcattctgggcaacggcctgtgggcgcatttcatccgccagtcattccaagacaacggcattacgcatatcggccaggatcgtcttgatgaggattccggtttccgcgtggtgctgagctccggcgcgccgaagaagacgttcatcgcttcctatggcgccgaggctcatggcgacgcggacacgttcaacacgctggagccgcagcccaaagacgtggtgcacatcagcggcaacacactgatggaccacacggccaccggcgtggacggattcctactcaaggccggtaccgacccggctgcacgcgactacacgctggtgatcaatcccaccaatacgttgcgtctggtcaatgaccacatgctcgaggatctggtgcttgcgcgcccggtctggtcctgcaaccgtcaggaggccatgacgctggccgagcgcctgggcgcgccgatcgacgacagcaaggtcaccatcggcggtggactcgacgacttcatgcaccagttgtgtgacggcttgggcactacactgcgcgcgccgctggtggtgcgtgtcggcgcccgcggcgcttggattcgtgagccaggtggcgagacgattcatatcgagggatacccgaccaaggccgtacacacccgttcggcgggcggttgccacaccggcgtgatgtgcgcgatgctggcaaagggccatagtctggccgaatcggtaaagatcgccaacgcggcggcatccatcgccatccagcgtagcctcaacggcgtgccgcaatgccccgattacgacgaggccatcgcgctgatcggcgaatagtttccggacgattgagtggatttcctcatctgggggaatccacgatcggctcccttcagtccgcttcgcggccagctcccctcagcgaggggagctatttttttgctctggctccccttagaaaggggcccggcattattcacccgccgttcaactttggcggttttctaccctagtccgcgcttctacgatagattgagttgaatactgtcgaggagtgcatatgactgatcccgcaaatgtccacgaaccggtgccgcaaagcgccaaactgaccgcccgcgagaagaagtggatcatctacgacgtcggcaactcggcattcgtgctgctgtccaccgccgtcatccccatttacgccaaatcgctgatgccggcggacggcaacatcgtgtccgcctggggctacgcgcaaaccattgcttccttggtcatcgcgctgctcatgccgttgctcggctccatcgccgacgtgcaaggcatgaaaatcaagttcttccttggcttcttcggcaccggcgtggtcacctgctgcgcaatggccctgcccctgacctggctgccgttcctggtcgtctacattctggcgaccatcggcctcaacggctcgctgacgttctatgattcgatgctcatcgacaccacctcgaacgagcgcatggacaaggtctcctcgcacggctacggctggggctacatcggctccaccgtgccgttcatcttctgcatcgcgctgatcttcggcggcccgtcgctcttcggctggtccacggtggcttgcacgcgcgcctcgttcatcatcaccgccatctggtgggtggcgttcaccatcccgctgcttaccagctaccgccaggtgcactaccgtgccacccgcgaccagctgggcacggccgtgcgcggcacgttcagcgaactggcgggcacgttcggcaaaatcgtgaagaacaagccgttgtggatgttcatgatcgcgttcttcttctacatcgacgccgtgaacacggtgatttcgatgagtacctcctacggtgccgagcttggcatcgactccacccagctggtggtggcactgctcgtcacgcagttcgtggccttcccctgcgcgattctctacggccgtctggccggccggctcggctgcaaagtgatgatcactgcggcggtcgtggcatacatgtgcatcgtgctcttcgccgcgttcttcatgaaatcggccgtggagttctggattctgtcgattctggtcggcatgttccaaggcggcatccaggcgctctcccgctcgtactacggcaagatcatccccaaggaccacgccaacgagtactacggcttctacgatatcttcggcaagaccgcctcgatcatcggcaccttcctggtggccaccaccacgtccctgaccggcaacgcctcgttcggcgtgctgtccatcgccgtcctgctcgttgtggcgctcgttttcctgctcctgcaaaaggacccgacgcgggagtgatttgccggccctcggcaactctgcgccgcgggcgacatctcgcaacccctgcaacgggccctaatagcaatggaccatcgccacttgatcacttacgctcgcgataatccttgatcagctgaatggcgacggccgcaacgccgcacagcacaccgccaatcggccacggcagccagaacatcgccccgtccgcggcgctcgacccgacggccgaccaatcaccgcgcaatgccgcagggttcaaaaacagcaggcacaagccagtcgccgtggctatcagcataatgatgccgcacaccgcgccggtcagtctggcatagaaatcctgttcgcccgcatgctccttgcggtcgtcctcggccgctttgttgtatgcgttgatattgagcagactgtatctcatgccgcagtagacaaacccgaaaacaccgggcgcacagagcagcagaaaaattgcgttgggccagccatcggagacgccgagcatgtcatcggcatacaccgtcaccgcaatgccaatcagaatagccgagatgccaccgacgatgccgattaccagcagccgcaattctcggctgcggtcctccccggtgtagaaatcttctacgtatgggtgacgccgtttgaagtcaatacgcgacagacctcctggaatcagcatcgccagccccgcaatcacacccacgcagacgcacagaaacgtcagaaaatcgttgagcggcgtcgctccgagaatggaattgctggaatcgaacaggttgccgatgccaaccccggcgacaatcgcagcaacaccgccggcaatcagcagcgcgaatcggcggcgatgttcatcgtagccagtgatatcctgcgcaagctccgcgataggagcgattatgcccgccgttttggaagaagcggctaaaggcgatgccgtctcagccgaggagtcaacattcgacgaaccggccgcagaagccgacgcggcaggccgactcacatcgccaagtaccagatcatcaagcgtgcagccgaacaggtcgcagatcataagcagcttgtccatctcgggataggccttttcggattcccatttcgaaatggcctgacgcgagacgccaagcaacatggccaatcgttcctgggtcaggttgcgttgcgcacgtaggtactgcaggttagcgcgaaaactcattggaatgtcccttcatacgtaatctttatcatgtcatgttcggccgatgggctcactatggcatgccgtccatgtcacccgccaccatctttgggttgcaatcgccggttattcgagcgcaaccacaagttgcatcggcggaattccgccattccgttgacctgagcagctttaacatcgctccacgagaccgaagcttttccagccatgcgagggcagcttgtctcacctgccaccacgaatccgcttcgacccacgtacacatctgtgtacagcagcgctcgcaatcggttacctacgacccatatgatttgctgagcgaccgcaaaacacgcaatagccgagacaacaccgtcagcgttaaagcttaaggcgactacttgcccaatagtccggaaatctggctgatgatgtcagcgggcagtcctgcttgttcggcaatggatccgaggtccagattggcaccctgctcctgaattgcgccagcgacctgactgatctggtcggcggagatgttttcctccgccagcgcctgcagctcgtcaagtcggtcggcgttcaaatggtcgccaacgacctgttgatttcacccaactgatcggcattgaaatgctcaccgattaccgccggcaaatcaccaatcgaaccgagattgaaatccccgccaagcacattgcctagattgtctgcggcaaaatttttcaggctatcgaacagtcccacatgtgccgctggtactgcttgttcagcaactgctgcagagcatcgcacagaccctgcatcaatcgccgctcttcggcagacaagtcccgcgtgaaaccaatctctgcctttgcgctcatcagctggggagctcacggtcacactcatgcgtcgcagaccacgagcctcacgcgcctcctcattccacatctgtgttaacaacatgtgttaatcgcatgcatcgccaccatgattccccaatgatttcaagggttccccggtctcactattgtttcttccctaaaacggcctcaatcatcggcaccttcctggtagccaccaccacgtccctgaccggcaacgcctcgttcggcgtgctctccatcgccgtcctgctcgttgtggcgctcgttttcctgctgctccagaaggatccgacgcgcgcaaacgtgctgagacatcgccggtgaaccaagttctgcctttttaccgacgccagctcgcataagcaggaatcaaacgtcggcgctgggacacagaacgggaatccgccgacgttcagagtatctgatgtcggtgccgagccatgtcttggacgccaccgacacaagtaccactcttggcgacggtggtggggcatccgctgtcccaccaccgtcgccaatcgttctcagcggcgttgacaatccattatctgtcctttcaacgccgccaaacgtccacagcgtcggcgacggtccggattttgacgcaccaccgatgcaaaaccattgcaggctccgtacggaacatcagccgcgaccaccgaacgagcaccagatgcggcatcagccgcgacaccagccgcacttatcgacgcgcccttaccgcgtcatcacgtccatcaatacaatgactcatcggcatatccggctgcagcccaataatcgtcggccgatagcgagcgattgaaaccggtggcatgatcgcttccgaggtcgccctcgccaccgaaatcgacatcgaaatcagtaccagcatcggaagtaccgccggacataccggcaacgaacctgacttcggttttcagcaggtatttctccgcgaaattcagcgtggtgcacaccatcgcaaacccctttccatgcgcgttgccctggcggaccaagacgtccttgtgtaagtaagtaagtatggcggctccccttccgcaccgccatatccactatggaagcgcgccgcggcacacgacacaagccccgggacatatgaagaagttatggccggttcaaagcacccgtattacagcccaaacggcaccgcgcgcagcgggattgcacgacggccggacgccactcatgatcggaaaccgctcacagccaaatgccacccgaggccggatgccatataaggaaccgtggcacggcagatatagaaaatgcccgccatcatagactgacgagcgtgatatcgggtgggcgatgtaggaatcgaacctacgaccccttcggtgtgaacgaagtgcgctagccgctgcgccaatcgcccgagcttgtgatgaaaaaaccggcaacattctgccggcgattcatcgagtgggcgatacaagattcgaacttgtgaccccttccgtgtcagggaagtgcgctaccactgcgccaaccgcccgggtcatcctcaggctgaatcaatcatcctgaaccagccatccgagagcggacaacgggactcgaacccgcggtctcaaccttggcaaggttgcgctttaccaactaagctatgtccgcatgtgttaccttcacgggcaacaggtgacaaagatacgccaatctcaggaaaaagccaagcccccgcgtgtcccaccggttttccaacgattatcgggtgccgccgtgcacataactcgcggtggccgtatacagcagccaggcgatgggcatggccagcataaacagcgggtagaaccaagcgatgggcacattgcacggccatggccgtggaaatcaggaacgcatgacgataaccgatcagctggccgaagaggccaaggccttgatcggcgaccgtgccgaagtgaagttcctgaactacgccgacgtgccgttcttcaaccaggacgaggaattcccgaacccgacagccgccgtggccgccgccttcctggcgctcgttgcggagtaatcccgcctgaatcttggttacgttccgcctcaaggcggacggcggaccagctgcatcagcaatgtgccgaacccctctgattgactccaatcagaggggtcgctgcgtttcaaggggctgatttggccttctccggaggtctactcccgtttcaaggggctggtggctgagtagacacgggccaaaaacggcgtaatgacgttagcccggagccgtttatacttgtggtttcccggatgaggagcccctcgaaacggagatagacctccggaacagcccaaatcagcccctcgaaacggagttagacggttgggatgtcggaaagaacactcatgccggcccaagaacccccactatgtcagatatcgctgcccagcacgcaatactgaccgtacagcacgacccgtccttcatgaaatcaggcacggtatgggcttcatccctcaacgcgcgataatggcggtatgacgcaacgacaactgatgcgggccacagtcgaaacgcccatcggccggatgatgatggcctcggacggcgagggcctgaccgagctctgtcttgaagactggtggtgggccaccgatcaccaagccgttctcgattcgaatcgcgaatccgatcgtgaacccgatgtgttccgtatgacccgcgtatggctgaccgcctatttcgccggcgagcgccccggcctagatcagacgccgccgttgcatcccgccggcacgccattccaacatgaagtgtggaatctggtggccgaaattccctatggcatgacggtaagttacggcgaactcgccgccgaattggccgaacgacgcggtggcggccgcatggccgcgcaggcggtcggaggcgcagtgaagcgcaatccggttaccatcatcgtgccctgtcaccgcgtagtcggctcgggccgcgcgtttggcggctacggcggccgactcgacatcaaggccgagttgcttgaactcgagggcgtggatctggcgcgcttcgatctgccgaacctttgacggccccagcggtccgcctcgtcaaaaggattgagtggttacccctcccgccggcgggaagtggcacgtaacgccggagggtggtcggctggctggcatcgcaacccccgctacccgacaattttcgacaagctgacgggaatcctcccacgaattgttcgccgtcggtgcagtcttgctcgatcgcgccggccaaaaccgtacaatccctacaatggaatgtatatggttaattgctgcgcgcagccgcacggccgcacgcgatcgcaagaccacatggcccaaggggatatgcaatatcaacggaagcaggaggtgcgtatgaccggcattatcgattacgcgcacaccgaaacgcgctccttcgccgacttgccgttcaatgaaatcgacgccttgatcatctccacgctcatctatgaggatgtggccagtatctgtccgacgttgatgctggatgagacgcagtcaggctcgttcgccgcacgcattcgcgctttcgagcccaagcatccactgatctggctgaagggtatctggcatcccgagcttgaatcggtgagccttgacgaggccaaccgcgagctgcatcgttcgccggaaacgcatgccgacgacaagccgcacgaagcccaaatggtttcagtggtcaatccggacctgacccacgacctgttccaggccgcgggcgagaacccccgctacgccaacgttcgtctgggcgcggtggtcgagcacatcaatcagggtgagcaaacccaattcgccgccgccaccttccaactgcccgacggccacaagcgccggaagccgacctacaaaggcacgttggttatttccttccgcggtaccgatgattcgctcatcggatggaaggaagatttcaatatggctttccagtatccggtgccggcgcaacgttcagccagcgcctatctggatacggtggcgcgactgtgggagggtccgattattctggtcggccattccaagggaggcaatctggcgatttacgcggccatgaacgccgaccccaaggtgcgcaagcgcattcagcatgtctattcactggacggccccggtttcccgccggagattgtgaccagccccgcctaccgcaccatccagccgaaggtgacgaaaatcgtgccaagttcgtcgattgtgggcatgattttcgagaccccggagccttgccgcgtggtctcttccgattcggatggcattatgcagcattccgccttcacctggctattggatggcgaccagttcatcaccgagccggatttgagttccagctcgcagttgtttaacgaggagctgaaccattggatcgccacgcttacgcccgaacagcgcgagcgtgcggtggacgcgctgttcaccgtgctgcacgccaacggcgccaccagcttcagcgaggtgatgagcaacttccccgcttcgattccggcgatgcttggcgcgtatgtagggctgacccccgcagaccggcgtcatttggttgaggccctggcgatactgttcaaggcgtccacggccaaacgcaggccgacgcccgccccggcttccgcgccgagttctgcgaccgccaaaggaacagccgaaaccccagcaggaactgcgacaggaacagatagcgcggccccggccagcgccgataccgacaccgacactgacaccgcagcttcgccctcagcggaggacgcaactgaaatcgccgattagctcatagacatgtccacaaataatagttatactgcccgataagttattagacagcgtgaccatatcacgctggtgcatcaggaggaagagatgccacgtccacgccatgattccgaggtgctgcccgccaaagaacgcctagagaacgctttctgggaattgctcgccgaccgcgactaccgcaagatcaccgtcaccgatgtggtgcgtgaggctggcgtgaaccgtaattcgttctattatcacttctccagcctgcccgaattggccgattcagccatcctgcatcaggtcgaatcgattccgatcaaccgcacccccgaccccaatggcaatcccgaggaacaatggcgagaccgcgtcaccgccacgctctccgatccagagcaacggcaacgcctcgaccgcctggccctgttggcaggcccgcacagcacgcttgaactgaccgaatcgctgcgcgacttctgccgtctgcaaatgctcagcacattgcaacgcgaccccaagaaccttgatctgaaaaccgatctcatggtcgagttcaccgtgggcggcatgctcgccgtgctgcaacgttggcccgaattgagcgacgccatcgaaatcaaagacctgcttaaagaagatgtggccgtgctggccatgggcatatacctggccatgagccaaaaggacatgcttaattactggaatcgcatcttcgtgcacaatgcgcaggattcggccgccccctgcatgcaggccaccgccacgcatgccgcgccatcccccatctcaccgtcgaacggccccgcaggattccccgggtacaccgcttgaccgaaaaccagtgagtctggattgtttccgtcgaatgaacccccgcgtgaggtttctcacaaggcgcaatcagcctctcatgctggcgtttccagccctcacacaggaagatggaagcatgagcgaaacatcgaacaaaacccgtctggaacatgactgcatcggccagatggaggtgccggcgaacgtctactggggcattcacacccagcgcgctatcggcaacttcccggtctccggcatcaccgatagccaacatcccgagctgattcgcgcctatgccacggtcaagcgcgcctgcgccatcgccaatgaggaattaggcctgatcgacccggccaaggccgaggccattcgcgccgcctgcctggaaatcgaggccggcaaactggccgatcagttcccggtcgatgtgatgcagggcggtgccggcacctcgtcgaacatgaacatgaacgaggtgatcgccaaccgtgcgctggaaatcgccggccaccagcgcggcgattacacatacatccatccgaacgacgacgtcaacgagtcgcagtccacgaacgacacctacccggccgcctgcaaactcgcgcttatcgacgcgatcgggccgctcgccgagtccaccaagaaactcgccaaggccttccacgatctggccgacaaacatatcaacgacgtgacgattggccgcacgcagctgcaggacgccgtaccaatgacctatggtcaggaattccatgcgtttgccacgctgttgaagtctgatttggctgcattcgatcgcgtggtgccgctgctggcccagctcaacctcggtgccaccgccatcggcaccggcatttgcgcggatctgcgattccgcaagtccgccatcaagcatctggcgcagatcaccggcttgccggtcaccgccgcgcccgatccggtggccgccatgacggatatgggcgcgtacgtggccacgtcggccgccatcaagagccttgccgtgcacctgaagaaggccgccgacgatttgcgactgctcaattccgggccgcgctgcggtttcaacgatctcaacgtgccggctcgccaggccggatcgtcgattatgccggccaaagtgaacccggtgatccccgaatgcgtcaaccagtgctgcttcacgatcttcggcatggacgtgactgtgaactgggctgtggccgagggccagttgcagctgaacgccttcgacccggtgatggtgcatgagctgctgaccggcatggcgttgctgacgcgcgccatggagacgttccgcgtcaactgcgtggaaggcatcgaaatcaatgctgacctggggcgttcatatgcccagtcctcaccgtcgatttccgccgcgctcaaccattacatcggctacgagcacgcggccgacatcgccgccgaagccgtgcacaccggccgtaccgtgcgcgaggtggccggcgaacgtaccgacctgcccgccgagcagctggacgagattctcgatccgattcgactggcccgtggcctcggccaaacctgccgcgagcatcgggactaggcaccaccgcaacggccaaaacccgacgtgggcccgcatgtttacgacttcaccagaaatggtcgatacagtagggcatatgaccgaatatgcacaagacatcgcacactggttccaggtcaatgcgggcaagctcatctggctggccattgtattggccatcgtatttgtggccgaccgcgtcatcagccgcgtgctgcgcagggttctggatagttcgcagattcccagcgcctcgattttcgtgaatctcacgcgcgtgaccatctgggtcaccggtacggcgatggtgctgcaaccggtgttcggcatcaatccgaccaccctggtcaccgccctcggtgtcggaggcgtggcgatttcactgggtttgaaggatacgatcgccaacgtcatcggcggcttcggcctgatgctgggccgcgtaatccaacccggcgatctggtgaccattcaaggcgtcacaggtaccgtgcacgacatcacctggcgtcagaccgtggtgcgcacccgttccggggacatgatggtcattcccaattcggtgctcaacacggccgccttaaccaagctcacgccggccagcgaaggcatggccacgctcgagttcacggccaaggcctctggcgacccgtccgctatcagtcaggatattctcgaccgcgtaaccaaagccaccgccgacgtggcactggagggccagccaccgctggtcaagttcaccggcttctccccttacggcatgaccggccaagtgcttgtgttcgcgcgcgagggtgtgctaccttccaccatcaaagatatggcggcgcgagccatcgccggttcgggcaccaaataccttgttgaagatagcggctcgtcagacaatctgtgatatctcccggctcacctctctgggtccggctatgacagtcatgcgaacagcatccaaccggtaagaatcacagtcaacagtaggtacgagataacgccgggattggcataggcggtgcgtattttaagccccgcaggcaactcctctggcgcaagatagaactcccagctcttgcgcttggtgataagcagcacgataccggcaatgcagaggcccaacatcactgtgccgtacaacatcatgatgcccatgccgcccatgttgccggtttcaaccatacgcatgatttcggcctcgctgattgtgccgtcgaggatgcggggatcgatctgttgtatcaccaatggggcgagcactgccccgttcaggttgatcagcatgtgcatagccactgaataccgcaggcgggaggtgcgtgtgtatacatatccgaacatcagtcctaggccaaaggcgtagaagaactggaacacgttcatatggaatagcgcgaatgccaatgcggagaacatgattgcggtcttttctccgtaccggcgcaggcgggagataatctccttgcgaaaaatccattcttcgcaaaccggtgccaacaggcctatgaacaatgcgttcacccgccagtcgctgccaagaatcacgtcgttgatgcgattggtggcctgaccatcagtggctccggcagacaatatattgccaatcatattgcccaagagcattaccggaatgcacatgacgaaaatccgaatgaactcccccgccttcatggggtactgccgggtgcgaataaccggtacgcgagtgaaggccaacatactcagcggcatggccaccacatacagcggcccggaggaggcgagcagcacagcccaagcgggcacatcggcgccaagcagcgttcgtagtgcttcagtggccagaatattcagcccgatccagaacaccatcataatggcgagcgccgagccgattgtcgaaaaccggcgatgggccgtgaaccaccaatcgcgtggggtttgttgcggctgctgcgccgacggcattggttcgctcatacttatcccccatagtcactggccgcaaacggaccgatcacacgtgcaatactcttcaagaatacggcacggcgtttcgattgcattgggaatggggaaaatcatcaatgggcaaggaatgatctacgtcaatcaatccccatgccgagagagtcctctactctgcgggattgttgtgggacggcacgcgattttacccgattttttcgcggcggcccacaccactccacatatgactgatgacgccgcacgaagaaatggcgtcattgcaacgattcctcaatacaatctgtgggacggcacgaatgtacatcgtttgacgttcatgccatcccacaccggcgtgggacggcacgcgataatcgcccaaaaatcgccgccgtcccacacacatcattgccgataagccattcgacgatcgtacagtcacaaaaaacagaacagaaccgcacgatcatcgcaacgccattcagcaggcgagcgcggcgaccggacgcggggcgacaatcacgtcatcgcccaccgccagaccggccggcagctcgctggcgggcagctgcacggtggccttgagctgttcacctttgttccagcgctggtattcgccggaggtgatgaccgtgtccacacgaaccaaagagccaaggaagtgaatgacctccacgcgggcgcgttcgccgacgtgcgaatcgctgctgccagccaaggccagcatcaggttctccgggcgcacgagcacggccacggaatcgcccttggcggagccggcgagcagcggcacgcgctggccgaagaccacggcctcgtcgccattggatgcgccgagcaggcggttggtgagtccaatgaacgtggccacgtactcggcggcagggcgctggtacaggtcctgcggggcggcgatctgctcgatcttgcccttgttcatcacgccgatgcggtcggccacggccagcgcctcttcctgatcgtgggtcacgaagacggttgtggtgccggtggtgagttggatgcggcgaatctggtcacgcagctggacgcgcactttggcgtcgagcgcggacaacggctcgtcgagcagcagcacgcgcggcttgatggccagcgcccgggccaaggccacgcgccgctgctggccgccggacatctgctgcgtgtacttcttggcctgatcggcaagccccacgagctccagctgttccatggcgatcttgcggcgttcggccttgcccatgccgcgcacttcgaggccgaattccacgttctccagggcggtcatgtgcgggaacagcgagtacgcctggaacaccatggccatctcgcgcttgttcaccggcacaccggtgacatcctgtccgccgaccatgatgcgtccgccttggatgtcttcgagaccggcaagcgatcgcagcgcggtggacttgccgcaaccggatccaccgagcagcacgaccatttcgccgggcttgatgtccaggttgaagtcgtcgagcgcgtgaacggtggagccgggatagatcttgacgacgttctgcatctgaatggaaccaccgccgcgcttggcggtgtctttgagcagggccttggcggccttggtcacgtccttgccgcgcacgccctcgagggtagcggtgggatcgttcttgaaggcgtcctcggcagtggaggacacggctgccggaatggccggggacgccggggcggcgtccactgcggtaccggtttcctgacgggtgggagttgaatcgttgttcatcgggtcacttaccttcccttgacttacgcattgcgtcggagatcaggtcgagcgcaacgaggagcaccacgccgaagagcagagccagcagcgacatggcggtggaaatttgggcattggattggccgagctggtagagcgcgacctgcaggttcatacggccgagcagcgaggcgacggtgtattcaccgagtaccacggcgatggagatgaaggatgccgagaggatcgactgccacaggttcgggatgatcaccttgaagaacactttgggccaggaggcgccgagcgatcgggaggcttcgaccaacgtcttgacgtcgatggagttgaggcccacggcaatcgcgcggaaggcgaacggcatcacgagaatcacataggcgaagcacagccagatcgggttggtgctcaacacgtcggcggaaagccaacggtagatcggcccaagacccaccaccagcacgatggccggaatggtcagcggcagcgtggccacccattcgattgcacgctccaaggctttggagcgaatatgcacgatgaccatggtgggcaccagcaggatgagcatgatcacgacggtgacggcgctcaacgacagcgagatgccgacgccctgccatagcacgctcagatcggcgcccaacgattcgccgttgccggtgaaaatcgccgtccacggcgcggccgaccagcggccggacaacgggtgccgcagcgtgaagatgaacatggccagcagcggcacgaacaggaacgccagggtgacgaacaggatcacgaatttgatgatgctctgtttgcgcacgcgggcggcgcgcagttgcggcggcttggttgtggaagtttcggtcattgccaacgtccggccctcttttccacgacgtggctcagcagcatgacgatggccacgacgatgatcattgcgaatgccagcacctgcgcgaagccctgctggttggggtccatctcattgcgcatggcaccctggatcatgagcggcaccaggatcgaacgctgggagaacagggcggcggcggtcgcataggcggagaacgcggaggcgaacaacagcaggaacgccgagatgaagcggggtgcgaggatcgggcaggccacgcgcgtccagtattggacggtgttgccgccgagcgactcgcaggcttcgcgccactgtggacgaatggaatcgaccgcaggcaggaagatgatgatcatcagcggaatctggaagtagcagtagacggtcaccagccccggcagggagctgagccaattcgggttcacggtatagccagtcagggttttgatgagcatggtgccgatgccgttgatgccaagagtggcgatgaacgcgaacgcgagcatcacgccgccgaactgggcgagcaccgatgagatggcggcgaccatacggcgcagcggtccgttcggcttgacgccgatcaccagcgcgtaggaggcgagcgcgcccaccacggcaccgatcagggatgaggccacggacaccaggattgacgtgccgaacgcggcgatggtgttggcttcgaacatcttgtggaagttcgcaagcgtgaaaccgccgctgcgatcctggaacgcgccgatgatcacgatcacggtgggtgccagcaggaagcaggcggtgtaggcgaagaacgggagcgtggtggtgagcgtgccaagctcctgacggtgcttcgccagtgcggacgaagcgggggtcgatgcggcggacggacccgcggccttggaggcggcgggtccgtccggtgcgatgggtgcgattgcggcggtcatcgtggactctcagttgccgatcgtcttatcccagttgttttgaagccactcggtgatgcgggtggagtcatcgttgctgtaggtgaccggctggccttcgatggtgatggcgtctttcagggtggcctggtcgacggtgccgtcggccttcatggagtcgagcagcaccgggttggcaccgcccttgaaccacaggttctgggtttcggcggtgtacaggtattcctcccacaggcgtgcggcggcggggtgcggcgcgtccttgttgatggcctggttgtagtagctgacgacctgggctttggggaaggtcttgtacttccagttcacgcccttggacttgagttccttcttgtaggaggcctggttgtaggtccagtcgaagaccacgccggtctggccggagtcgatggtgccgttggtcacatcgatggtgttcaggttgccggcttccttgagcttcttgaagaagtcgagaccgggctgcaggttgttgatgtcgccgccggcgagctggttgaccatcagatagccgttgaaggccgcgccggcctcggtaggcttgccgttcagggacacggtgccggcgaacttcggatcgagcaggtcgttcagggaggcgacatcgccgtacttgtcggcgttccagcccacggacatgatgccggtgtagtcggcgtagtaggcgccgtcgacgttcttggcagcatcagggatcttgttccaggcctgcaccttgtacggggcgaaatagtcggtggaggtggcggcgatggcctggccgacgtcgaagacatcgggggcggcgtcggtacccttgttggtcttggcggcgtcgatctcctccttggaggaggcgttcgggttcagctcggtgatcttgatctccgggtacttcttcttgaagccctcgatgacctcgccatagttggaccaatcatgcggcaaggcgatgacgttcagcgcgccctcttccttggcggccgattccgcaccacacttacctcagcacgccctcaatcaatcgcgtgatgagttcggtgtagctcactccggtggcatcccaagccttgggatacatagaaatcggcgtgaagccgggcatggtgttgatttcgttgaccatcaccgtgccatcaggcgtcacgaaggtgtccacacggctcaagccggcaccatccacggccttgaacgcgcgacgggccacgtcacgcacgtcctcaagcacgctgaccggcagattggccggcacttccacgtggctggcggaggcatccatgtacttggagtcgaaatcgtagaactggtcgtcgttctgatgatcgagcacgatttcgccgggccagctggcctcgggctcgtcaccggccttcgggcacagcacggcacattcgatttcgcgaccatcaatcccctgttcgacgagcaccttccaatcgtgctcgccggcggtggcgatggcggcggccagacgatcctgctgggtctcgcggtcatcggctttctcgaccttggtcacaccgaagctggagcctgcgcgcgaaggcttgatgaacagcggataggtaagaccggcgtcctcgatcttggcaagcacatcggcggcggtgaagttgcgcgcatcgaccgtcacacccggcgcggtgggaatgtcggcggcacccagcaccaccttggtgtaatgcttatccatgcaggcggcggaagcaaacactccgcaccccacgtacggcacacccatcatttccagcaggccttgaaccgtgccgtcctcgccataggggccgtgcagcaccggcagtaccgcgtccacatggccaagggaggtcagcgcatggtgcatttccgggtcggacatgctgacgaagctggtgccgaagccggaatcggcggaattgatgtggctgggctcgccgatgaagaaaccgtcctggccgcgagaggggtcaagcatcaccgggcgcgatcccggggtgatctttacggtcggcagctcgccgccatccagattccagccacgaggatcttcgccgttgatgatccacttgccgtccttggtgatgccgaccggaatcggctcgaaccgttcagtgtccatggcccccagcacaccggcagtggagatgcaggaaatcgaatgctcgtctgcacgcccaccatagagcaccacaacacgcttcttggccataaccatccttttattgaaactacaaccgttttcaagcctatgctttgcaccgccaaccggaccgaaccgcgctcggaccgccgcgcacaagagacgcacaccagtctactcgcgcacgtcaacgacgtatacgccacacgactttgcacgtacgacgtatacgccacgtatacgtcgcttctctcgttattcgccggtaacctcgtgcccgaacagtccggcaagcatctccgagcaggaaatgccttcgttcagcacgcggctcatctgatacgccaacggggtcggcacatcaagctgctcgccaagagccaccaccgcatccgtggtgggcacgccttcggccacaccgttgctgaccttggtggcctcctcgaccgtcaatcccttgccgagattcgcgccgaacgtatagttacgagacagcggagagccacaggtggcgatgagatcacccacaccggccaagccgaagaaggtcttgggatcggcgccagcggctgcgcccagcgcggtcagttcggccagtccacgagtttcgatcatggctgcggtgttctcaccgtagccggcaccacgggccatgcccacggccagcgcggtcacgttcttcaggctgccgcacatttccaggccgatgacgtcggtggtcacgaacggcttgaaataggaggtggtacatgcctcggccaccttcgtggcattatcgaggttcgtacaagccaccacggtggcggcaggatgacgatcggcgatttccttggacaggttcggtccggaaatggcggcgaaccggtcggccggcaggtcaagggattcgcggacgacttcgtccatacgcttgttggtgccacgctcgatgcccttcatcaggctgacgacgatggcgtgatcgggaatcagtcccttgaattcgacgagtgccactcgcgcgaactgcgcggcgatggccacaaccacgatgtccgcgttcttgacggcttcggcgcgatccccggtggcggtcatgttgtccggcaacttttcgacggacggcaggcgcacggcgttgcggtggtgatcgcgaatgccctcgacaatccgctgctccttggcccacatggtcaccgtgttgccggcgtccgccagcacttggccgaaagcggtaccccatgctcctgcgccgagaaccgttatatttttacccatatcagattcctaccttcgcttgtcgcgcaacttcatcggcacaatcttgtgccatgctactcgcctaggctccccgtacgggaaccggtgcggctacttctcagccgggaacgggccgccggcttccggccaaggcttgcgactcatgctgcggtagtcccagtagccttcagcggggaactgctcgccacgaatttcctccagtactgtgttcatgcgtttgagcacgcgccacatcagctcgttcacggcctcggcaggcggctcttcaccccatgagtccatgtcggcaagcagatcggagtaatcgagcgcatggtcatagcacatcaccacgtttttgcgcggccatggccaccagtggttgatggaggcggcaccccacgtcaccgccgggtacagcggcacctgatgccccagtctgcgcgaggattcaagggcgatgtatcccacgccctccttaatgctcatcacccactttttcgggtcgcgggtcacggtgccttccggccagaccgtcagcgggcggccggacgtcagaatatcaatcgaggtctcttcgatctgcttggccttgcccgaatgacgctgcaccggctgcatgccgaccaaccggaaccacttgccgatcaatggccacttcgccatctcggccttggccatgtaccgggggcggcggcccatgtggaacaggctcatcatcggcacgaacacatcaaacatggtgatatgactggcggcggtgatgaacggtccggtttccggcacctgttccaggccccaggccttggtcttgcagctggcgcggaacacaatggacacccctcccagcagtcgtttggtggccttgggattctgggcgtcgatttccggctgattgggcgtgcgagggccggtcgggtaatactgtgtcgagtccacaagcgtgtggcgggcggccagacgcttgacctgctcatcactcagcgggcttacggccgaacgcggcgacggttttcctttggatgccatggtctctattgtggcacggaccaccgcccaacgattccagcgcaacgttcccgggaacgtgtcgcggaaccacacctcgcacccccgcccagcgaaacattccccggaatgcgtcgcacaatacgcggcggcccgtctgcacacaccatgcgcgcagacgggccgccggagaaacgttcgaatcactccaccgcgatggcgtcgatctccacgagcgcgcccttgggaatcatgttgttgccaaaggccacgcgggcgggcttgacggagccgatgaacgcctcagcgtaacgtgcgtccacttccttgaagtcctcgacgttcttcaggtagatggtggcgcggcacacatgctcaatgccggtaccggcagtgtcgagaatgtgcttaatattcttcagcgcctgtgcagcctgctctccagcggtctcgcccgccagttcgccggtggccggatcaatgcccagctggccggatacgaacacgaagccattggccttcaccgcctggctgtatgcgcccagcgcggccggcgcctcggaagtggctacggcttccatcttttcgctcatattgtgctccttctcatcttgggggcgcccacctgctgcggccggcgccggtacacatcaccaccggctacgaccaatcgcacgatcagcaacgattggcaatgccgattacgtagcagtctactgagcgaagtcgcgtttagcgcgcatgatgcccggcatacggccatcaacagactattccttgctattccagacgattccagacgattcgactaccgttctcgccaaaccgggcggtttttccacgacccaagcgagccggcatcaccgacaccagcaccagcaccagcaccagcaccagcaccagcaccagcaccagcaccagcaccagcaccagctttgcacgcgcttaatatcacgcgccgaatatgcaaaaggcttccggcggctagccgaaagccatgctggtgggcttgatggggatcgaacccacgaccttctgttccggagacagacgctctatccactgagctacaaacccgagcaacttctttactgtacaccacatcacgctgcatgaggcacatacgtcgccaaaataacgagaaaatcgccatcatcggctctacaatgaggttatgtcggaacctacagatgacttcgaatacgaacgccgcttcttctgccgcgagctgccggcggaatacgacgacggcgacgccccgaccctcattattcagagctactacgtgcatgccgacaattacgccttgcgcgtgcggctggtctcgcacaaggttcacgtcgacatgacgcccgacgtaaatccggtggccgtgctggacgagtaccgcgaccggttctcggaagcgtatgtcaccgtcaaaggtccgtccgtgggtggcacgcgctacgaggtcgagcgcgagatcgacacgcgcatcgccgccgaactcatcaagcgcggcggctcggtaatcatcaagaaccggtattccgtgtggattgcggaagacggctggagcgtggacgtgttcggcgggccgaacgcgccgctgatcgtagccgaggccgaacgatccgggccggttaccaatctgacgattccgaaattctgcatcaccgaaatcaccgatcaggcgcgattcaataacgatggtctcgccaaccgtccgttctgcaagtgggcggatgatttcgaggaggagctggcgctggaggggccaaggttccagcaatatttcgggaagaatcggatggtttaggggaagcaatcaagtacgttcgcgcgcttccctcagtcatctacgcctgacagctcccctcaaagaggggagccaaaaccaatcagtacatgagggtggctaggcgacggcgggcgcgagccagacgcgggtcggtgggttcggggatggcgaagtattcgagcagacgcttgcgaaccggctcgatatcggccttgtgcccggcggccaaaaagtccagcaaacggtcgaaagcgtcttgaatctggccaccgatcatgtcgatatcagccacagccaactgcgcttccacatcgtccggcgctgcggcggcagcggcacgcacgtcacgtacatcagcggacccggagcgggccagcaacagcgccttcgcacgttcgcgggcggccagtgcatcggacgggtcggattcgagcacgcgctcgtattcggcggcggcaccggcgtaatcgccctcctcggccaaacgatgggcttcggcatgctccggcggcacctgctcagcacccacgccggcaccggtggcaccagcgctcttggcggcatcggaatcaggatcacccgagtacggcgcggtaccgttcacaccagactgcgcggcggcctgaatgatcttcggaatcacctcgtcggtaagttgcttgagctcgtcgtcacccggaaggccctgcaacagtggcatcggacggccggcaatcaacgcgaacagtgcgggcgcgccctgcacctgcaacgcttgggcaatcgaaggattggacgagatatcgatacgggagagctgaatctggccgttcagggcgttcaccgcgtcgcccaacgcacgggccatcgggaacaggcggtcatcggtcggtatccacaggagcagcaggatcgggaaggtcgcagaagtctgcaccattgcctggaaggtgttttcggtggtgtcgatcacgtacccaccagcggcaggagcgccacccgcctggccgggctcggccttgacctgatgcttcagcgcctccaaatcgacggcgcccgccaatgagactcccggattgaactgctgctctaccataatgcctcccgattccacgcgattcgcgtacaacaacaatcacatttgctgacattgattgtaatgccgattcccaccacgtagggattcttccactacgcggtgaaattcccaccacgtagcaaaacgcccaccacgatgtgactcaaaacggcaccattgtgcgaaaggtaaaacttaccgacatcgtggtggatgaatcatatcgtggtggggcgttaaccgcgcggtgggcggcggcaacaactacagcgcttcgacctttaccggctgacggtcggcacccacggcggtgatttgctcaccggagcttgccaacggaatgtacaaggccaccacgttcacatacgtgaccttcatggtgctggtgtacttgtcgctattgaacagcgccttctcgtcgtcggaagccggctgcgattcgcggccatcccccgccttgcgagtccattcgccgttaatacggccaaccaccaaatcaccggcaccgtctgcagcacgcatcacccacatctgttcaggcacaacggtgaatttctgctcctgcgtaccgttgttgcgttgcataccttcctgcaccttggccgtggtattggccagttcctggcgcagcaaatcgtctgcgaacttggaagcgtattggctcttggagccgttctgcagcacatcggcgtattgggtcaaggcatcggcgggagtggccaccagcttctcatcctttgcagtgcccatccgcgagccaatagtcggaatctcgaacttcggcagcttggccccctcaaacagtcgagccatggccatcagcttgtaattctgctgggcggattcctgatcgaagaccagcaaacgcttggactgctgatcttcggtggtggtcgtgatggtgaacaccgagcgaggccatccgtcgtccatgggaatcaccgtctgggcgatgtccttgggaatggtcgcgtatttggacataccgccgccgcgctggttgatcgtggtctggctgatgcgaatgtccagctggggcccgcccataacggccgcatatccatcgggattcttggcctgatcggcttcatcgatcgtcttgagaatcttcaggcgaatcttcttctcctgtgcctcggtcaaatccggcgcaaccttggtggaggtatcagcagccggcgtcggcagccggccttcacaggcggtcaacggcacgaccaacgccacgcaggcgagggcggccacacacagtttgttccatcgcttgttcatcagctttcctcctgtccgtcatcggccgagtcgtctccggtattgacctcttgggccaagcgggagaagtaggcctgcagttcgtcaggggtgattaccgaagtcgattcgttatcgccggcgctgaagccggtctcagcgccgctctcggcaccagtctgctggtcggcgaccaggttacgtgaacttgggtcgatgataaccggtgtttcggtggcttcagattgcgaggacgcacggcccgaacgccgatttgtggcgtggcggcgacgattacgtcgacttgcaccatccggcttcccggacactgcgatgctggcgggtgcctcttcctcaattacggcgcttgccgtgccttccaccatgcgcttgcggcgcttatgcggcggcatggcgaacacggaggcgcacaatacggccagcacggccagcaatccaccggacagatagaacggcatcgcaaagtccggcacttcggagcgcacccagtgcagctgcaccttggcgttggtggcattttcacccaaatccacaatggccaccgtcgaggcgccggtcttcttgctctccagcgaaacggacccggtgccgcatttcacggcagtccacatatcggaatccttgaacgccaccgcgtcatcggcactggcaggcgctccctgactcgtgctgcttcccttctgggtgctcagctcgctccatgacgccaatccggtgatacgggtataggacttctcggacgcgacccatccggcaacatccttggacggacccaacgccacgcacgcctcgtcctgagaggatcccgagtccacggttatcgtggcgttctgatccaacaaggtcagcacattcggatcagtgacggcataccgggagccactcatggttgcggaagcggtgatttcagtggagggcttccatatcgtggcattcatgtaccccaacaccacagccgccacggccaatagaccgaagataggcgtcaccactccacgcatgatcttggcatgacgggatggacgcttggcgcccttatccggtcttgtagtctgttcttcagcactcataacttaaccattctacaatcttcacctgtttattacctaggagcgcagaaaatcaaggttcaccagtagggtggtgtgtcatgcgtaagtctgttaaatctatgttatcccctctcggcaaggccgttgctcttgcctgctcgctggcgatgtgcgtatcgctggctgcctgctccagttcgagctcggactcgaaatcctcttccgactcttctgacaagaaggggcaaattgccggcgtgaccgccaagggcaagctcggcgagaagccgaccatctcctttaatacgccgatgaccgtgtccgacggctcctatgtggtgctgcaaaagggcgatggcgacgtgatcgaggagggcgaccgcgtctgcgcccaaggcatcgcgctcaacgttaaagacggcaccgagctcatggacacctggaccaagaacacgccggattgctcgctgaaggtggattccaagaccctctcctcgacctactacaaccagatcaagggtgccaagatcaacaccacgatcggctttggcgtcaacgctcaggattcgtccggatactcttacattttggcgatgacgtttgtatccaagtccaaggacctgaagaaggccactggcgaggaagtcaaggatgtgccggccaatctgccgaaggtgacgcgagccaagaatggcaagccgtccattgacatgaacggtcagggttcggttgattcgctgatctcgcagacgctgatcaagggtaacggcgccaagctgaccgacaagaacaccgtggtggtcaagtacaccggttggcttacggatggcaagcagttcgattcgtcctgggatcgcgattccacaatcgacgccgatctgttcagcgattccagcggccagcatcaggttatcgagggctggcagaagggtctggtcggccagaccgtcggctctcaggttctgctggtgattccgccggatcaggcctatggagataaggagcaaggttcgattcccgccaactccacgttggtcttcgtaatcgatattctcgccgcgtactaaacaatctcgatggctctccccaagaggggagctggcagcgaaactgactgaggggaggcctcacggaatataccgtgagacctcccctcagtctctctatgtacgttcgaaaactccccttcaagagggaagccaagaacaatcagaacagcctgagactgtcgtcctcggtgcctttcatatcgtcgtaatcgaggatgaggcaggtgaagccgcggtccttggccaagacctgggcttgcggcgtgatggtttgtgcggcgaagatgccatgcaccggggccagcagcggatcgcgattgagcagttcgcagtagcgagtcagctgctcgacgccatcaatgccgccgtgacgtttgatttccacagccacatgctcgccctcggcattcacggccatgatatccaccggaccaatggcggtagggtattcgcgacgcaccagcttggctcccttgccgatacgctcgatctgctcggccagatagcgttgcagatggtcttccacgccatccttgatgagacccggatcttcgcccagatcataggtttggtcggaatagatgtgttgcagcgtcacttcaagaatgtcagagcccttgtcggcgctgacacgtagcaccttttccggctcaccagcggcgacactttccggggaatgcgtcgcggaatcaccatccacagccccaccagcgacactttcccgggaatgttgcgcggatttggcggctgggtcgatctcacgaatcgtgcagggcgcggtcatccagttcagcggcttgtaggagcccaattcggagaaaatcaacaggctggaatcagccttgatcagcaatacacgcttggccaggggcagtgaggcgttgaggcggcccgaatactcggccgaacagtcggcaacaataactcgcataggccaccactgtagcgcaacacatggcatacatagcaaaaggggctctctggaaaaccagagagccccttgaggagttggttcagatcactcggcggtgccggagtactggacgtcgtggccgcgctcgaccgccacggtgagtttgttcgagtcgaaggagatgaatccgtcggtcacctcgaacatgtggcgatcgccatcgggctcaaccacggtgagcgtaccctgcttgatcaccgtgagcacaggctcatggtcgggcaggatgcccatgccgccctcagaggcgggaatggtcacgctcgtcgcctcgccgtgccacacagggtggtcagcggcgacgatgttgaccttcatcgtggttttttccgcagccatcacgcacccagttccttctgcatgttgtgccacttctcttcgagatcatcgatgccgccgataccggagaacgcctgctccgggacgtcgtcgtacacgccgtcgcagatgcgggtgaaggcttcgatggtctcgtcggccggcacgtaggagccggggcgaccggtgaacttctcggcaacgtagaagttctggccgaggaactgctcgatcttacgagcgcggttcacggtggtcttgtcctcttcgccgagctcgtcgataccgatcaaggcgatgatgtcctgcagctccttgttacgctgcagaatcgccttgacgcggttggcgcagtcgtagtgagcctggcccacgtaacgcggatcgaggattcgcgaggtggagctcagcgggtccacagccgggtagatacccttggaggcaatgtcacgagacagctcggtggttgcatccaagtgggcgaaggtcgtggccggggccgggtcggtgtaatcatcggccggcacgtagatggcctgcagcgaggtgatcgagtgaccacgggtcgaggtgatgcgctcctggagggaacccatctcatcggccaggttcggctggtaacccacggcggaaggcatacgacccagcagggtggacacctcggaaccggcctgggtgaagcggaagatgttgtcgatgaacagcagcacgtcctggttctgcacgtcacggaaatactctgccatggtcagtgcggtcagcgggacacgcagacgggtacccggctgctcatccatctggccgaagaccagtgcggtcttctcaagcacgccggcctcggccatttcgccgatcagatcgttaccctcacgggtacgctcgccgacgcccgcgaacacggacacgccgccgtggttctgagccacgcgctgaatcatttcctgaatcagcacggtcttgcccacacctgcaccaccgaacagaccgatcttgccgccctgcacgtacggggtcagcaggtcgatgaccttgatgcccgtttcgaacatctgggtcttggactccagctgatcgaaggccggcgggttgcggtgaataggccaacgctcggagacggtgatggtctcatccggcttcttgttgaggatgttaccggacacgtcgaagacgtggcccttggtcacgtcgccgaccggcacggagatcggggcgccggtgtcggagacggaggcaccacggaccaggccgtcggtgggcttcagagcgacgcaacggaccgtggaatcaccgaggtgctgttcgacctcgagggtgatctcggtctccttcgcctcgccttcttccttggcgccggtgttgacgatcgttactttcagggcgttgtagatgtcgggcagatgacccaccgggaattcaacgtcgataaccgagccctggacgcgggtgacgcgaccgttggtaggctcggccgcagtggtctggttgtcagccatatgcgttcctactcttccttcttggtcagcgcgtcagcgctgccgatgatttcggtaagttcctgggtgatcgaggcctggcgggaagcgttgagcttgcgcgtaaggtcgtcgatcaggtttcgtgcgttgtcggttgccgtgtgcatggcgttctggcggcttgcggtttccgacgcggccgcggtcagcaggcactcgtggatgcgggactgaacgtacttcggcagaatcgcgtccagtaccttttcgaggctgggctcgaaagtgtacagcggagcgacatccgcagtagccggtgcctcttcatcaggatcgggcaccttggtctcgtttttcacgatttcgaccggcagcatgcgcagcacgcgcaccttttgcaccaccatgttgatgaactcggtgtagacgatgtagagttcggaaactccacctttctcagccggcttcatgtaggcgtccatcaaagtgttggagatcgtttcagcaatttccacgccgggctggtcggtgtcgccttcccacgtcgccgcgatgtcacgattacggtacttgtagtacgtcgaaccgcgacgcccgtacacgaacagctccggctgcttgcctgccgcatcgaggcgggacagcagcgactccgtttcacggataatcgaagaggtgtacgggccggccataccacgatccgaggtgagggcgagaacagccacgcgcgggttcttctcgtccttcaccgcgatcggatgcgtgatatgggtgtgggccaccaacgcttgcacggcatcgaaaatcgcatcggtgtacggcttcgcgttcagggccacatcacgggccttggcgatatgcgaagacgcgatcatctcctgagcgttgaagatcttcgccaacgactcggtggagtggatgcgtgatttcaatgcgagttgcgagcccatggcttacttttctcccgccacgatcttttcctgatcaaccggcgcggccttgtcaacgtccggcttcttctcgaccagcggcttgccggcggaagagacgaacgtcgaacggaactcgtccacggccttatcgagggcagcctcggtgtcggcggtgaattcctcggtctcgcgaatggtcttgaggatatcggtgttgtggtcgatgtagtccagcagtccctgctcgaacggaaggacgtccttcaggtcgaggtcgtcgagcttgccgtgggtgccggtccatacggacacgacttcctgttccggcgagtacgggtggaactgcggctgcttcaacagctcggtcaggtgggcaccacgggtcagctgggccttggaagccgcatccagatcggaggcgaacatggcgaaggattccagcgaacggtactgtgccagggagatcttcagcgtaccggagaccttcttcagagccttggtctgtgcggcgccaccgactcgagagacggagatgccgacgtccacggcggggcgctggttggcgttgaacagatcggactgcaggaagatctggccgtcagtgatggagatcacgttggtcgggatgtaggcggacacatcgttcgccttggtctcaacgatcggcagacccgtcatcgaaccgccgccgagatcatcggagaccttggcgcaacgttcgagcaggcgggagtgcaggtagaacacatcacccgggtaggcttcacgccccggcgggcggcgcagcagcagggaaatcgaacgataggcctctgcctgcttggacaagtcatcgaagacgatgagcacatgcttgccgttgtacatccagtgctggccgatggccgagccggtgtacggggcgatgtacttgaagccagcggaatcggctgccggggaggccacgatggtggtgtactccatggcgccggcgtcttccaggctctgcttcaccgaggcgatggtggagcccttctggccgatggccacgtagatgcagcggacctgcttcttcgggtcgccggattcccagttggctttctggttgatgatggtatcgatcgcgatggcggtcttaccggtctggcggtcgccgatgatgagctggcgctggccgcggccgatcggggtcatcgcgtcgatggccttgaggccggtggacagcggctcgtcgaccgggtggcggtgcatcacgtcgggggcctgggcttcgaggatacgacgaccctcaatgccctggatctcgccgaggccgtcgatcggcttgcccagcgggtccacgacacggccgagatagccgtcgccgacgggcacggagagcacttcgccggtgcgtcgcacttcctggccttcctcaattcctgcgaaatcgccgaggaccaccacgccgatctcacgggcgtcaaggttgaacgccaggccgagcgtgccgtcttcgaacgtcagcagctcattggccatgcaaccaggcaatcccgtcacgtgcgcaatgccgtcaccggccgtggcgacatagcccacttcctgggtgggggtgtcgctcggcttgtacgacgacacgaagtcgtcgagggccttgcgaatcgaggcgggatcgatggtcagttctgccatgatcactccttctattggttattgttcagtcaagtctttgcttgtgtgtggtgttggacggattggctcggccggtcaggccggagtcgcctccgtctgcaccttgcgatgaaggctctgcagctgtgcgaccacggtgttgtccgtgacttcgtcgcccacctgaatgcgcataccacccagcacggtcggatcgaccaccgagttgatgtgcacctggcggcccaccttggcggagtagacctcgaccagtcgcttgatctgttccggcttcaacggggtggcggtggtcacgatgaccatcgattcgcccatatggcgggagagcttgttgatcagccactggatggtttccaagtatcggcggcggcgcaggttgcaggtggcgtgctcggcgagcctcatggtgaccttgttcagggtcttgccggagaacacctcgcggaacagcttcacacgggcctcgctggtggcctggcagtcgtacagcttggagcggacgaccggcaggttcagcagtgcggaatgcagctcggacagctcgatggatacctgcagcgtggcgtcggtggcgtcagcgtagtacatcatggcgtccacgccgaagtcctccaccgcgttggcgatgtcgcgcgcacggctccaacggcgggagaccaagtcggtcatgatctccatggtcataggatgcgcgttgtcaccgagcagtcccttcaggacggccaccttgtcggcgaccgggcgggacgggtcggtcagtgcgcgttccagctgaatgctgtcatcgagcaccttggtgatcgtgaacagttcgttgccgatccgccacgcgtcctcacgggtgtcgcgcagtttcggggccagcgaatcacgcgactcgcggtctgcaatacgtgatgcctctcctcgcatggtcacctccctttctggttacggatggtcacggtcacttcttggcgcccaggtcgtcgatcatcgaatcgatcatcgaggactgcacgtcgctgtcttccagcttggcaccgaggatcttgccggccaaggcggtggcaagtgcgccgacctcgcccttgagcgagacgatggcctgctggtgctgagattcgatcgagcgctgtgcggatgcggtgatctgggccgcatcggactcggcgcgggaacgagcgtcggcgatgatgtgggacgcttccgcacgggcgtcgtcgcgaatcttggcggcgtccacacgggcggtgctcagctgggcctcatacttggccttggcctcgtcggcgtccttcttagcctgctccgccttggcgatgttgccctgaatcttggcggcgcgctcgtcgaagatcgcattgaacttcggcatgaagaacttgtagaagaacaccgcaacgatgacaagaatgatcagggaccacacaatgtcataggtctcgggaatgaacagatcaattccgccttctgcgagcgtcattatgaagtcctcctttcactggtggattcgttttgccttctgtattcgactgagaaaacgttcgatcagtggaacatcagggcggtaacgaagccgatcagtgccagcacctcgatcagagccaggccgatgaacatgatggtctgaatcttgccggacatctcaggctgacgagcggtggattccatggccttgccgaagaggatgcccagaccgatgccagggccaaccgcaccgagaccgtaaccgatgacggacaggttgccggcgaccgctgcgagggtgatgatatccattgtgtttcctttctaacgtacttggcgacgttataaatcttatttcgttcggtcctgcctacctaggcgaggccgggttccgaaagagggggttgaacctcactcctccgggaagcttaggttgatgtacacggtggaaagaatggcgaagacgtaagcctgcaggaaggcgacgaacgcctcgaagcacgtcatggcaagaccgctgacgaaccacatcgcgccgactgggatgccttgcagcttgttggctgcatcgacgatccagtactgtgcgaatgccaggcaggtggcgaccatcaggtggccggaaatcatgttggcgaacagacggatggtcagggaggccggacggatgaccagcaactcaaggatgttaatcggggtcaacaggatgtagaccggccacggcacaccgggggtgaacagctcgtgacgcagataatggccaagaccttgcgaacgtgcggcggcgatccaatactggaccatggtccagatggcgaacaccagcggcatgaccacagtggcggtggccgccatgttcatacccgggatgatgccacacaggttgaagatgaaaatcgtgaagaagatggtggtgatcatcggcacgtagcgcttgccgcgaacctcgcccatcacgtcatagacgaccttgtcacgcacgaagtcaagaccgtattccaccacgccctgccaacggccggggatgagcttggcgcgctttgcggtcacgccgagcaccaccaacagcacgatggttgccacgatacgaatcaaaataatgcggttgatagcaaacggagttccctggaacagaatctccgggggaaggaagtcaccaaccgagggcagatgagcgcctgcctcgtcagccaacagcaatcctgcgccgagcgaaccgaccatatcacgcctcctgcttcttcaatatcaggtgtcagtttaaacccaccgggcaggcaaatgtgacgtgctcgttactttcgtctcctcggtgtggagtctgccgggcgcggacacggagtctgcgctgggcattcggctccgaatgactgaagagtgattatttgcctgcgtctagacaatgtcaatactacaccggcgcgtcttctggaatcggcggcggcgcaaggtttttcggatgttgcgcaagcgttgtgcgctattagtcataatacgaggatgtgcggcatttgcgctaccctctgatcactccgtatccgtcgtgggcgaacggcttgaaatcatcctggcgcggcccgcccggctcatgccgaatcgaacgatcagtaccgagcttcttctcagccctgagctgcggcacctcggtcaggtcgtacggcgtggtctggtacacccagttgagccagttgcgccacagcagattggcgtgggcacgccagacgaacaacggttccagcttcggatcgtcatgcgggaagtagttcttcgggaagggcacgttggtcatgcccttggccatatcgcgctcgtattcctcggcgagcgtgtacttgccgtactcccaatggccgagcgcgaacacttcggagaagtcacgtgtggcgattaggcccgggccggactgcggcccccaagtcaagatctgaaggtcatggttggcacgtacctcgttttcgttcacgccggcgaggcgggagtgcggctgcagatcaatctcgtcgaagccattggtcaggaagcagtattcgtcctgcaggtactgcgggaatacgccgaaaatcttctcggggtaatccaccttgtggatgccgtagcggtagtacagtgcgcccatcgcaccccagcacaggtacatggtggagaacacatgggtggaggcccagtcgagaatcgtcttgaactcgtcccagtagtccacatcttcgaacggcatatgttctacaggcgcgccggtgaccacaaaaccgtcgtaatagttgtctttgaacgcatcgaggttttcgtagaacttgacgagatgatcggcggaaacgtgcgtggcctcatgcgtggaggtcttcatgaagtcgatttcgacctgcagcggcgacttggaaatcagacgcagcagctgcgtttcagtctcgattttcttaggcatcaagttcaggaccaccagtttgagcgggcggacgcgctgacgctccgcctcgggcttctccagagcgaagatgcgctccgaatcgaggatatctctggccggcaggccactggggatcttgataggcatgttcctattatgtcaatattcgggataacggttcagggcattcctataacggccatttatggcgcgttatcaccccgactccggctccgccccaaacccctcgctgcgtgtgagccgattcacgttttaaaaccgtgggaaaatgacacgacacgccgatgttgactttctggaatctgcacctattgtagatagagctgtctgagagacaagccgacgcggggtggagcagctcggtagctcgctgggctcataacccagaggtccatggttcaaatccatgccccgctaccattaggccgttagggtctaggaatctggccggtgcaattccaaggaattgcccggctttttccatatctgcgatagtccatgcggttacaccgcgcattttctgcgatatcagcgttcgagacacgccgaaggccctagacaaatcggattggtttttattcctcattgccagcgccaccctcatgttgccgctaatgacgctttccagtgaaattgcttgcgtttcacgctctaacgtttgtgtagtcatgctaaacagtatacacgactgtttagcgttggttaactcttattaggcaatatctgtaaagtttgccttctcattggtatacaatgcaaagcatgacttctcaaatcgttgccgctggcgctgccacggccattgacttgctttgcaaaagcaatcatgtaacccgcgccgaactaagccgcgaactgcatataacccgttcggcaatgtctcaaaagatgaccggcaagagcatgttcacacttcgccagattcgccagatcgctgattatttcgatgtgtccgtggactcgcttcttggccgcgcccctttggaggtgaagtgatggattggcatcttgttttgtcgtcgttgacatttgccatttctgttgcttcgctcttggtgtcgcggcacgcttggacgatcgcagaggaagcgaagggcaaggcccgtcactcgttgagggtgtccgtctattcggtcgaggttaaccgcaagcggcttggtattccctatgaccatgatgtggttgaacagtacgaggccaatgagggcatttttgccagcatgggtgtcggttcctataaaggcaggcgatgcaaggattcggacggtatcgtgcagtccgacgacgccgtacaggtgttctcggacggcacgtatcggattgttcctaggacagaatctttctctgttctgaagcccgttttctgtcgagttcatggaacctgcgatgacccttcctgtccctatgccatctccgcagtcgttccaagggtccgcacttccatggttctactcccaagatcgggaactgcctatatcgacaccggcgaagacgagttggagatgatacccaatgcacgccaagctctagcttcgtcagatcgggttcaatgtcgcgactcgaatcgcggggcggtgtgatggtgacccagaatcgcattgtttcgttggtcaactcgactattcgaccggtgttggtcatgatccatttggtttgttcgcccagcaccgtttcgcctatctgccggcagtcccacatctcggcatcgcagtttatgccaatggctttgacgttgaatgcccgtccatccccgcagttggccagccatccgatgaaaaccgggtcaacgccggcgcgtttgaactcgggaaacaggagcatgtcgccttgcacctgcacgaaggcgggttcggcctcggaacgccaccgccatgcgcgacggtatgtggccaacgatacaaggaacgccagcacggcgataaccacgctcgccgctggtgcgttggctttcagtgcgtcgatggcgttcctcagtagctcgaaccatgtcaggtccgcgtccatttattcttccttccttcgttgtttccgacggcttgtttgtgttgcagtttccagcctatcgctgcggaggaaggagcctaaccatccatccatgaatcgaggagcagtgaaatgagcgttcgtttcgagatcaccacggaacccggcacagttgcgccgggtgatctggtggtgttgcgtctggtgacccagaagggcggcgtgaagtggacgtgcggcccggtgcgctgcttcacggacgacaaggacatgcccgcgatagtgcttaccacgggcgcgattcctgaatacgcgggctatgagctgatttgctgcatcaagtcgataccggacgcggtgcagctggatatcgaggaggcgtgacgtgatccgcaagctttttcagggcgtggtgctgctgctgatttcaccgctggtgatgttctcgctgggcttgtgtctagcgtgggacggtatcgccgagtttctggggtggcgtgatgtatgagttcaccgtcagtcgctccgctcaggggtacgtggtcgtgacgatcgtcccgctggtgcgttcgcgtcggcgcgaggatcgcgggcgtatctattcgttcacgcgcgaggaggcgttgtcgttgttccacgagctttacgcggcgttgtcttcgccgcctgaataaccattcgtttttctggataactgaatgtgccgtgaccggggatgtgcagggacccggtagcacgttgacgggtctaacccactgcggacgtctggcgcaacgttacgagcggaacgaaacctgacctgtggtcttgagcgctttccctaccaccagggcttgccggttaaggcgtaatagggcggcgtaccgcgattgcgggggctctggcgggaccattcacggcgggcgtatgcccgctctcgacaatgcgacggcccggctccagaccgaaagtctcgcgtggagacctgtagacgacgaagagactacgaacttttgttcgagtctttttcgtcgcctgcgtttaggtctccccgctctaaccacccaccacccaaaagtctctgaatgaatcaatcgaacgaatcgaggtagctgttatgggatatgcagtcgattacaaaccaacacgcaaacgcaacgtcacccagtcgccggcgtccaagtcgaaactgaggatgctcagggcgatggtgaagtattcgttgcctcacatcgaggagcggtgcgcgtgttcggagaccatcaccaggcaggagctcatgacgatgatcggattgagcgtgaagacgccgggagcggataacgatatgcaactgatcctgtccgaacgccagggcgcgggcatccgtccggtgggccgcatgctgggcatgaagacgtatgactgtcgtgatgtggtcgcgtcgttcaaggcgtggtgccactgatgggccgtggtttcctgtacgcgcgtgagctggccgagttcctaggcaagtccgggcagacgctctacatgtggcgcaagcagggcaaggggccgaaatggcggatgctggagggccgtgtggtgtatcgcgtggccgatgtcaacaagtggcttgggaggcagcagtgaagcgtaagagggtgccgccgagcatggccgctcaggtgctgctcatgttcggttcggattgttggctgggcatgccgggttgcacgcaccaaggcgcgcagaccatggaccatgtgaagccgtacagtctgcacggcccgaccatgccggcgaatcttcgcccggcgtgcaagcattgcaactcgttgcgtgcggatcgtgtcgtgaacggcttcggcgcgcaggtcactgccgtgatagggccgccgtgcgtgggcaagaccgattatgtgcgtgagcacatggcgccgggcgatatcgtgattgacccgtcacggttggcggccgcgtgcgtggatggcggcagcgaggctcacgcattggccgatgtgctgtggggtggcgcgtaccgtcgtgtgtcacgcatgctcacggcccggcatgtgtggctggtgcgtgcgttgcctcagtcgcgtaacagcccggatatgctggccgagtggatggcgttgaactatgacgtggtggtgttggacatggacgacgcgcagctgaggcagcgcatggccgagcagggccgtggccgtgaggacatggagctgctgaagcggtggcgtcgcctgggcatcacccagtcgcgtgttgacggcctgctggaacgcaggcgcgcgtggctggcgcggcttcgcctgctcgatgctccgagctcgtcgccggcggcgtcggcgcggccgcgatggtagccggttttttaagagacgtatctgaagggacaccccgcgcccaccgatttcgtatccccaacccaaataaaaaaagccgcgccgtgaagggcgcggcgctccaccaatcggcggaattaagccagttccagacagtaacaccgataggcaaggagcgcaaatcatggacgataacgacaagcagatgacacttccaggcatggaggacagcgacgagctcacgaacccgctcaccaactcgaccaaggagctcgtcggcgagttgttgcaggacgacgcgaacctgacgccgcagcgccgagccctgtgcacgctgctgctcacgtgcgcccgcaccatcgaccggttgtgtcgcaagggccgtgatatctcccgcatggtgacgagctataacgagaccatcgaccggttgcagccgtccgaatcgtccgcgaaggccggcgacctcgcgcagctgctcaaggacatgacgcagtgaggtcggcaccggcgcgccacgcgaccccgcgcgacccgtcgcgtgccactgacggcggcaaggtcgcgcgtatttccgcagcgttgggtcagccgctgatcccgtggcagcagcaggtcgcggacgttgccggtgaaatcgacccggaaactggcacgtactactacgaccgtgtgattgtgtcagtgcaacgccaggccggcaagacgaccatcagcaaggccgagcagttgcgcaacgcgctgcttgggcccgaccgcgaggtgtggtatctggcgcagaccggcaaggacagcaacgagcagttccgcaagctcatcaaaagcgtggtgcgttctcccctgtcggcgctgatcgacgggaacccgcgcatgtcgaacggcagcatggcgttgccgctcgtcaacggcagcacgttgcggccgggaagcatgaccgagagcgccggccatggtttccaaggcgatttcatcaaccttgacgaggtatgggcgttgtccgcgttgcaggccaagcagattcttgacggcttcatcccgacgacgacgacgcgcatgcgcgccaccggcgtgcggccgcaattgtggatcacgagcacggaaggcacggccgaaagcgagtattacaacgcgctgcttgaccggtgccgtgccggcgacatcccgaaacggtgggcgttcttcgattgggggctcgacccgtcactggacagcgaggatttgaacgccgtggcccgcgcgcatccgggttgcggctacctgttcgaccgaaagcagcttaaggacttccgagaccagttcgccgacgacccggccggctggcgtcgcgcgttctgcaatctccgcgacacgagcagcaccgaacgtgtctacccggcggcgctgtgggccgagaccgaaacggaacagcttgatttatcggcgcttgaccttgacacgctcgcgttcggcgtggccgtgggcatggaatccgaatcgaccgcgatagcggccgcatgccggcgtgacggcgtgacagtcgtgcagatcgtggacgtgctgccgggcacggccggcgcagccgaacgactggccgacctgcaatcacggtatggcgacgctccaatcgccatcgacaggcgcggcccgtcggctccgttggcggatttgctgcactcgacggcgccggacggcacgcctgaataccggttgtcggatatcgggaacacggagatcgtggccgccggcgtgctcatgctcgaccggctcatgcagcatcaggtgctgcacgtgcccgaccctgcactggacgccgcagccggcgtggccgtgcgcaggtgggtcgccgacagctgggtcttatccaggcgcaacagcgaacaggccataaacgcgcttgaggccgcgcagctcgccgtcaccgcgtcgctgcacgctcaaccggccgcgcctttgcagattttcgtttagacgtttttagatgttcttagacgtttttagatgtttgttgatggtttttttgcgtggtccggcatgtgtggcgttgaatcggccgcatgagtcttctgtcacgcatctccagcaccgccgcgttgatgttgcgcgccgcgcaggccacggccgacgacggggattccgaagcgcccgtgctgcctgcacgcccggaagcctcgcatgatccattggcgttgtccaccgtgtttcgcggcgtgcagatcatcgagaccgccgtgagcaagctcccggtgatccagtacgcgccggacggctcgcgcatgaggccgagcacgctcatcacccgtcccgatttgaaccgcagccgccgcgacctgttcggcgacctcgtttcagccctcgcgttgaacggcaacgctttcctgctcaaggtggaaatctccggcgtgctcgtcggcgtgcgcagcctgccgccgcagctcgtcaccgtcaccgatttgaacatggaccccgcgaacccgcgcctgcgctactcgtatcgcggcgtggactacggcgccgaccgcatcgtgcatctgaagctgctgaacgtcgccggacgccttcgcggcatggggcccatcagcgcggcgcgcgaggagatcgagggcgctcaggacacgcgcgcctacgcggcgaactggctggacaacacggcacggcccgccggaatcctgaaaagcgaccagatactgagcgaccaggacgcgcagacggcttcggaacgctgggccaagggcggcgccggcggcgttcgagtgctcggcaagggcctggactacacgccgttggcattgagccccgaagacctccaattcatcgaatcccagcagttcaacaccacgcagatagcccgcctattgggaatccccgcgtcgctcatgctcgcgaaggtggaaggcacgacgctgacctactcgaacatcgaacaggaatggctcacgttcgccgaatacacgctgagcgcctacgccgacgagatatgcgaggccctgtcatcgctgctgcccgaaggccaatgggtcgaacccgattgggattccctgcaccgttccgacacgaacacgcgctattccgcctaccagaccgccatcgccgccggtttcatgaccgtgaacgaggcgcgcgcgaaggaaggatgggcgcccatcaatcagacagcaccgcaggaggtcgcattatgagcaccgagaaacgcaccatcaccatgaggggcatcgagctacgcgagacggaaggcgacggcaccagcatcgagggcatagccgtgccgttcggccagcgcatcggcctgtggccgggcaccgccgaggagttcgcgccggactgcgatttcggcgacaccacacgcacgaagctcagccgtgaccacggccgtctcatcggcaagatcacgaacgccaccagggaagccgacggcctgcatatcaccgcagccatcagcgacaccgccgaagggcgcgacgcggtgcagctgatccgtgacggcgtggtcgattcgttctccgtgggattccagccggtgacaacggacaagcgcgtggaaggcgatacgaccgtgtacgtgcgccgcgcggtccgattgctggaggtagccgtcaccggaatccccgcctatacgggcgccgccatcaccggccagcgcgaccaggaacacgtcaaccaggaaaccaacgaaaccaaggagaaaacagtggaaaacgaacccacccaggaatcgcgtttcgaccagctcgaaatgcagattcgctctctcgccgacaccatcgaccggcagcagcccgaaccgccgcacatcatcggcggccagtaccgttcggccggcgaatacgccaaatcgctcgcggccggcgaagacaccgcgtatgagttcatgcgcgaggcccgcgacctcatctccagcaccgacgtgcacaacacgaacacgtgggtcgccgaccagattcgactcatccagtcgcgccgcagcgtggcgaccctgttccagcatgcggcattgcctgccaccggcatgacgctggaatatctcaagctcggatcgaacacgctcaaggtcacgcagcaggccacggaaggcacgacgctggcaacgggcaagatcacactgaccagcgcgaccgctgccgtcgccacctacggcggctacgcacagctgtcacgccaggtcatcgaacgcagcaacacgcccgccttggacaccgcgcttcgcgcgctcaccatcgcgtacagcaacgccgtggaatcggcggcacgcgccaagctcaccgcagccatcaccgccgcgacggcgaacaagctggacacgccggccgccgtgagcacgctcaccgcagaccagtggattaccgtcatcatcaacgcggccgaggccgccgacgctcgcggcgcccagctgggcacgctcgctgtcagcaaggacgtgttcgacgccatggcgaagatcacgcgcagcggcgacgcgctcatggacgtttccggcgagggcgtggacaagctcggcagcatgagcctcaccggcgtgaccggccgcatgctgtcggttccggtgcgcatggtacccggcgcggcagccaacacagccgcgttcatcgaccccaccgcattgcagatgtgggaggccggcggcccgttccagctccagcaggacgacaccacgaaactgctgtcgaactacagcgtgtacggctacgccgccttcgcgaccgtgttcgagggaggaatcatgccgctggccccaaaagcgtgacccctcccccgcctgtagcgtcgcgtaacctgctcgcctacggcccggcctccggatcgggactgacggcgactgtgaacgaggacggcagcctgcacctggccggtgacgcggcgacagccaacaagggccttcggtggcggtgggagtgcccggacacagcaaagggccagacggtcatctattcggtcgcgcaattccctgccggcacgtactcgtacttgcaggcacgtggcaccaacctgagcctgctggccacactcgaaaccggcaaatcgagcgtcatcccggaggacacggtcactcttgaactgcgcatcgcggcatcgaccaccaatccgatcgacggcgatctgcgagcacagctcgagctcggcgccacggccaccgactggacgcgcccggacaacacaggcctcgagggggggggaactgacttgaacctctatccattgccgaaactgccggccactcgtgacggcgtggcctacacatacaagtcggaaggcgtcattcacgccgtcggcacctgcaccgcatggggcggcgtcggcagcgaagtcacgttgcagcccggaagatacagcctggccggcagcgtcggcaccgatagacagaacctgtatgcgcagatcaccgttgacggcaagaactacaacacaatctcaaccgaaccgttcacgataaccacggccggcacctacagctgcggtgtcattacccgcaacggcagcaccgttgacgcggacatcatgcctgtgctgaccgccatttcagacggaacgtccgagaccgacggataggagagcgtatggaagaagacgccttgcatgcggatttcctcgcgatgatgaacgtcatcggcagcgaggacgagaaacgcgccgacggttgcctgaaaacggctcgcgcctacctgtccgcgaacctcggcagcacgtgggacacgatgccggtactgatccaatcggattgcgtgctggccgttgccgccgatttgtacaaccagaaggacgcgcgcaacggcgtcatgaacgtggacagcgattccatcgaaccgttccgcgtctccgccgacccgttgcgtgccgcatggccgaagctgcgcgcggccggcgtgctcgcgggaatgggcatcgcatgaccgattccatcaccgcgaaactggacgcgctcatggagcaggtcgccgccacgtgcggcgacctcgtggaccatgtgaccatcgacgagaccgaaatcaaaccgtcgcgcggcaaggtctccgcgtggctcaaaccaccggagatcgaatggccgtaccagtcggcggaaaacgagctgtcgtgccggctcgtgctggtggccggctcgccatggtcccagggctcggcgctgccgctgctgctcgtcgcgatagaccggctcgccaccggcggcctgccggtggcatctgccttgcctgtcggattccaacgcggtgacgcgactctggcggcctatcagatcgaaatcaacgacatctaacgaaaggagccaatcatggctgagaaaatcaggaccttgggaccgggaagcctggtcatcggttcgagcggggacgaatacaagcttgacgtggattgcacgtcggtggaactctctcccgacaattcgagcgaggacccggatacgtatctcgacggccacgaggagggcggcgcgctcagcacgtcgtggaagctgtcgggaagcatcggcgaggacttcagcatgaacggcgcgcaggtgtattgcctgaaccatgcgggcgagaccaagcccgcgaagttcatcccgaacacgtccggcgcgctccagctcgacatgaccgtgaccatagcgccaatcgcgttcggcggtgacgtgaagacgaagaacaagaaggatttcgagttctccgccaccggcgtgaaggccagcgcgtacacgaagccgagcgcctgaacatggcggacaaggccctgtacgtcgtcggccagaagcgtttcgttcagaccatgcgcaaggccggcgcggatatgcaggagctcaaggaagtcaaccgcagggccgccgacatcgcaaaacccgaggcggtggcccgcgcgccacgcggcaagaccggcagactggccggttccatccgcgccggcgccacgcagaaggccggtatcatccgcgccggccgcaagaccgtgccgtatgcgggcccgatcaattacggctggccggcgcgcaacatcagaccgagaacgttcgtgaacgacgccgtggcatcgacagagagccaatgggcgaaggaatacgaaacgttcgtgaagaagaccatgaaccagatcaagggagcctagatcatgcgaagcacagcgaaagtcacgtacaccgacgggcatgtggacgaagcgccgttgacgccgcgcgtcatcacgtcggcggaggagcacgcgcagaaggagggatgggcgccgggcgaggcatccaagattcgccagtcgtactacatggcgtatctggcgcaacgatacgcgggcaacaccaccatgccttacgcgcagtggctggaagaggtggacgacatcgacgtggagacgccgaccgctgaaaaccctaccgtctagccgagtggcccgacgattcgctgggcatgctgtcgttcctgctcgcggcccgtttcggcggcacgccgtgggcatggaggcatgaggccagcgaactcgattggggcaccggcatgaggttattgcaggacgagatagaacacatggaggaggtggaccgtgggtaaaagcgccatcatgagcgtgcggatcactggcaacagcgacgacgcggtgaaggcattgtccaaggtcacggccaaggccagcgcgttcggcacgttcatgggcggcgcggcgctcaagggcgtttccgcgttgtgggacacgctcaagggcttcaccagcgcggtcatggacatgtccgattccacggacaagttcaaaaacaccatgaatttcgccggcttcgacacgagcgccgtggaggccgcgacgaaggccacgcgcgaatacgccgacaaaaccgtctacgacctgaccaccgtgcagaacaccacggcgcagctcgcggccaacggcatccaggattacgtcggactcaccgaagccgccggcaacctgaacgccgtggccggcggcaacgccgaaacgttcaaaagcgtcgccatggtcatgacgcagaccgccggcgcggggaaattgacgaccgagaactggaaccagctgacagacgccataccgggcgcggccggcaagctccaggaagccatgctgaacgcgggcgcgtacacgggcaatttccgcgaggccatggaaaaaggcgagatcacggccgacgagttcaacaaggccatcatgggcctgggcatgaccgacgtcgccaaggaagcggccacgagcacgcagaccatggaaggcgcgctgggcaatcttgaggccgcagtaaccggcggattgacggacgctttcaatctgttcaaaccggccgtgaccagcgccatgaccgtggccgccgacaagatcagcgcgttcagcggcaaggcgacgaccggattgcagggcgtgataaagctcgtgcgtgacggtgatttcagcagcgaattgcgcgaagcgttcaacatcgatgaagacagtcccgtcgttgatttcctgctcaccatccgcgacaacgcggtgagcgcgttcgatacggcgaagcagaaggccggcgagttcgtggccgcattccagaacaccggcccgatgcaggccgctgcggacatcttcggcgcggtgtgggaggcgtgcaagaacctcgccggcgcggccggtgacgtcatcggccagttcacgccgttggcggattctatgggcggcgcgtccggcgccggccaggcgttgggtgacgcattcaacggcgctgccgatatcgtcggcatggtttcggacaagctcacggcgttcagcgactgggtatccgagcatgcggaacccgtcgcgtccgcgcttgtgggcatcgcggcgggtttcgccgcgttcaaggtcgcttcggccatcagcgccgtcgtgtccgcgttgcagggattcagcgtggcgaccacggccgcttctgtggcgcagtgggccatgaacgcggccatgaacgcgaaccccatcgtcatcgtcatcaccgcgatagccgcgctggtggcggctctcgtctacttcttcacgcagaccgagaccggccgtcagatatgggcgtcgttcacatcatggctgggatcgtgcgtgggcaacatcgtgggattcttccaggcgttgccgggcaagattggcggcttcttccagtcggcagcgcagttcgcgaccgacaagtgggatgcagtcgtggcgtggttcaagggcattccgggacgtatcaccggcgcgataggcaatgtggggcacctgctgtacaacgccggcgcatcgatcatcagcggtttccttgacggtctgaaaagcatgtgggattccgtgacgggctggatttccggcatcggcgactggataaccgagcacaagggaccgccggaatacgacgccgtgatgctcgtcaataacggccgtctcatcatgcagggcttcgccaagggcttgcgcagcggtttcgacaccgacgtgcggcgcaccatctcacggatcaacggccgtatgggagggctcagcctggacgccggcatgaacggcggcacggtgggcggaaccgtggtgaacgtcacgttcaacgctccggtggaccgtgagggcgtggcgcgcgagatcaggaagattctcggcgattacgacaggaagcggggcaactagtgcagcagtgtttcatgttcctggactggggcgacggctggaagtccgtcaacgaccatgccgaggacgtggccgcgttggccggcttcagcatccagtggggcaccgacgacctcgccgaacagcccgaaccgtcggtgatgtcgttcaccttgcgggatcgtaccgggtggctcaccggccgcgcgctcacattggccggggcccgcgtgctcgtgcagatcagcgaacagcccacgtggggcatgctccgagacgatatgggcccatggtcggcgcagcatatgcgagtggaagcgatgcaccaggcttacacgcccagcctgccttccagcacgtccagcacggcaatcaccctgttcgacggactggtgcagaacggcggcgacgcgcgaccgcatggcgacggatggctgctggaattgagcgccagcggtcgcatgatcctgtggaagagattgcagaagcaggggccaacgtcatccgacgccaggtatacgggactgcattgggtcgccggcatgagcggccgtgtggaagagctcaaccggcgcgccgccgacgccgacgctccccaggtctccgtatccggtttgacctccaccgattccatggcggcctataagaccgacgattatccgtcccaactggatttgctgcatcgcacgttcgcgcatgagagcatgtggcccatctggtacgaatacccggatcgtgcggtgagccgtctggattacatgccgttcggcgttcccgtgacgctcggcgtcgataccgtgggacggttcaccgtgaccgactggaccggagagacgctggacggtttggacgctgccgaaatcatcaccgacgacgaacagacgctgaccatcccggaacccgtcacgcagttcgtcatccagggcaagaccgcgaaggcaagcgacggcgtgcttgagttcgaccagcacgacaccgagctatccgacctcggcacgctgccggccaacctgaaaaccacccagtcaagcgtcaccgttgaagccgacgtggtttcagcggacgaaagcggcggagtgtgggcccgcgcaggcggcaccgtatggacgcctggctacgatgaacgcgcggcgttctcccgtctgctcgtcacggttgaccggcgattgcggccggagaccatcgtgttcgacagccgcaggctcgacccagcaacgcacgcgcgcctgtatctcaccgccagcagcggcccgctggtcatccagggagccacgtcgtcacggctcgccggcgacgacggaaacccggcggcatccggcgcgtgggcaagcatcggcggcacgctcacctaccagtggaggagcggccggccactgctccgcaacgaggtgacgttatggccgctgccagtcgccgcagctgccgtcgccacctgggcagacatgggctcatggcccgtcacctggactcaggcggcgttcaccttagctgaactcgcgctgattcacgactaccagcaacaaaccaccatggaggaatcatgaagaccacggacatctacggacttccatacatcgaggccggcgacctcgtatccgccgcgccggcgcagttcaagaccatggccgagggcatcgaaaccgctctggtcgaggtcgattcacgcaacacgccggccggggtgaaacccgtcatcgccaccaccctggaaacattggccggcatcaccggcgtgaccggccagaccggctacgtcaccgccgaccccaccgaaagcaacaacggcccctattactgggacggcaccgcgtggctgccgtacgcgaccggcgcgatgctcgacgccctgagctcgcgcgtcgcctcgaccgtgcagaccctcgccgtgtacgcgcttctgggtgccatcaccgtgacgcgcagcgccaacgtggtcaccgtgcacgtggaggcgtactacaacacggtctggtcgatgaacgtgggcaccacgcgaaaactgctcgacgacgggaaactaccctcgcccgcgaccaccctcatcttcccggcgatagtcaacggccagggatactggaaccgtcatataacggcgaacgtcacggccaaagggggcctgaacgtcacggcccgcacggacgtgggcttcaacgccaacgaaaaaatgggattctccctcacctacgtggcgaaggaacaaacaggaaaggaaaaacaatggagacgaccgaaatcgcggcgttgagcatcgtgggcgtgctcatcgcattggattatctgacgggcctcatgaaggccgtccacgcgcatgacatcagcagtgagaagatgcgcgagggattatggcacaagagcgggctcgtgctcgtcatgctgctgtccgagatcgtggaacgcggccagtcatggctcgacatgggtttcgcggtgccgttgatcgtgcccgccgccgtctacatcagcatcacggaaatctcgagcatcatcgagaacatcgccgaactgaaccccgaactgcgcgacggccccctgctcgacctgttccgctccaaaaaagagaaagggggcaggtgatggactacagcacactgacccccgacggcaccctgctgctgggcaagcactacacgccgggccgcgccggccaccgcatcgaatacatcgtcctgcaccacaacgcgggcaacctctccggccgggactgctggaacgtgtggcagacccgccaggccagcgcacactaccagatcgacgcggccggcgcggtatggcggctcgtcaacgaccaggacaccgcatggcacgccggaaacctcgcggcgaaccagcgcagcatcggcatcgagcacgccgacatcgcctcgaacccgtgggccatcagcgaccagacacttgacagcggcgcgagactcgtggccgcattgtgccgccgataccagctcggacggcccgaatgggggcgcaacgtgttcccccacaaccatttctcggccaccgcgtgcccggcaagcatcgcgggaagccagaacgcggcctacatggcccgcgcgcaacaatattacgacaacccggaaggaaccgacatgccagcaaagaccgatccagtgaacctgcccaacggcggccagaccgtcaccgtggaatacatgctccaggcgttgatgaaccagaacaccagcgtcatcgccaaaatcgacgccctgggcaaacgcctcggccccatcaacgagaaaatgccctacgactacctgcccgccatcctcaacaacctcaacagcctgttcgccgtcgtcggcaagatcgacggccagggcatcagcgacgaccagctcgccaaactcgccgacagcctcaaaaccggcctcggcgaacaagtcgccgccgaactcgccaaacgactcgccgactaggcctgtttgagcaacgtggcggccacggcgaccctcaatcggtcgtcaggcatcgccacgtagatttgcgtggtctccacgctgctatgtcccagcagcttcgagaccagcagcagatcgtgcgtggtctcgtacatgcgcgtggcgtaccggtggcgcagcgagtgcggccccccaaccgtccggcagcagccgtgtgaggtggcgggacacatacgatttttcgacgtgtccccgccaccggccggggaacagccaaccgggcgcggccgttatccgcttcgccaggtcctcgcttatgggcactatgcgctgtttgtcgcccttgccccgcactatcagcgacgggccggcgtcgccttccagcacgtcgcgcgagtggacggccgcgatttcggacagcctcaacccggcttctgctccgagacgcagcatgagccgttccacatcgttcgcggcgcacatggcagcgtatatgtgcacgtcggggcacgggcggggatgcggccgcgtcttgcgcaccttcggcagcgcggcggccggatcgtccgcgcgccggcccgtggcatgcagccaccggaaaaaaccgacgagcgtgtttcggtagcccttgcgcgtctccgccttccatgattgcgaggcggtccaatgcactagatcctccgacgtcacgtcatagggcgatttatccaggcaccgcgccgcgtggcctatcttgcaccgccgcgtgttgacggtgtcctgactgaggcccgccgccgtgagcgattcgagccatagggtgatttcgtcccgccactgagcagggggcagctttttgtgcatactcacggccggcatccttggcggccggcggcattacgccgctaggataaaatcaaataatcgggcttcatggatttgaaccgtggacctctgggcaacaacgttaccagaggtccacggttcaaatccatgccccgctactgcgggcgaggccgtcacgattattcgtgacggcttttcgtttatccgccgtcgtgccctacggggccgcatatccgatcggggcgatgatgtcctgtgaaaaaacaacatccaagcccgctctgggcagaatcaatcaatctatggctcgactccctcaaggcggcgggctactcccccaacacgatcggcacgcgccgatgccagatgcccgcattgtcgagggcgcttaagggcgatctagggacgtggagggcgacgacctcgccctgctgatccgatccgccaacggctatctgttccccggccggtggagcggccacgcctcggtcgagaccacgcaacggtacatcgccatgcccgacgaccagctgcacgccgccgtggaagccacgcgcctcgccgcctaggaggatcacgatgttccgtttccccgactcgattgtggtactaaattgattatggtactaaattatggtaccataataagcatgatcgaatgtgaaccgtcagccttcaagcactggttcacacagccacagatcgactacatattccggcatccggtggccgtgttcgaggtgcagtcgagacacgccggcgacagggtcatggcgatcctcggacacccggacgagttcagggaacgccccgtggagctgctggtatcccagcgcacccgcaaggtgttccacgcgatggactgccgccgcgaatggctctacaagttcgacgactaaaaaacaccaaggaggacatcatgagcaacgaaacagactgggacgagctctcggacgaatacaccgagcacacccccgccatcatcggcgagaccatccgcccgcaaagggcgatcacgatggatgacatcgacgacatcttcgccggccgccccctcgccgaccagccccgccggaaggccgacgtgctctacaaggcatacctcacgcccgacatggacgcacaggtgcgggcacaggccgaacgagagcacatcggcaagagcgctctgatccgcaaggcactggccgcatacctgaccgccaatcaggcacagcccgcgatggcctgacccatatacggcgaaaagcccccgaacctgccgcgtgatacggttcaggttcgggggcttcttgttattcggccttggatgccttggccttgagggcgctggcgccgatgacgacgccgatggtcagggcgacggcgctgatggtcgtcgcggccggatcggcccacgtccagccccatacggggccgaaggtctgcacggacggtcacggtacgggacggtggggcgttgctgccggtggcgacgctgccgccgccgttgtaggtgacgacctgaccggggcgatatggatgaaaggcgatcaggcagctacggtgcccagggaagtcggcgatcataaacgtctcgtcgttttcatcgcggatcttcagttgtctaatccacgggaggcgacaggcgtgaagtttctcaacgaagcggaagccgggcacaagtcgtatgtcacaatcgacttcgtgcccagctcccgtccttctgctcagaagcggagtgcggttcaccatccagccgacatcatcggcatcatgccgcagcgggtcaacgtatcggccagcgcatcgtccagtgcttggatcggtcatagcaacgacgccaccgaacgacgatggacagtatggtgcctatcgccagagctgacacggccagaaccgaggcaagcgacacatcgccacccgtgacgggcagtgacgggcgagtgttgggcgtggttgcctccgccggcgccggtggcgtctcgggtttctccggttcgcacggtttctccgactcgcatgggggcaacacccgcacacgctcccaggcatcgtcataccggctggacgccggggaaacacggtcatccccctcgaaccgccaaacgaacacgtaccacccatgccgttcggcggtcagatgcatgggagcgccatgcgcgtccaacgccccggcgccgattttgaacgtgccgttcatcgcgggaatctcccaggtggccagcaaccggtggttgtcgtcttccgtggggacctctcccccggatggcttgtacgcctcatcgttggaggggttgtcgggatcgccggaccaccatacgctcaccgtcgcatacggctgatccgccgcgaaaccataggtttcatcacccatgaactggccgtggtccgccgggaaccccgatacggtgatggtgtcgctgagttcggcgccgatatccgccgaatgttcggtaaccgtcgacatgacttcgaccttcccgcgccccacgttgctttccgaagcctccatgaacgggctcacccagtcgccggtaaggtattcctgcgcccgtttgctttgctcgctccgccggaacacccacacccaggtgccaaagccgccggtcttcggagtcagataggcggcgtcaccgtccggcttggccatggcccgcacacgaacccgctgccccacaccggtgaaggacgccttgccataagcactcggctcataacccgaggacgccagccgggcgagaaaagcgtccgcgctctcccgtgcgttcggcgcgatgaccttgcccagatcgtccttgccgagcccgtcgaaatagtatccacgcgcctgcagcttcagaccgggcacccaatgactgccctcgtcccccacgccactggtcacatcatcgaacaccggcgaagccgcatcaagcaccttatcggacacctgcgtggacaccgacggaacgaaatccttgcgcacctggaacgtcgacgacgaaccgccggcggaagccatcgaatcgaaggccagcatgtcctgagtgctgtccatgacgtgcatccgcccatactcgtatgtggtgttcgccgtcacctcgccggcgccggtcgcctcccacgcgatcgaggatccggcgctcgtcgacacccccgagaacgtgttgccgccttggatgaaccgcgccggcccctgcaaggtgacagtgaacggcactcccgcgatcgcgtcaccgtcgcggttcaccactttcaccgagatggaaccgctgcgcaaagcctcggcatcggtgcgttccaccgtcgtgcccgcaggcgtcttgccggccgattgatcccatatccgggccgccttcgccacgatctcgggataccggccttgaatgaccgccatctgtctcgcccactcgtcccgatcgcgcccgaagtgatcctgcacgatgatgccgatcgccgcatgggtggcggcatccgtgtcgcggtaccggtcaaggatccatgccatacgccgggcgttctcatcggaggcaagcaccgtggtggggcctatcacatagtcgctcagtttccccgcttcgatgcagtagtatttgttgcccgaagcgtccagccccgcgacaccgacgtaatattccatatcgttgtatggaaacgtcacgtgatatctttcgtcggcgggcgtcaacgtcgcggcatacgccgtattcgccgagccgaacaccactcccaccattattatcagaccggtcagcatcgctacgatggccatgccccgttgccgccatgtcgttatcatcattcgtcctttcctggtacgttccccgcatactgcactgtgtgcgggtaggccacgatcatggcagattttcattcgctacagccgatttttcggcctatgtggtccgagcttgccgtttgtcggcgagttgtggataactcttccgccgagttatccacctcatgcggttgaccgaacgtttacctgcaagttatccacaatgtgcaacatatgttcaaaagcctctagaatagggccttatggcagcagtacaacatcgcgcgaccacgcgcactagtaataccgataacaacaccacgaagacgaagtcaaagacgacttctgcccgaaagagccccgcaaccaagcgcaagagagtcagcgccgaaacggcacgcgccgcagcagcgctgaaaggcctggctgtcgaagcccccgcaccgtccatcgaagcaaacgagcccggccagttcggccgcatcaatgtcatggacatcactcccaccgaggagcgtggcatcttccccgcccgtgtggaactcggcgaaccgtttgagatgaccgcccaagtgttcatcgaaggccgtaccaaggtgggtgccaccgccatcgtgcgcaacccgcgcggcaaggaaaccatgcgccgggccatgacctgcgtaaatcccggcctcgatcgttggaccgtgatggtcaagtgcggcgaacacagcgatctgaagccttgggaggatggctacgcggccgtcaagcgtcagctcggcgaatggaccgtgaccatcgaaggttgggaagacacgtacgtctcctggctgcatgacgcccgtatcaaggtgcgtgtgatggacgacgtggacaacgcgctcaattccggtgccgagctgctggcccgttgggccgcaaccccggacgccggcctgaccgcacgcgatcgcaagaccttggagaaggccgctgagaccatggccgatcagacgctgagcgccgaggatcgcctcgccgccggcgacaaccctaccatcgccgccctgcacgagactcacccgctgcgcgatggcatctcccccagccagccccagcgtttcaaggtggaacgcccgaagtccagcttcgcggcttggtaccagttcttcccacgttccgaaggcgccaccatcgatccgaacaccggcaagatcattcagggtacgctgaagacctcgatggccggcctcgaacgcgccgctgccgaaggcttcgacatcgtctatctgccgccggtcttcccgattggcgtgaccaaccgcaagggccgcaacaacacgctggtcgccggccccgatgacccgggctcgccgttcggcatcggctccgagctgggcggccacgacaccgtggatccgctgctcggcaccatggacgatttcaaggccctgtgccagcgtgcacatgaactgggtctggaaatcgcgcttgatttcgcactgcagtgctcgcccgatcacccgtgggtcaaggcccacccgaactggttccgtcacaagccagacggctccatcgccttcgccgagaacccgccgaagaagtatcaggacatctacccgatcgacttcaacgccgacatgcccggcatcgaaaaagaagtcgaacgcatcatgaatctgtggatcgaggcgggcgtcaccatcttccgcatcgataacccgcacaccaagccggtgcgtttctggcaggacgtgattgccgccgtgaccaagaagcacccggagatcctgttcctggctgaggcattcacccgcccgggcatgatgcgtgccctgagctacgtgggcttcacccagtcccactgctacttcccgtggcgcaacaccaaggacgaactggaagagtatctgccgatcaccaatggcgacgacggctactaccagcacaacaccttctggcccaccacgccggatattctcaccgcttacgtgcgagacaacggcgtagccggccactgcgtgcgtgcggtgctggcagccatgggctcgccgtcctggggtatctacaacggttacgaactcatcgagaacaagcagcgccccggcttcgaagagcagatcgacaacgagaagtacgaggtcaaggttcgcgattggagcaaggccaagcagtacggcgtggccgagatgctcaccgcgctcaacaagattcgtcgcgcccacccggccgcgttgagctaccacaacctcaccgtgctgcctacgtccgaccagaatattctggctttcgcacgccacacgccggccgaactgaccggcaccggccaagcggacacgctgattgtggtcgtgaacctcgatggacacaacgcacaccagtcgatgattcacctggaactcggcgagctgggtctgcccaccgaccgcccgctcaacgtgcgcgacgagctgaccggccgcgaattccagtggggttgggacaactacgtgtctctggctccttgggcggatgtggcccacatcctgtccgtgcggtgatgcggtagtgcaacggtaatgcaacagtgatgccgttgacgtgcatgggtttatcgtgtgcgtaaaccgctagaaatcctccccttgaggggaggatttcgtctgtttagacatagtgtcggcataatctcagcacggtttcttgagttccgcacctgttttgcaggcgcaaacagggtattgtggtgagacgataacgtaactgtcgattttcaaggagaaatgacatggcagaaaccttcaacgtcgttgtggaaattccgcgcggctccaagaacaagtacgaagtcgatcacgagaccggtcgcgtcttcctggaccgtaccctgttcaccgcaatgggttacccggatgactacggctacatcgacggcaccctgggcgaggacggcgatccgctggacgctctcgtgatgattccgaactccgtgttcccgggctgcgtggtcgagtgccgcgccgtgggcctgtaccacatggtcgacgaggccggcggcgacgacaaggtgctgtgcgtgcccgccgacgttcgtttcgatgacatcaaggacatcgacgacgtcaacgagtaccacaaggccgaaatcaagcacttcttcgagcagtacaaggctctggagccgggcaaggaagtcctgccgggcgactactggaccggtgctgacgccgccgagaaggaaatcatcgcggcacgcgaacgcctcgccaacgaaggcaagtgattcgattccgaatcgtcggcgggagacctctccggaggcctcccgcctttttgattcgacgtgcatcgcgtgatatagtgctggtgtatttttcagctaggcgtaggcggcgtgtgggaacgctggtcgaggcccatcgtctggagttcgggcgatgaaccttccatcacatcatgattgcgataatcgttcagaccctgctcatttccgtctccgtcgccatggatgcgttcgccgtctccatcggcaaggggctcaccgtctcccgcgtaagacccggggatgccgtcagatcggcgctctggttcggcggcgcccaggccctcttcctcatactggggcattacgcggcctccgcattcagcgcgtatgtaaccgcattcgatcattggatcatcttcggtttgctggcgttcatcggcggcaacatggtgcatgaggcatacgaggaggacgcggagaacgccaaggagaccgcgcaattcgactggaagcacatgctgccgctcgccgtggcgtgcagcatcgacgccttcgccgtgggcgtgagtctggcgttcatggcaaccagcgtgccgttcgccatcctctgcatcagcgtggtgaccggcctcttctccgcggcgggcctgtacatcggacgcgccttcggcgctcactggcagaaacccgcgcagatcgcaggcggtgtggtgttgattctgatcggcgtcaaagtgctgttggagcatctgggcgtcatcgcgttctgacttgccgtcacgcatctcgtcgccacggatggccatcaatgctcgacggcaccgttccaacgcccgacgtaggattgacgtagcgattcgattatctgagaggcgtaccatgacagaaatcacctggaaggaatgcaagaacaaggttctacgcatgctgctggtccagctgtcggcctacgcattgctcatcgcggccgcggccgtcaccctgcccggcgccgaccccaccgccccccgggtcgtcgcctgcctgacgctggtcgtgttccttgtcttctggccgttgcgcggcacgatgctggatcgcgtcgtcaccttgctgttcggcgcggcctccctgatgttcgtcaccgtgccattccccgccggcaaggtgccgccggaccagaccgccgcggatggttcgacgcttccgtggtattcgtgggcgttggccatgggcctactgctggtcatgttggtggtcttctcgttcggacgtcagatggcccgcgagaagcgggaccatctcatccgcgccctgtcccacgccgtgacttcaggtgtggcggctctcgccgtggccggctggtgcttcctgcctgatttgggcgcgatgctcgccaagggcaccgttgcgggaaccgttgccctgatcatcctcatcgttttgggactggccttggccgtggcctccacgttgtgggtgcgtgacgccgatccggacccggatatccgctatccgtggatcggtaccggcctgatgccggtaatgctgatgggcgtgaccatcgccgcaaccgcactggtgctcggccgtgtcatcggttgatggacgtctgccgttccatattccgcaaacttgtaacctatgtgtccactacaagcgcgtagaataatgaaaaaaccgcgcgaaagcggcataacgccgctgacgactcgtacagccacaccaagcaattgcgtaacacattgcaggataaagggggattagcgtgacggatcttacgttgatgactttcgccagcgaccccgccaccgttttgccatcactcgccctgctttctcatcgcgtccgcgtgctgccgatggatgcagccagcttggtgaagatgccggagaacaccattctgtttctggatgcacgcgatgatctggcgaccgccaaaaccttgtgccgtctcatccacgcttccggcctgtccacgccaatcgtgctggtgctgaccgaaggcggcttcaccgtggtcaactcccagtggggcattgcggatgtggtggtcgccaccgcttccccggctgaagtcgagggccgattgcgattggtctccgagcgcggcaacgctcccgcagccgcagcagccggttctcccgccgaatccaccaccacggtggaagatggccagattcgctccggcgacctcattgtggacaccaacggctataccgcctccctgcatggacgccccatcgatctggcatacaaggagttcgaactcctcaagtacttggtccagcaccccggccgcgtgttcacgcgcgcccagttgctgcaggaagtatggggctacgactactacggtggcactcgtacggtcgacgtgcatatccgtcgtctgcgcgccaagcttggcggcgaatacgaacacctcatcggcaccgtgcgcaacgtgggctaccgattcgacccgccggagacggataaggaaactgccgccgcacagcaggccgccaaagcatcctctgccgccatcggcaccgatgacgatacccccgatctcaacaccgccgcctgacagaccagcagcgctacaaaccatcaatcatcgacattacgccgcttaggtccatacgatgagagaaaccaaatccgcgcgtctcacgcgcatgcatgacgaatacgacattctgcgccaggtgattccggcacccgcttgcgcactgcatttctcgaatccgctcgaattgctgatcgccaccgtgctcagcgcccagaccaccgacaagcgtgtcaacacggtcaccccggaactgttcgccacctaccccaccgcccgtgacttggcggccgcgaacccggcccaagtcgaagacatcattcatccgctggggttctaccgttcgaaaacccagcatctcatcggactggccacggcactggacgaacggttcggcggcgtggtgccgcgcacgatggatgaactgaccagcttgccgggggtcggccgcaaaaccgcgaacgtcgtgctcggcaacgcgttcgatatccccggattcccggtcgatacgcatgtgatgcgcgtaaccggacgactgcgttggcggtcggattggcggtccgcacaccctgatcccgtgaaaatcgagaaggaaatcaccgcctgttttccgcccgaagagtggacgaatctcagccaccgactgattctgttcggccgggccacctgccacgcacgtacccccgactgcgccaactgcccgctgtccgacacctgccctagctatgcgccgcccgccggcaagagcacgtccaagcgctaactcatacctcatcatggtgaattgcggattctaggctgaatccaccgctagactgaaaaccatgcagcacagcaagcggaacaatacatggtccaagtgggggatttttctcggagtcgccgtggcactcggcgcactcgtggttgcgggatggacgttcatgcaaaaccggttccagccgggatcatccctcgatgccgatgtgaccattggcatcgacgatatgccgcaatccttggatattcggtccgattcctctgcggcagccgagcgcctgctcgtcgacaatgtgtatgagacattagtgaccgtcgatcaagacaacaagattcagccgggactggcgacaagctggaagacttccgatgacggactgaccgtcaccctgacactgcaatcgggcgtcaccttctcgaacggtcatacgttggacgcctcggacgccgtgtggtcgttgcaacagaacgtgaccaacaaggtggcggacgtcgacgaattgggcgatctgacgtcggtcgccaatccgaacgccaccacggtggtcattacgcttgccaagcccaatccgacgctgctgcgagcgctgtccggcaaactcggcattgtctacgattccgagtcgtccagtgccgattatcaacgcaaggccataggttccggaccattcaccgtggccgatttccagcctggccattccctgaagctggcgcgcagcgatacctaccatggcaccaaagcggccagcaatatcgttgaatttatgcaatactccgacgccgatgcgctcagcaaggccctgaccgacggcagtctcgatatggcggcaccggtttcggcttcgacggccaccggtttgaacggcaaggatggcctgaccgtcaaggagggggccactacgaataaggtgctgctggcctacaacaacggcatcgattcgctgctctccgacgaacaggcgcgtaaagccttccgctatcaaatcgacgcagccggcatcgcctccgcccaacccgacgcagccggagcattgggcggccccatcagcccgctggaacccggatacgaagatttgaccggactgtatccgcatgacgaaaaccaagctgggcagatgttctcctacttcggtgcgcaatatctgactacggtgaatctggtggtccccgaagaataccggtcgttggccgaaaccatcaagcagcagatcgagcggcagccgcgccccacggtgaaccttgaagtgctctccgatgaggattatgccaaacgaatcaaggacggcaaatgggaactgaccgtgatgagcatggacggcacggatgatgccggcatattcgccgaccccgattccatgttccattacgaccataccgaagcgcaacaggcctatgcggatgctcgcgccgccactaatgacgccgattatgaggcacgaatgaaggcgtacgcccggctgatcagcgaggatgcggccagtgattggctgtatacccgcaaatgcttcactgtggcgtccaccaaggtctccggctacccgacctcgatgatcaatcgccgcatgccgctggccgggttgacggtgaagtaggcaaccttcagtcacggacgggctacgcccgatagtccttggctcactatcgttcgatcgttcgtacctcgcctgcgaacagcctactgggctgtttactgtacagttcggcttgtcatgcaacgtgcataaactttggctttatgactgaaggcaaatccatcatcaacgccaacctcaccccgctgcccgacaaggtcggtgtggacggacttgaggacaagtggcgcgccgtctgggatgaagacggcacctacaaattccgcaatacccgcgaccgcaaggccgtctactccatcgacaccccgccgcccaccgtctccggttcgctgcacgtgggtcacgtgttctcctacacgcataccgatgtgattgcgcgttacaagcgcatgcgcggctacgacgtgttctacccgatgggctgggacgacaacggcctgcccaccgagcgccgcgtgcagaactactacggcgtgcgcgtggacgtgtccctcccctacgacccggacttcaagccgccgttcgagggcaccgatggcaagaagatcgacgccaaggatcaggtgccgatttcccgcaagaacttcatcgagctgtgcgagcgtctgactgctcaggatgagaagctgttcgaggccctgtggcgcaagctgggcctgtccatcgactggtcgcagacctaccacaccatcggccagcacccgcggcgcgtggcccagaaggccttcctgcgcaaccttgcccgcggcgaggcctaccagcaggacgcccccggcctgtgggacgtgaccttccagaccgcagtggctcaggccgagcttgagtcccgcgaatacccgggcttctaccacaaggtggccttccgctttgaggacggcaccccgatctacatcgagaccacccgccccgaactgctggcggcctgcacctcgctgatcgccaacccgaacgacgagcgctacaagcagtacttcggccagtacgtctactccccgctgttcaaggtcaaggtgccgattctggcgcacccggccgccgaaatggacaagggtgccggtatcgccatgtgctgtacgttcggtgatgtgaccgacgtcgagtggtggcgcgacctgaagctgcccacccgcccgatcatccagcgcaacggccgtatcgtgatggataccccggactggatcgaggacccggccggccgcgaggtctttgccgaaaccgctggcaagaccacgttctccgcccgcaagatcatcgtcgacaagctgcgcgagtccggcgatctggacggcgagccgaccccgaccaagcgtatgacgaacttctacgagaagggcgacaagccgctcgagatcgtcacctcccgccagtggtatttgaagaacggcggtaccgacgccaagctgaacgccgagcttatcgagcgcggcaaggaactcgagttccaccccgacttcatgcgcgtgcgctacgagaactgggtgcacggcctgaacggcgactggctgatctcccgccagcgcttcttcggtgtaccgttcccgctgtggtacccggtgaacgcttccggcgagccggattacgatcgcccgatcaccccgagcgaggatcgtctgccgatcgacccgaccatcgatgtgccggaaggctacgacgagtcccagcgtgatgtgcccggcggcttcaccgccgaaaaggacatcatggatacctgggccacctcttcggtgaccccacagatcgtgacccactgggccgagccggacgaggcctccaaggccctgttcgcttccaccttcccgatggaccttcgcccgcagggtcaggacatcatccgcacctggctgttctcgactgtggaccgcgcgcacttggagaacaagtgtctgccgtgggcccatgccacgctgtccggctggattctggaccccgaccacaagaagatgtcgaagtccaagggcaacgtcgtggtgccgaacgagccgatcgagaagttcggcgcggacgccgtgcgttactgggccgccgccgctcgcctgggcctcgatgccacgtacgacatcggccagatgaagattggccgtcgactggccatcaagctgctgaacgccaccaagttcgcgctggccatcggccgtgaggacgagaaccatcacgtgggcgctgccgccgagacctcgtggaacccggccgatgtgaccgaaccgctggatcgcgccgctatggccaagctggctttggtggtgcgtcaggccaccgaggcgctggaatcctacgagcattccaaggcgctggaagtcatcgagtcctacttctggcagttctgcgacgactacatcgaactggtcaagaaccgcgcctatggcactccggacgagcacggcaatgtgccgtccgagaaggctgtgaagtccgcccgcaccgctctgggtctgggcctggacgctttcgcacgtctgctggccccgtacctgccgtacgccaccgaggaagtgtggagctggatgcacgccggttccggttccgtgcatcgcgccgcctggccggtcgtggacccgtatgtcgaggccgccaccggtgcttcccccgagctactgacttgggccggcaaggccgtcgagcagttgcgcaagatcaagtccgaggccaaggtctccatgaagaccccaatcctgtctgtggcactgtccgctgcttcggaaggtgtgaacgcgattcacgccgccttgggcgatatcgcgcaggccggtcgcgtggtcggcaagttcgacttggtggccaagcacgccgaggaatccgccgccgaagacgcgcccgaaaccgaggtcgccgtcgaagccagcgagctcggtgagccgccagccaagaagccaaagcactgagcgttgcgcacaacaacagtaggtctcacggcaatgccgctcgttccgagcctacgggaagcccaccgggcttcccgcttaacggctcggccagccaagaagccaaagcactgagcgttgcgcacaacaacaaaagaggggaacctcctattgaggttcccctcttttgttttttgacgttcggatgacacgactgtgggacggcacgcaaatatcccgcattgtaagctggcggcccacaatagcgtgggccaccacgcgtgtcaaacgttttatatacgcggcgtcccacagaccgaatcaacaaatccttggaatttagccattcttcaaactatagttagctctgactcacaagagggtgtgggacgccgcatcgaaaaagccagtttttgatgcggcgtcccacaccgataacgcactttacgcgtattgggcacctgtcgcatgcggattttcccgcatacaccatcacaccgtcggaatcacgatgaggtatcgggtttcggcggttttttgttgcgtattggggctatcgagctgcgcgacagcctgcgccaagagcgtgccagcatcactgatctccacggtctcattgatcagcgcgctcatgtcatgcttgagcagcgtgccgccagtgccaaagccgaacagtactggagcggtgtcaagattgttgccggaatcgccagtatcgctcgacttggctgagtcgttcgttcccgaaccatcgctcttggacgaatcgaacttacctccaccaccgatggccgaagtaagaccacccgcatagttcatcacatcgccagcagacatggacatggtgtcatcgaccagtgaggccttggaatgctgcgactgctgctgttgcgcggctttggcctgcttacgggcggcatcggccttacgcttggcttgggaggcccgggtcttgccgtagaacgattgcgattgcgaatcgaccaggccagtcagtgcctgagcctcggtcaccggaccggaagagacatcaccggacgagccatcgccatcgctgccggaagccgaggacgcgactccttcgaactgatcggagaatcgcaatacaatctggcgcaaggccgtggctttgcccgtatgctcggaggcggtggcaagcgtgctcatcgcggcatcgaccttggattgagcgtcggcgagttcatcgctaccgttggtttcggcgatggcttggctctcgtaagcggtggcgcccgaagacgtgccgccggtcagggcgctcaaattggccgtgtagacgtccgtgtatttcatcgaatacggaatcattgcggcggagagctggctctggccatcggcgtattgcttggagcctcgagtggcttcctccgaagcctcggcggtcagatcatccaccagtccggtggtgccttgctgctggatgcggcgaatcacctcatccaacgcatcgaccgcaccggcatgctgatgtgcggcactgacgttgttcaccgcgttggccaagtcgagtacggcttgtgccaaaggcgtatccccggacagttcgccggccgtgcccatcaacgccggcaactgggtggaggtaccaatcgatccagacaggtgcgtggtatatgagcccacatacgcggccatatagtcttcaaacgtccgcttatgggcggtttcgcgttcggccactacggacttgtccagcgcacgctcattatcgcgcagggtttgaagctgctcgatgagctgttgatgctccccggaaccggcgtcggtcagtgaatcgaccagtatggcggcagaggcgacgagttgggcgacatccgtatcggcagcaggctgtgcggcggcattcgcggcatcgggattagcaccaactaccggactgctggaattggaaggcaatacggcgagcgccacggaactcatggagaagtctttggcgttcatatagcagctgaattccaagccggttgcggcttttccagctgcggcgactacggtattggaaccttgcgtggttaccgtaatggagttgtcagcggaaacatcatcggctacctgcgtaggcacggtaaaggcgacaaccgggatcgtacggttggcctccttggtttgcggcttaatatcgatatacacgccgatcagtccagatgcgccggcaacctcgtttgcctcgacgtttggaccgtcaagcgagtaggtgacgctgactttccatggcagggtggcggcggaagcggggatacgagaaaccttggacgtgccggaattactattggcggaatcggtatcagtggaaccgctattgccggaatcggcactggcgccattgccggcgccgcccttccctaccacataccaacggaccggctccccttcggcatcggcgacggcgtacatatcacttgccgtagcgagcaccggaccgtaatcaaccggagtcggacgagacatccaagcaccgccgagaatcgaagccatgcacaatgcgcaactgaccagtgcggcaccacatctcatctacgtatcccattcatacagtcggccactatgggcattccattcccgtattaatgtagtcgctgcaggcaacttgccctatagacgaatatccgaaaggtgcccattcgctgcgggcgaatcaggcgaatacgtcgagtacgcccgggtcgccaccggcatcggcgatgcgctggtggcgcttcttggcttcggtaaccacgaattcacggtacatttcggcaatttccggatcaagcccggcatcgatggcgatgcggtggaggcgttcgatctgatagtcctcacgcttggtgtcttcgggcgcgaatccggcgttggctttgagcacgccgacctgcgaggtggccttgaaccgctcggccagtaatgcgatggccgccgaatcgatgttatcgatggtttggcgcagcgttttgatgcgcgccaccgcttgtgcggtttccgggtgggccgccgcctgggcggagtcgatggtggtcctttgccagccgctgctcgtttcgctcatagattcgaggatactcccgattgcggctttgcacgatgcgcaaagtcagatatctcagatgtcatagtcgccgtaggggatatggctggcatccgcatcgccgaacatggccgcaccattgcccactcccaaaacaatcgaacccattgatacatctttcatctcatatatcgtcagcgtgcatgtgaacgttgacggcaatactacaactgcaatgtgatagttgatgtatttgcatcatatacggcaagggctgcgccccgtatcaatcggggtgcaacccttacactattgttcagcggtctggtcagttgccgttgaccgcgttgccggtgttggcctgctgcacgatggcggcgaggaagtcgcggttggtggcggtcttcttgaggcgcggcaccaacgtctggtaggcctgctcgggctccatgcctcccagcagacgacgcagacggtagatgaccggcagttcctgcggattggtgatgagctcctcgcggcgggtgccggaagcgttgatgtcgatggccgggaacagccgcttgtccgccagctcgcgggacaggcgcagctccatgttgccggtgcccttgaactcctcgaaaatcacctcgtccatcttggagccggtctcgaccagcgcggaggagatgatggtcagggaaccgccgttctcgatgttgcgggccgcgccgaagaacttcttcggcgggtagagggcctgcgcgtccacaccaccggacaggatgcggccggaggcgggggcggcgatgttgtaagcgcgagccagtcgggtcatggaatcgagcagtacgaccacgtcctggccgagctccacaagacgcttggcgcgttcgatggccagttcggcaaccgtggtgtgatcggaggccggacggtcgaaggtggaggagatgacctcgccctggaccgtgcgctccatatcggtgacctcttcggggcgctcgtccacgagcaccaccataaggtggacctcggggttgttggcggcgatggagttggcgatgttctgcagggtgatggtcttaccggccttcggcggggagacaatcagaccacgctggcccttgccgatcggggaaacgatgtccatgatacggccggtgagcttgttcggggcggtctcctgcttcaaacgctcctgcgggtacagcggcgtgagcttggagaactgcggacggttgagcgcttcttcaacgctttggccgttgatggaatcgatggcctgcagtggcacgaacttctggcgttggttgcgacgatcgccttcgcgcggggcgcgaatcgaaccatggacggcatcgcccttgcgcaggccgtacttcttgacctggcccatggaaacgtacacgtcgttcgggccgggcaggtagccggaagtgcgcacaaaagcgtaggagtcgagcacgtcgacgatgccggccaccggcaccagatcctcctgcggctcttcgcggcggctatcacggtcattgcgatcgctacgattatcgcgatcatcatagcgacgatcatcatcggcgttgtcgcgatcacggccacgcatgcggcggttacggcgatcgttgcgatcattacggttatcgcgatcgttgcgatcgctacggtcgcggcggttacgacgcacaaactcgtgatcgtcgttctgctcgccgtcttcggacgtttcctcgtgcttctgcgtgggcagcgtggccaggatatcgtcgaggtcacgcacggtttcttcgctgttttccgcagtgcgacgacggcggcgaggctgctcgtcctcatcatcacggactcggcgaatcagcggaacttccacgtcctcatggcgctcgcggcgacgctcggtaggcgctgcatctcccaaatcgagcgtggccagcagatcgccggcctcatcggccttcttgcgcggcttgcggcgagcgaaatcggactggtcgtcatcgcgacgatggcgggccgcacgcggttcggatgcggcatcatcggcggccttacgacgggtgcgtcgcggttcggtcccgtccttcttggcatcgtcggccacgggaagcggcaaatcgagctgcggttccgtggcggccggagccggagccggcgactgggtggccacgtcagcattgtctgtggtattggcctcagcggcatcggactgcggagccttgacgaccttggcggttttggcagccttgggagcgcgcacggtcacaccggccggcggctctccaccattgcgcgccgcctgcagggtggcgagcagctcgggcttgcgcatggtcgacgtaccgcgcaggcccatctgtttagcgagctctttgagctcaggcagcttcatatcctcaagattctggctatttgccactggttgccctttccataccgaacagacccatgcctatccaggcgttaagagtgattattgcggttgcaccgctcatgaatgttcgctgcgtctctgagttttcacgaacttcgtttactgtacaacgccaactcgaccaacgcaaaacggcccgccgaaaaccaaaaaagctccctctgtgacgagggagctcaacaaggtttattcacttttcttcgtggtaggacttttcggtgttgacggaccacacgttcttcttggacgtcttgccggtcttgatgttgccgacggcctccatggcggtggccatggagtggtccatgttgttgtagcggtgctggccgttgcggcccacgcagtagaggttgccgaagccgtcgaggtactcgatgagctcgtccatgtgctcgtaggtgtcgaagtaggcggggtacgccttcttgacgcgctcacgatgggagtcgatgacctcgtccgggccgttgatcacacgcatgcgggtgagctcggagatcgcgaacttggtgacgtcctcctcgctcatgttccagaacgagtcgccctcctcgcagaagtactcgaggccgacccacacggtgtcgtccacgttcttgaccaggtacgggctccagttgttgaagatctgcagacggccgaccttgtagcccgggtcctgcacgtagatccagcagtccggcacgatcggcggattgccgagggtggggatgttggtggtgttcttgagcttcaggtgcttgaccagcaggcccacggtcacgaagtcgcggtacggcaggccgttggccacctcggtcatatcggccggggcgggcttggaatcagcggcctcgggatcgtcgccggccgcgtcgatggcgttgaccaggtccttgaccggcatcgaggagatgaactggtcgccggaaagctcggtgcggttgccctcggaatcctcgtacaccacggaagacacggcgccatcggtctggcggacctcgaccaccctggcgtcggtcagcaccttgacgccggcggcctcgcaattggactcgacggtctcccacagctggccgggaccgtacttcggataccagaactcctcgatcagcgaggtctcgacctccgcgttggagcgcttcctggggctaagcttctggaaggcgttcttgagcacgcccatgatggacaggcccttgacgcgctgggcgccccagtcggcggagatctgggaggggtggcggccccacagcttctccgtgtagccctcgaagaacatcgaatacagcttgcggccgaaacgattgatgtagaagttctccaggttgtcttccggcagcttgtggaacatagacttcaggtagctgaagccggccaccatggtgagcttgaagcccatggccttcaacgtgttggggctcagcgaaatcgggtaatcgaagaagtggcggttccagaagatacgggacacgcggtggcgcttgagcatcaccttgtcctccgtctccggatcggggccgcccggctccatgtcgtggtcgcggccgagcttcttgtcatcataggagggtgcgccctgcaacggcagaacggtcttccaccaatccatgatgcgttcgtctttggagaagaaacggtggccgccgatatccatgcggttgccgttgtgcttcacggtgcgcgagataccgccgaattcgcgggtcccctccagcacggtcacgtcatagttttccgcgccgccatccttgacgagttcccatgcggcggtaagtccagccggaccgccgccgataatcactacggattgcttgtcggtcattatgctccttataaacgcaaaatcagagacagtttactagaagccccggaatcgcacaccgaaagatgagcgaatgcttacagaattctcccgatatacgaccgatgcgccgtcttccatcagcagaaaggcgacgcatccaatcgtgaggtaggggtattcggcaacgctgcgtcacgcacagcgcggcgaatcggtttggtcttgggctaattcgtcagcgacgaaccttccatagattcagcgagattcctgcaagtgcaagcagcatcatcttctatcaaccgcaagcaaacaagacacacgatggcaaggttacgaatctgaacttttgctatgcgttgtatgaacaatgcgcgatgccccgccgtaagatgacggaatgccgcgcattgtcaatacaggctgtatcagacgattgcctgtcagtgaatatcgtcgggaatgtcgatatcggttttctggacttcctcgacgttcacgtccttgaaggtcacgatgcgcacggacttgacgaaacggctggaacggtagacatcccatacccatgcgtcagtcagctgcacatcgaaatacacgtcctggccagcggaacgcacgttgaaatcgaccttattcgccaagtagaagcgacgctcagtctccaccacataggtgaacagcttgatgacgtcacgatattccctatacagcgcgagttcggcgtcggtttcgtaattgtcgagatcctcggcactcatgcttgtttactcactcactttccgtatcgcgtttgcggccgcggcccagcgtacgccaccatgcttcctttgagggcttgcgttccgcctggccgtacggccagttgctttcctcttcgagactgtggcgcgtgttcttctgcgtatcgtcgtggtgcccggcctgtggctcgactggctgtgcggccgccggcgtctgggcctgggactgcacgtcactcgtcgtgacggcggctgcctcaccacgctgtgccggctcgggttccggcttgttctgctggatggcgatggaatgctcgcgcgcggacagcgcttcctggacacccgggttgtcctcaatcaagtgcatgccaaaagcgtcaagcgaacgaatcggatcgtactcgtcgaccaacgtgtccatgacgataaggtcctggtatttgttgttttcgacatcccacaacgcgtcgcgcgaggtgccggacggcacgaagccgagcgactggtagaccgaaatcgaacggctgttcttttccggcacgctcacccagatgcggtgcatgcccaggccggccggttcgggcgcaaagccgtaagtcatcacacgcggcatggcgtcacgggagtagccgcggccacggtactcacggcccaagatgatctggatgcgggcggacttggaccagccgtcgatgtcgatgaggaaaatcatgccgatgacattatcggtgctggccgcatcgagctgaccgtcatcgtcatggtcggcgtcagtcaatacggcccatgcgatggtgcggcgggattccgggtcgcccacgccggattcggcgggtgcctgaccggcttcccaggcttgggagcggcggacccatgtgtgtacgatggcgcgttcggtgaccgcatccttgccggtgatcttggatgcgccatagaaggcatcaagttcatccaaacgagccaggtcctcgacggtggcggggcgcaggtgcaccatttcgccacggattggcggaatgacgatgctctgtggcagatcgcgcttcagttgcgcttcggtagccatgctcagcgtctcgttggttgcggtcatcggtatacatcccccggttcggcttgtttcggctcacggtccagtgccgaacatatcttactcgactgggtgaacgctggaaatgctctgagacgactttcttacagaatcaataaaggctcccgctggcgggagctgtccaacgaatttgaactggaggatttccctacaaataagtgctcccgctggcgggagctgtccacgaagcggactgagggtggtcatccgtacatggcgaccaccctcagtctcactccgttcgacagctcccgccagcgggagccagtgaatctaatcagcccttgatcttgcccatgacgaccttggtgacggccttggcgtcggcctgaccgcgcgtggccttcatcacggcaccgatgatcacgcccatcggcttcatgttgccgctcttgagcttctcgacgacatccgggttggattcgaacgccgcgtcgacggccgcctcgatggcaccgttgtcttcgacgatcttgtagtcgtgcttcttgacgacttcatccggagtgccttcgcccttaagcacgccttcgacggtctgcttggcgagcttgtcgttgagcttgccggaggcgatgagcttctcgacctcggccacatcggccggggtgatcggcagctcttcgagggacatacccttggcgttggcttcgcgggaaagctcgcccagccaccacttgcgggcaccggcggccttggcaccggccttgacggtttcctcaatcaggtcgagggcgtcggcgttgaggatgtcgcgcatctgcagatcactcaggccccactcagacttgaggcggttgcggcgctcacgcggcatttccggcatctgggccttcatctcctcgatgtgctccttggtgatgtggagcatgacgaggtcggggtccgggaagtagcggtagtcgtcggcatcggacttcagacggccgccggcggtggtctgcgaagcctcatcccagtggcgggtctcctgcagaatctccttgccgtcgtccagacgggcggcctgacggcggatctcgtactggatagtcttctcgatgccgcggaacgagttcacgttcttggtttcggaacgggtgccgtagggggcgtccgggctcggacgcagcgagacgttcacgtcggcgcgcatgttgccctgctccatgcgggcatgggagatgttcagcgcgcgcacgatgtcgcggatggcgcgcatgtaggcaccggcgatttcgggagcgcgatcgcccgcgccctcgatcggcttggtgacgatctcgatcagcggcacaccggcacggttgtagtcgaccagcgaatgatcggcgccctcgatacggccgtcggcgccacccacgtgggtgttcttgccggcgtcgtcctcgatgtgggcgcgctcgatcggcacacggaacacggtgccgtcctccagttcgacatccaggtagccgttgccgttggtgggcttgtcgtactgcgagatctggtagtcgcgcggcatgtccgggtagaagtagttcttgcgggcgaactggctccattcggcgatttcgcagtgcagggccaggcccagcttgatcgcgtaatcgacggcggtcttgttgatcaccggcagggagcccggcaggccgaggctcaccggggtcagttcggtgttcggctcgccgccgaactcgatgtgggccgggcagaacagcttggtgttcgtggacagctccacatgggtttccagaccgaagaccacatcgtatttcttggtggcatcggcgtacttcatcagtttttcagccatgatgttgtctctttccttccgatgctcacttgcctagaccgtcaagccacggggtcttgaggtcgttccagatcgggccgttccagctgtcttccagcgcggcttcgagggccgcagccggcttgtacatgacttcgtcgcgctgctgcggggcgatgaactggaagccgacgggcaggccgtcgtcggacaggccggccgggatggacatggcaggcacgccggcgaggttggccggaatggtggcgatgtcgttcatgtacatggccagcgggtcgtccatcttctcgccgaacttgaaggcggtggacgggctggtgggggccacgagtacgtcggccttctcgaaggcgttgtggaagtcccggatgatcagcgtgcggaccttctgggccgaaccgtaccaggcgtcgtagtagccggcggacagggcgtaggtgccgaggatgatacggcgcttgacctcgtcgccgaagccggcctcacgggtgtaggccatcatgttggcggcggtctgaggcacgccggtcggcggcatcacgcgcaggccgtagcgcatgccatcgtaacgggccaggttggagctgacctcggacggcatgatgatgtagtaggcgcccagcgagtagccgatgtgcggaaccgagacctcaacgacctcggcacccatctccttgagcttgtcgacggcctcgttgaagcgggcctcgacgccgggctggaagccgtcgccgccaagttccttgatgaggccgaccttcatacccttcagatcgcgcttggcgccttcgcgggcggcggcgaccatcgggcgcgggccttcggggatggaggtggagtcacgcttgtcgtggccaccgatgatctcctgcagcagtgcggagtcgagcacggtgcgggagaccgggccgatctggtcgagcgaggaggccatggcgatggctccgaaacgggagacgccgccgtaggtgggtttgacgcccacggtgccggtcagggcgccgggctggcgaatcgagccaccggtgtcggtgccgagggcgatcggtgcctcgaatgcggcgactgcggaggcggagccgccaccggaaccgccgggcacgcgctcggtatcccacgggttgtgggtggtctggtaggcggagtgctcggtggaggagccctgggcgaattcgtcgaggttggtcttgccgagaatcggcatgccggcggccttgagcttttcgatgacggtggcgtcgtacggcggcacccagccttcgaggatcttggaggcggcggtggtctcaatgcccttggtgacgatcatgtctttgatggcgatcggcacaccagccagctcaggcagggcggccttgtcttcggcggacttggcgtcgaaggcgtcggcctgctcgagagccacatcgccggaaaccttcaggaaggccttgatggacggctcggcggcttcgatcaccttgaggtgggcttcgacgagctcacgagaggtgacgtcgcccttcttgatggcagcggcctgctcggcagcagacagtttgacgagagttgcggtttcgttgctcatcgattactcctcgcttcccaggattcgcggtgccacgaacatgccggcctcggtcttcgggccaccggcgagcgcctcttcctgcgtgagcggggtttcggcgacgtccgggcgcaggtaggcttccagaggaaccgggttggcggtcggcggcacatcgtcggaggcgacttcctggaccttgttgatggagtctgcgatgacgttcagttcgccctgcagacgggtgatttcctcatcggtgagcgcgattcgggccagatcgcccaaatgcacgatttcttcacgtgaaaatgttggcatggccataactatatgagccgtatgtgacacgcagttgtcgggaagcctcattttcccgcctactggagcccttcagcgaatcagaagctcaagccggtcgagcatttgccccgctgctggcttcttcggcggggcaaaaccgttgccggaccgcaagttcaccttactgagacgactcgcagcagagcaaaaccgcgagctgaccgatgaaacgccccgctcagccatcccagcaaaacaaaaccgcggtccaaccaataaaacgccccgctgagacgccccgcagcgaggcaacgccacggcccaaccgcaaatgtgccccactgaagtatctgcatggccaccctaataagctcacaatgagcccaaacacacctacatcgaacatatgaacgacaatcgccctgcgcacctcgccagttatccacattttgcatacccacccaaaagaatccacataatcagtccaatacggtcagatgcctgataatcaggcaaaaacacacatctaggcaccgaagctagaaccacataaccccagacagatagacaccgtgttcaccattggcataccgtcgaatcatgaaacatcacaaagcagtggacatactcatcacgaaggctgaagcaacgcaacagtgcgcttatggaacaaccaaggcacaccgctcggcgctggctcggcgcgtgcaggcgcgcgaactcaaacgtgtattccccaacatgtacgccgcttcggaatactgggattcgctgcaacccgacgaacgtatcagacatattgcacgaactcttcataacagacatccggattgggtgttcgccggggtcacggcagcggccatccacgattttgaacaccaatggcatcttcatgctggcaccatcactctcgccacaacatcacgaggccccaacgccagcagtgcaaaggtcaaacgcatcttcacgtcaagcagcacgccagaatatgccaatggactcccggtgaccagcaaagccagaacggtggtggattgcgggctgtccgtcgacttccgatttgcactgcccattatcgattcggcgctgcgcaacggcgtcgccatcacggacattctgaatgtgtgcagcactatgcgacgtgattgcacgccgatattccgcctactgcattatgccaatccggcgagtgagaatggtggcgagtcacttggacgaggcaccatcatcgcaggcggcctattagccccagaactgcaacaaaacatcaccgacccgcaaaccggtgctctgtatcgcgtggatttcctctggcggctacctgagaatcggcttatcgtgggcgaattcgatggctatgaaaaatatgtgaacccggatatgaatgaccgcaagggtgttcgtggtgcagttcaggcggagaaagaacgggagacggcactgtaccgggccaaagtcgacaccattgtccgattcacctatgaggaggtgatgcaacaacatcctttactcaataagctgcgggcagccggcatacctcatgctggaacagtgatgggagctggttaagcgcagtgaaccacggtggtcaaatccatggggtcagagtcaccagaaccatggtcactgcagaactgccaaagcagtaacccgcgttatttgatatccgatatccgcttttccggtgatgatgagaccgccgatccatgcggcggcagcccaggtgatgagaatcaggccggactgccaccattcgggaatccagtagtccggtttaacggcttcggccagtgtggactgcgcggagctgctgatgcctgcggcgagcaggatgccgacgatgccggcggcaaatgcgaattaatgccgcggcgatggatttggtggcgtagatcatgcctctaatgtggcccatattgggcagatgcggcaggattgtcggcgcatggctacacgcctgatacggcgtgttgggcaatccatgcgtgcatggccacggccgccgcagcgcctgcattaatggagcgcacggaaccgaattgagagatgtagaccacatcgtcggccaattcgagggccttctcgctcaatccggggccttccgcaccgaagagcagcaggcaccgcttggggaaggtataggtttccatcggcactgcgccgggaatgatatcgagggcgatgacgcgggcggctcgaagctccttgatgcgcgcatcacaagcatcgatttcggccagcagctcatgaaggtgcttgttgtctccatccacagccacatcatgcgcatggatggcggcggcaccggccttggctcgttcataggcgatttcaccggcgatgcgatgatgccagctttccaccagttcggcgatggaggggtggtgttcgacgtgctggtacagttcggtcatcaacgcgcccttgcgattccacttatgtggaccgacaatgtgtacgcgcttggtctggaaggcgttggcggtgcggaccatggaaccgatgttgaaatcgtgggtccagttttccaccgcaacttcgaagtcatgacgccctcgagcgtcaagatcggccttaatggcagcgacggtccagtagcggtaacgatccaatacgttgcggcggtcgccgtcattcaacagcaccgagtcgaaacgaccgtcataattcggagaagtcgaatcgtcgggacgaggctcgccgggatgggtctcagaccacggcccaaggccgatttcacggaattccggttcacctgaagctttggcagccaaagaaatctggttgggtgcgtgcaatctttctcctcgataacgctattcaccggttcctcttagtcaacttcgcggctcagcccggctgactttatgcgagggaagtcaaaggtggatttaccgcagttcggattcgtcgaagacctggatgaaggggagcgtttgctcgtcgccggtggaggggttgaccacattgatgtctttggcaccgccaccgaccagcgaggcgatggccacgaccttggcacccagctgctccactatgccaaagtcgaggctcagctcattgccgttgcgcagggtgaccagcgagctggtctgcacgtacgacttttcggacagccaagcatccaacagcaccacacggcggccttcgatggaggggcccttgatggacgggtagacgaagtccatcacgaatccgtctaggtcctcgccacgagaggcggcggcctggatcatggcggacaccatgggcacagatgctgcggtcaaggcaccaacagcatcgaagtcatcaaccgaatagcccgcatcttccaaagcgtcaatcagtacatggcccatgacggtggcggcacggtggtcgaaagtcaccgcggcaagttcggagaacggacggcccaccacatgctccctcagcaaggtggctagctgttcacgcggctccagcatggcaaagtcattgtggctcttcgcgacggcgaggtccggggtaccagtggggcggaatccagattcagtcatgactccagactatcgcctgaggcagtcagatgagtatcaccttcatcggccggcaccacttcaggggcggacagttcgctcacattgcctttgtctgattcgatgatcggtacttcctcgatgatcttggtcggttcgattttttgcagcttgcgagcggtgggcaacacacggcgttccaagctggacgcgaacttgttgtaggcgctgaccgtcttagtaatctgggtgcccaatttgatggcataatcacccaacgtggagaaccgttcgtacagttctcgggacagatcgaacagctgcttggcgtcatcggtgagcgactgctgctgccaggcataggccacggatttcagcacggcccacagcgtgaccggcgaggtgagcgccactttgcgagagaacgcatcatccatcagtgtgggatcggcttcgagcgcggcctgcaatagtgcctcattggggatgaaggccaccacaaaatcgggtgccacatcaaaggcattccaataggccttttcgccgagagcacgtacatgctcgcgcaacgccttggcatgggaccgcagcaaatcatcgcggcgggcaatatcctcggggctggcggtgtccgggatctcgcaggcacgctggtaatcggcataaggcactttggcatcaatcggaatggtcttgcctcccggcagatgcacgatcatatccgggcgcaacgtacgtccatcggcatccgtgaccaccacctgaatgtcgaaatcgacatgttccagcaatccggcggactcgacaatgttcttgagctgggcctcgccccacgcgccacgcaccttgttgttgcgcaatgcggcggacagggaactggtttccttgtccaaacgggcctgctggtcgttgagccccttgagttgggctcccaatgcgcccatttccctcttgcgaccctcttcgatctgcgtgaccttgttctgcaaggtatcaagattcttggccactggcgcaagcgcctcgagcaccttgctctgttctttcaaacgtgcttcctgttcagcacgcttggcctcggcggcctgagcatccgcctgacgcttccgttccgcctccgcagctgcacgctcacgttcctgctgaatgcgaatctgctcagcctgctgcgcctgggcaagttgtgacttggcgaaagccaattgctggttcacgccttcaatctgagcctgtgcggcagcattgcgagcgctaagctcagcattctcgaatcgcgcattctccagcgaggtcttggtctcctccagctcctcgcttttgacgcctcgagccatctcctgacccttatggcgccccagcacgaagccggcgaagaggccaagccctgcaccaaccactagcacgacgatgacgataatcacggttcctatttgctcaaacatggtacccagtatgtcatcgatggtgaatgacggtaaatttttaccgaattcgacggtttcaagccgttaaacggatgctcagcagcccacattggacatttggactcatcgcagtcgagcatcaaccgttattgcgctgtgtcacacccgaacgccggatgtccttccatgatttgccagcgcgcgtcatcatgcggcagaattcgtcacgatttgacgagacgtgcgatggccgcggaagcctccgcaagtttttcatcggccacctcgccgccctggaccgacgcctgccgcacgcaatggttgagatgatcgtccagcagcaataacgccacggatttcagcgccgagttcgacgccgaaatctgtgtcagaatatcgatgcagtatttgtcatcctccaccatctgtgtgatggcgcgcacctgcccttcgatacggcgtaatcgtgcgatgaccttggccttgtcttcgtcataaccatgcatcgcaacccccctgatacttatccgtcagctgaacacaccccatcatataccctctaggggtatagggtatacactgttgttcagtgcattaggaatgggaaggaacagttatggagttcagcatcttctcgaccgccacggcgctgatagtggcggccgcattgacatggctggtcctgcggttcttcttcggaacgcagaaggcaacggccggggccatggacgcttccggcgaacgccaatccgcgacgatcaccgtcaagggcgggtactcccccgccgtggtgagcatgcgtgcgggtacgccgatcacactgaccttcgaccggcaggagaccggcgaatgcacctcgcatgtggtgtttactgatctgggacttgacgccatgctgccgggcaacgccaccaccgacgtgaaactgccggcgttgccggcgggcgagtatccgtttgcgtgcggcatgaatatggtgcatgggttgttgagggttgagggagaggacggctcggatgagaacacgccccttcctcatcctgatgcttcgtatacggcacctaccgccgtggatgcggcggagggggagcgccgggaggcggctgaacgcgccaatgagatcaaggcgctgacgaagctggtgattgtgggcgcggtactgacgttgccggtattcgccgtcaccatgctgcatatggccaatcccacgctggtgccgcattggatggtgaacccgtggttgcaggccatcctgatcacgccggtgatgttctactgcgggcgtccgatccacacggtcggcttccccgcgttggcgcatcgctcccccgacatgaactcgctggtctcactgggcacttcggccgcctacctgtattcgctggtgacctgcatcgccccgtgggtgttcccggaaggctcgcgcgaaccgtatttcgaatcggttggcgtggtcatcaccctggtgctggtcggccgccttctggaaaccaaggcccgcgaaggcaccggcaaggcggtgcagtcgctcatcaaactgcgcccgcgcaccgcgcacaaactcaacgtcacttccgcagacaatgtggacgacatcgaatggcgcaatccggcgtatttcacggacaccgacatcgacgccatcgccaccggcgacctgctggtcgtcaagaacggcgagcgcgtgcccacagacggcatcatcgtggccggcgaggcgcatatcgacgaatcgatgatcaccggcgaatccaagccggtttccaaaaccgtcggcgatccggtgaccggggccaccgtgctgctcaagggcgactgcgtgatgcgcgccacccaggtcggcgcggacacggtactctcgcagatcgcggcgatggtggcccgcgcccaggcgaccaaggcgccggtgcagcagctggccgataagatcgcccggtatttcgtgccggcggtgatgatcatcgccatctggacgttcgccatctgggtgtcactgggcccggtgccgcaactggcgcatgcgctggtcaccgcggtcagcgtgctgatcatcgcctgcccgtgcgcgctgggactggccacgccgctgtcggtgacggtctcactgggcttgggcgccaccaacggcgtgctggtcaccagcgccaaggcgctggaacaggcgcgtcgcatcggcaccgtggtgttcgacaagaccggcaccatcacgcgcggcgtggtggacgcggccgccgactgggacaagccgagctacgagcaggacacagtcaaggaaggctcgcgcgaggccatcgcggcgttgcgcgcacgcggcatccgcacggtgatgctatcgggcgacaaggccgaggtagccgggcgcatcgcccgcgaagtcggcatcgatacggtgatctgcgaggtcaagccggacggcaaggcctactggatcgccaaactgcagcgcgaacgcgacgaggccgccgccaagtccgcggatggcgcctcccgcacggccgcgcaatcccgcactctgattgcgatggtgggcgacggcatcaacgacgcccccgcgctggcccaggcggatctcggcatcgccatcggcaccggcacggacgtggcgatgcagtcggcggacgtgaccttgatgagcggcgacttgcgcggcatcatcaagaccatcaacctgtccaacgccacgatgcgcaacatccgcgagaatctggggtgggcgttcggctacaacgtcatcggcattccggtggccgccggcgcactctacccgttcaccggctggctgttgagcccgatgatcgcgggtctggcgatggcgttgagctcggtgtgcctggtgctgaacgcgaacaggctgcatggggcgaatatcaacgtgggtgctgccgatagcaccgctggctcgggcagcagcacggcggatgtcgaatcagccggatcggccgaatcagccaacgccgccaacatcaccggctccgccacatccaacgcgcctcacgagccaaccgtcatcatcgacgatcgcaccacgctgaatcacaccaatcacgcatctgaccaatccaataatccaaccaacaaggagaacactatggatatgggaatgcacatgcaccacaccgcccccgcggacggcgaaaccgccaccgacccggtgtgcggcatgaccgtggcggtgaacgccgacgcgatcacgcgcgagtatgagggcaagtcctattacttctgcggcgaacactgtgccacgaacttcatgaaggccccgcaggtgttcctggagcagtagcctctgcgtttacctgattcaacgacaatggcctccgcccaaaacgagtggaggccatttgcatatatgaatcaatcaacgaatcagctggcgaagaagaacacgaacagccaagcgccgatgatggcgccgatgatcggggccaccaccggaatccaggcctcaccccagcgggaggagcccttgtgcgggatcggcagaatggcgtgcagcagacgcggcatgaggtcgcgagccgggttcaggccagggccggtcgggccacccatggaggtcacgaggccccacacaatgaagccgacgacgatggaggccgcggcgtagtcctgcttgccccaagccagggacaggcagcacagggcgccgaagacgagcaccagggtgccgaacatctcgttgaggaagtagttgaccttctggttgtccgcgtcggtggtgcagaaggtgccgagaatggcgtcggcgtcctcggtctccttgtagtgcgggtagtaggtcaggtagacgatgaactggccgagcagggcgccgagcagctgggcgacgatgtacggcagcacgtcgctccacgggaacaggccgttgacggcctgggcgatggtcatggccgggttgatgtgcgcgccggagacgctaccgaacataagcaccgggaacatgacgccgaagccgtagcccatggcgatgttcaaccagccggcgtggtgacccttggtgttcttgagctcgacgttggccacggagccgttgccgaagatcatcagaatggcggtgccgaagaactcggcggccagcttggtaaagagagagtattccactgcttcttcttttctcttcgccgcgcaacaggcatggctgactgttcacggcattctgtgtgattggaaatccgttcgcggagccggcgacgcgatttacgctgggcgcgaaagcaaacgtggcgattgtacactttgccccacgacgaaatgctggcaggatgcgatgtcgaatgtccagccgaatgcaatgcccaaaaaagccaccggaatcagccgaagcgaccttgactctcagtggttgcgaatgacgttgcgcaggggtaggacgctggtgggcgagacggacagttcgtcgattcctaggcacaggaacgtatcggtcaggctcaggtctgcgccaagctcgccgcagatgccgcaccagatgccatgacgatgggcagcctcgatagtcatctggatcatgcgcagcacagctggtgaatgcgggtcggcaaagcgttcgagactcggggtctgacggtcacaggccagcgtgtactgggtcaggtcgttggtgccgatggagaagaaatcgacttcggcggccagctcgtcggccatgatgaccgacgcaggcgtctcgatcatgacgccgatctggatactctcgttgaagtcggtgtgctcgccgcgcagctcgcttttggcttcttcaagaatccgcttggcgtcgcgcacctcctgcaccgaggtgatcatgggcagcataatggcgatattgccgtatgctgaggcgcgcaacaatgcgcgtaactggactttgaaaatctccgggcgggtcaggcagatgcggattgcccggtaaccaagcgcggggttatcctcgtggtccagattgaagtagtcgacctgtttgtccgcgccgatgtcgagtgtgcggatgatgaccggacggtcgcccatctcctgtgcgacttgtctgtatgcatcgaactgaaattcctcggtcggccagtcctcgcgttccagatacaggaactcactgcggaacaagccgatgccctcagcatcgttggccagcacggcggctacgtcagagggacggctgatgttggcgtacaggtggacccgctgaccggacttggtttcggtgggcttgcctttgagcttccgtagtaggctcaggtgttcctcagcttcggccttcctgcgctggcactcggtcagcgtggcctcgtccgggtcgacgaacaccgcaccgctggcgccgtcgattacggcaacgtgaccgtcatcagtcgggtcgaaggcgtcgccgataccggtgatggcgggcaggcccatcgtgcgcgccagaatcgcggtgtgcgagttcgctgagcccttggcggtcacgaggcccaaaaccttagcgcggtcgagctgcgcggtctcgctgggagcaagatcttgggcgaagatgatgtggctttcgccgttctgcgcaatcccgttctgcacagtaccgttctgcacagcatcgccttgtatactgccatcctgcgccgtgctatcgcgtttgccttgcagcacgttcatcacgcggcgagaaacatcctcgacatcagcggctcgagcctgcatggtcgagctatccatcgcagcgaacatggcggcgaactgttcggcgacgctcttcaccgcaaattcggcgttcaccttgtcttgcgcaatcaaaccttcgacgcatcccgcatagtccgggtcctggagcataagccgatggacgtcgaacagctcggccttgttttcgccgaactcagcggcgacgttgtcacgcagttgcttgagctgagcgacggccatgtcacgggccgcgcggaatcgatccatctcagcctgcggatcgtcgattacgcggcgttctacagcatgatcggcggcggcgagcacgcggaccgtgccgatagcaatgccagcggatacgccgacgccctgtatcgttctcattacagatgctccttgaggaatcgctcgaactctgcggcagcgacagcttcatcgttgccctgcacccgaaccgtaacctcgtcaccttgttgaacatcaagtcccataacaccgaagatacgcttggcatccacggatttgccgccgtaggcaacggtgatgttcgactcatattcccgcgctttggcaaccaaccggccagctgggcgggcgtgcatgccttcggggtcggatacggtgaacgcgaatatctgagacatgacgccgctccttacacgtccggccgtcacgcgcgaagacggcctttccgcaccagctacggactgatgctggaaaaaacaaaaaaccggaatctttcgattccggttgtctgtgcccccgcagggattcgaaccctggacacgctgattaagagtcagctgctctaaccaactgagctacaggggcttggttagatgttgaagtgttccttgcaacaggtgataaatatactcagatttgaagcgaatgcaactctcggcgtgtcgcgtctatttccggcgtttttgctaatacaaaaatcccccatgcggcgcgaactgcacgggggatgatgcttaagctcagactcttggtctgtgtgattccagcactaggccggaatgactcactcggccacgaccttcacgaagaaggaagcggtgatctccgggtggagggccaccttggcggggaaatcgccggtggtcttgatggtctcgacctcgatggccttcgggttcaccgcggccttgtcggacagagcgatggcgatggcctcgttggagataccaccgaacagcttgccggactcggacaccttggcggcgatctcgacggtggtgccctcgatggcggccttggcggcgacggcgtcctcgcgggtggcgacggccttggccagacgagcgcgcttcatagcggtgatctgagcctcagcacccttggtccacgcgaaagcgaggccctgcgggaacaggtagttgcgggcgtagccggccttcacgtcgacaacgtcaccggagtggcccaggttggacacggtcttggtgagaataaccttggtttcagccattgttcaaagcctccctaactcagcgacccgaagtggcgtacggcagcagggccatctcgcgggcgttcttgatcgccttggacagctcacgctgctcctgcacggtcacgccggtgatacgacgggaacggatcttgccgcgatcggaaatgaacttacgcagcagcgcaacgtccttgtaatcgatctcggtgaccttggcggccttcagcgggttcggcttcttcttgaacggcttgaccggcggttgcggcctcttacgtgacatgatgttctccttataaatcttgatattgattgctgctggcagcggggaggtaagtactgatcagaactccgggtcggaatcgtcgccgccgccgaaatcggaggaagcgccgaacgtggagaagctaccggcatcagatgcaccggcattgctccacgggtcggccgcaggagcggacgggttggcgggagcggcaggctgctgggagtatccagcgccaccaccctgatagccaccgttgtaaccgccctggccaccggcataaccaccttggccactctggttgccatagccctgattgggttgctgaccaccctggaaaccaccggaacgaccttggaagccgccctgaccggacgactggcgggtcacctgtgcggtggcgtagcgcagggagggcccgatttcatcgagctgcatctccacgacggttcgctgggaaccatcctgtgcctgataggaacgctgctggaggcggccggtggcaatcacgcgcatgcccttcttcagggactgggcgcagtggtcggccaggtcacgccaagctgagcacctcatgaacagcgcctgaccatcctcgaactggttggtctgacgattccaggttcgcggggtggaagcaatcgtgaagctcgccacggtcgcgccgctgccaatagtgcgcagctcggggtccgcagtgaggttgcccacgatggtgatgacggtttcgcctgccataacggtccttcttacttaccttgaataccagctgttcagctgactaaacgcttgattcagcccttacgaaggatcttcgtacggatcacggattcgttgaggttcagaacacggtcgagctcatcgctggtagcgggctcggcggtgtacttcaccacgacgtagttgccttcggtcttaccggcaatctcataggcgagcttgcgacggccccagtaatcgggctcatcgaaagagccgccttccttggtgacgagttccagatactgctcggtcagcttcttcagaccgcgctcatccagctcaggatcggcgatgaacatcagttcgtacttgtgcgcagacatcacccacctccttcggactattcggccacggacgttccgtggcaggagtgtgtatgcgtgtta

SEQ ID NO: 2582 - DNA, 24374 bp, Unknown
  R222_15m  MAG No. k141_2796
caaaaaatgctggccaatattcatggtgtcccacaccgtccgacgggtgtcgacagccgcgatattcttcatgtcgtggataccccgaaaatcggtatacccggttcgggcattcataattgtgttgccgatggaccacccgtggcctttgctccaatctccgaatctcttgaactgaccatcccagaaatccctcatcaccgtgttgtttgggttagaatgagcggcattcgcggcctgtttcgcatcctgccatccggagacgaaacgattccatgccctgccactgttcttcaacgaatgctggataccgactacggtgttatgcattccctcacctagagcattccatccctgccttatcatccccttggcaaagactttcgcgccgtcatgattcaaagtatccaacacatgctcccgcgtttgcattgtccactcgcttccgtcacttagtagcttatggaatccgcgattttcagaagcttcttaccccacttagtcggctgccacagtcttgcgcgtaaagctttttgtaaattgcgttaatcaccaccatgtctctcctcaataaaaaaatcatttgtgatgttctatacgtttgaggcccgtgccggcgtcgatctgagtaaggctgagattgatgtcaataagcataatcgaaccatcgacatcacgctgccagcacctactatctagtcagtttcggtggacccggattcattgagattctttgatgaagaatcttcactatttaacggcaatgaagtttcagatacagcagatgccttgaaagacgccaaaacgcagtcggaaaagaaactgaataagggggatttgttgaagaatgctaatgagcaggcaaaaacggtgattgaaaagatgtattcatctattgcagaaatggactcgtatacggtgaatatccacacaacagagccgaaaaaaatagtctacattgttgccaagcgctgttactcatgctatgaggcatgagtaacagcgcttttttatggtatagcaaggtcaattatttatcgtcaaaaatcagttgggaactgatttattcttggaggttatgcagtcgcgtcataggaaaaacgaggaattgagaggactcttatgatttcctatgtacgaaacgtgggtaagacggtacttgcagcggtcgttagtttggtgttcatcgttggcgctgcaggctgcggtaacactcaaaaggatgacggtccagactatgcggatgatgaggcgatgtccataatcgcaaaagcgtatcagaagcgttcggatgttctcgaccagtacgagcagaagaaagataccgattccgtcaagcatgtcaaagatgctgttcaggctgaaatcgataacgatgagcctttgaaagagcggcagttcaaggattcgaagttgcaggagaaagtcattacttatatcaacctgcttgaggattcacaaaaagtgaacgaggattattcctatctcagctcggattacagcaccgaatggactaaggtatacgataagcgttcggcattgctcaaggattttgtcgataattacaagctcacggtagacagtaaatatcaagatccattgaatgatattgttgccaacggttcgtccgtcaagaaaaagacggaaacggaagacgcgctgaataatctgattgcctctgcgacttttgagaaaactgatgacggatatggctactacgcatactcagccgtcatcgaaaacatcagcggaatcgatttcggtaccgtcaacttgatattggctctatacgatgccgatggcgtgaaggctgccgaagtatacgccagtactaatgcttggcctgcaggagaaaaggtaaaattcgaaaccggtagcgatgccgatgcggcgcaggtgaaggcatctgtcgaccactatgaagtagacgattaagcgtatccatacacaacagatagtgatggcccacagggaatcttcctgtgggccatcactattaaacgtcaatatcagtcaacttacgccgagaactgtttgccgaattccgagaagagctgacggcgggcgaagacgagcaggccgagcagcaccagcagggagaccagcccgctgaccatcaccagcacatcccacggagcccagccgagcggaatgaacgtcagaggcagcagaccggcgacgatgtcgaacgccagatacttggcgtactggtcaatggccttggcccgcagcacgataagcagcaccacgtcaaagaccagcgaaaccagacacgtgatcggtatgacgaacatggtgacgacatgattcatcgtcgccacaaaccagaccagcgcaatcgccagcatgatatagaaatatcgaaacatgaggcgaagcggccgcggcgcgtgcagaatcgcactgttgatgaacagcacgctgatgatcagcgcggctgccgatgcactggcaatcggtatcggccacgaaaacagatagctgaagaagccatgcagcagcagaatcgcgccggttacaaacgtgatgatctccaccgccaaacgcctcggacgcagatagatctgctgcgcggggaatgcggcgggagaggcctcgccgtgcaattcgttctgacagagtgggcaacgggccatatcgccggtgaaatcgacgttgcaggcatcgcaatgcttcatgccgacgctcctttctccacatgcgcgccggcgatgttcatacggccgctgatgccctgcgcggcgagaatccgacacaggttcttgatgacgttcagatcatggtagacggtggagatgccgatgctcaggtcgtcgccaaacgagcagaccgtgaaattcaggctggccggtgtggtgaggaagctcaccgaacgcacatggctcgcgagtcgttcgtccaaggtgactcggccaaggttcgagacggtggtcgtggtctcgcggtcggcgatgaaccgggccagctccagcacccagtccttggcaggggagggcgcgagacgcagcgccggattcttttccagcgcaatcatgcggttcatatgcgattcgacgcgctcgcgactggtggcatggtcgagctgctcctgcacatggcgggcgatgtcggccaacggctcatcggtcagcaatccacccataccgttgccgtgcgcggtgcgggcggcggactgctggccgtcaccggtcgcgtctgggcccgttgcggaagttttcgcggagtcctcatcggcttcgatatcggccggcgtgtacgccacgtaagtcatgccgtagaagttgcgcacggtctccgacctgaagaaggcgcgcaagtcgaccggaatatccacgcgaatcgcgcgattgcgggcgcgcgagggcatgacgtcgcgaatcgcgcacagtatcgcggcgatgaggtaggaggtgaggctcactccgcactgatgcgctgcaccaagcaccttgctggcgctgacgtgatattccatgaacgtgggcgcgtcccggtcgatggggccggccagccggtagatcttcgtgccgggcgcggcaccggccttgtctttctcgtagtatttgtcgaagctgttttcggctttgtcgctgtccgagccgtcgtaatccgaaggcacgcccggcacgtcgtaccgctcggcgatgtaggcgtgcaacagtgacttgaacaggttgatggcgccgcgaccgtccgaaatgatgtgcgagacctcgagattgacacgattgcggaaataactcacgcggaacagcatgcttttgggcccgtaatgcagtcgcgagcatatcggcagatgttccggctccaccagtggccggccgtccgactgttcgaggtaatgccagaacatgccgttgagcaggtgcacgttgaagctcgggaactgggcgatggcatggtcgagcgcgtgctgcaggatgtccggggcgatgtcgtccgccagctcggccgaatagcggaacacggtctgcgaggagcggccagcctgggaggagtagaacttgccgatgttgtctagtcggtaccaagtacgtcttgccatgcgtcgcctccctccggtgcgttggcggtggtgccggtgccgggagccggcaccagcggtgtgtcgtcgaggaaatgctcgatgatccggtaagtggtggacaccagccctacggccgacgtgttgagcagataaccgtggatgccgtcgtgaatccggtaacaggagacgttgtcgttcaccaattgcagacgacgggcgtacgcttcgtcctcgtctctgagcgggcagtattcggcggacaacaccagcgtgcgcggctgattgctcaggtcatgcgcggtgagcggcgcgaaatacggattggtcaggtcggccacggacgaacggtacatgtcgatgtagtcggccatgtcctgtgcggtgaggatgtagtcggtgccgttggtccgcaccgattcgaacgggctggtctcgggattgtagtcgttgccgaccaccgggtaaagcagcatctgcgtgcgcggcatgaactcgccgcggtcgcgggccatgagcgagacggcggccgcaagattgccgcccgcgctgtcgccaaacagcacgatgctgtcgggatccggtgctgggattgtcgcagatatatcgcccccgccggtgggggctgtcggcgcagccgactgggggtggtcaacatcaacagaaccacccaccccagaaatcggcaattccccagcaaacagctgccgggctacctcatagcaattctcaacagcagtagggaagcggtattcaggagccagccggtactcgaccgagatcacacggcgttgcagacgtacggccatatgcgcgcaagcctgcgtgtacaggttgatgccgcctgtggtccaaccgccaccgtggaaaaacaggatcgtgccacgcggcgtgactgagggaagttccgtgttggcattgccggaaataccgtcggtgttgccgctcgacgtgctttccttgatgggtattttgggtaggactttgggtaatacggcgggcagaatcgcggatattgccgaggccactggcgtgccattggcggaagattcctccagggcttcgggcaggggcgctccataggcgaccagcggcgtgaacactcgcaatggtacggcatatccatccgccataggcgcgaaggcgtcctcgacacggcatttcggattggcgggtgcctgcttggcgataagctcttccgccacgcgctgcaatttgtacgacttgcccgcgttgggcttgatgtagctggcggccttcatcgcggcgaacaatgcctcgttgatcggcatgacgacaggtcctttcagcggcggattcggtagtgcgaacaccccaaccttagcccatgaccggcatgaacaaaaaagggaaggaacccgagagttccttccctgtgtgccgtatcagacgcgatacgcgccgattatcaggcggcgaagtattccacgccggcctcgaagatcggctggtacttgttgccgggcacgttgacgtacaggccgttgccggaacgctccgagtgacccatcttgccaaacacgcggccgtccgggctggtgatgccctcgatggcgagcagcgagccgttcgggttcacatctaggtccatgccgggggtgccggtctcgtccacgtactgcgtggcgatctggccgttggccctgagctgggcgagtacctcgtcggaggccacgaagcggccctcgccgtgggagatggccacggtgtggatgtcgccgaccgaagtcttggacagccacggggagagatcggaggccacgcgcgtgcggaccagtcggctctggtggcggccgatggtgttgaaggtcagcgtcgggcaggcgtcggtcatcggcacgatgtcgccgtacggcaccagacccagcttgacgagcgcctggaagccgttgcagatgccgagcatcaggccgtcgcggttcttcaacaggtcacgcacggcctcggtgacggccggcgcgcggaagaacgcggtgatgaacttggcggaaccgtccggctcgtcgccgccggagaagccgcccgggatcatcacgatctggctcttgttgatctcatcgaccaacgcctgcgtggattcggcgacggcggccggtgtcaggttgttgatgatcagcgtggtcacgtcggcgccggcgcgctcgaaggcggcggcggaatcatactcgcagttgttgcccgggaacaccgggatcaccacatgcggcttggccacggaagagccgacgtacacggtcttcttcggcgcgtggaagtcgatggtctcgacggtcgcgcccttgtcctcgcccttggaacggtacgggaacacggattcgatgccggactcccaagcttcctgcacagcgttcaggtccagcgtctcgccggcggccttgaacacgtactcggaggtggtggtgccgatttcgccgatctcgatcaaattggagacggccggaagcttggcatcgtctgccagctcgacgatgaacgaaccatatgccggggtgaacaggtcgtccacggcgatgctgtcgttcagagtcacgccgatgcggttgccgagcgtcatcttgaacagggcttcggcggtggcgccatagcccggcgtggagacggccagggcatcgtggaagtcggtgagctcctcgatcacggagaacacctcaagcagcgcatccttgtccggggtcagaccgtcggccaggtagcgcggcgcgatgcgcacgatacggtgatcggcgtccttgaattcaggggaggtggcgcgcttcatgttgcccacggccacggcgaaggagatcagcgtcggcggcacgtcgagatcctcgaacgaaccggacatggagtccttgccgccgatggcgccggcgcccaggtccacttgggccatcagtgcgccgagcacggcggccgccggcttgccccagcgttccggctcgtcgcgcagcttctcgaagtactcctggaagctcaggtaggccttctcatgctcgaagccggccgcgaccagcttggccagcgactcgaccacggacaggtaggcgccggtgaactggttcttggacatgatgtacgggttgaagccccacgccatcgccgaagcggtggtggtctcgccgaacaccggcagcttggcgaccatggccatgttcggggtgagctgacgcttgccgccgaacggcatgagcacggtgcccgcgccgatggtggagtcgaagcgctccgaaaggcccttgttggaggccacgttgatgtcggtgaccagcttgttcatacgctcggccagcgtgccctcgccccacggggtctcgtaggactgctgtgcctcgacatgcacggtctggtgcttggaagcgccgttggaggccaggaactcacgggacagattcacgatcttgtcgccgttccaggtcatcaccatgcgcgggtcctcggtcacggtggcgatcaccgtggcttcgaggttctcttcgcgggcgtagatcaggaactcgtccacgtcctcggcggccacgtccacggccatgcgctcctgggattcggagatggccagctcggtgccgtccaggccctcgtatttcttgggcacggtgttgaggtccacgaacaggccgtcggccaactcgccgaccgccacggacacgccacccgcgccgaagtcgttgcagcgcttgatcagacggcaggcatcgccgcggcggaacagacgctgcagcttgcgctccaccggagcgttgcccttctgcacttcggcgccgtcgagttcgagcgattccacgttatgcgccttggacgaaccggtggcgccaccgatgccgtcacggccggtgcggccgcccagcaggatgatcttgtcgccgggggccggggtttcgcggcgcacatggtcggccggggtggcggccacgaccgcacccacctccatgcgcttggccacgtagccggggtggtagatctcgtcgacctgaccggtggccagaccgatctggttgccgtaggagctgtagccggctgcggcggtggtcacgagcttgcgctgggggagcttgccttccagcgtctcggagaccggcacggtcgggtccgcggcgccagtgacgcgcatcgcctgatacacgtaggaacggccggacagaggatcgcggatgcagccgccgatgcaggtggccgcgccaccaaacggttcgatttcggtggggtggttgtgggtctcgttcttgaacaggaacagccagtcctcgtcgtggccgttcacgtcaaccttgaccttgacggtgcaggcgttgatttcctcggactcgtcaaggccggtcaggacaccgttcttcttgagccacttggcgccgatagtgcccatgtccataaggcagacgggcttggcgtcgcggccgagctcgtggcgcatcgccaggtaacgctcgaaggcggccttgacggtggcgtcatcgatggttacttcgtccagctcggtgccgaacgtggtgtgacggcagtggtcggaccagtaggtgtcgatcaccttgatctcggtgatggtgggttcgcggccctcctcgctgaagtacttctggcagaattcgaggtcggccaggtccatggccagaccgcgctcgtcgatgaacttctggccggcttcggcgtccatctcgttgaaaccggcgatggtctcgaccttgccgggcaccggcacctgggtcttcagggtttccttggtctccaggctggcctcgcgggcctcgaccgggttgatcacgtaatgcttgatggtgtccacgtcggcgtcggtcaggtcaccttccagcgcgtacagcttggcggagcggaccgtcgggcgctcgccctgggagatgagctggatgcattcggcggcggagtcggcgcgctggtcgaactggccgggcaggaactcggtggcgaagaccttggcgccggcgaagtcgggcaggtcgtaggccacattgtccacctgaggctcgctgaacacggtgggcacggtctggccgaacagctcttgggagatgccttcgacgtcatagcggttcacgatgcgcagggccttgaggccgttcagtccgaggatcgtgcgcagttcgcccgcaagctgctgggcttcgacatcaaagccgggcttcttttccacgtacacgcgaaaaaccatggaaatcctttcttgaaaatattgaaaaattgaagaagcgcggtaaaagaacttggctcccctctccgaggggagctgtcagcggagctgactgaggggagttgtcatggcggtgaacgtcttgacctcccctcagtcgcctatcggcgacagctcccctcggagagaggagccagctgtatgtttctgctacctgcacctaaacgacttactcggcgacttcgatgccttcggacttggcgagttcggcgaggcgctcctcgatctcttcgtaggccgggatgatgctgccgagaccacggcggaacaggtccttgtcaaggtgctcgaccttgccggagtggtccttctggtcccacagacggcaggaatccggggtgatctcgtcggccaacagcagcgtgccgtcggtggcgcggcccatttcgattttgaagtcgaccagcttgacgtcgatcttggcgaagatctcgatcagggcctcgttgatcttgcgggccagcggggcgatctcggcgagatcctcgcgagtgcatacgtcgagggccaccaggtcatcgtcgttgacgaacggatcgtgcagatcgtcgttcttcaggaagtactcaagcaccggctccttgagcggcaggccttcctccacgcccagacgggagcagaagtggccggcggccacgttgcgcagcacgatctccaacgggaacatgttcaccttgcgtaccagctggccggtgtcgttcactcgcttgatgagatggctgtcgatgccgcgcttcttgagcaggtcgaagatgatggtggtgatgaggttgttcaggcggcccttgccggtgaagtcttccttcttttcaccatcgccagcggtggcggtgttcttgtattcgacccacagaacctctggatcgtcggttgcgtacagttgcttggccttgccctcgtagagcttttccagcttctccatgactcacctttcaggagtggaatttctgggtgaactaacggtaaaagggtaccaatcgagggctacaacaacactcggcatgacgctacgatgcggccagcgcatcatacgtcgctgcatcgaacggccatacgctgttgggatggcggaggcggatggtattggtccgacaatcgactcattgccggacgcatagtcgttcggagtaacagtatctacgcaagcacgcggacactcagatgttcgtcaatagacaaaacgtgagtgtacggccgcgcacgcacgataatgggagtgacgaaatggtgcaaggaggttcgtcatgatcgatcatattggtttgtttgtttccgacgccgcacagtacgcggatttctacgagaagctgctggccccgctgggctacgtcaagaaagtggcgtacccgaccgccgtgtgctttgccaatgacgaggatggtgacagcgtttggttggagtctccgaaggacggcaacccggtggtgccgtctcatgtggcgttccgcgccaaggatgaggacgccgtcaaggcgttccatgaggccggtctcgcctctggcggtaccgacaacggcgctccgggcccgcgcccgaactatggccccacgtattacgccgcgttcatccacgacccggacggcaataatattgaggccatgctgagctgatcaggccgtggactactccacggtaatcgtcaacgcatcggcaacacggccggccttggcacgggcgtcggcttcggactcgccgacggccagtgccacggccatacgacggtggccatgcacttcgggcttggcaaaaatgcgcaggtccgtgccgggttcggccagagcagcggccacatcggtgaactcggcctcaccgtcgccggccaccacaatcgcatggcttgccgccaccgagccggccggaatcgtgagcgccacatgctcgggggtgatcggcaggccgagaatcgcgcgggcgtgcagcgcgaactcgctcagacgctgggaggtcatcgtcaccataccggtatcgtgcggacggggggagacctcgttgaacagaatcgagccgtcggtgagcacgaacagctccacgccgaatacgccccaaccggtttcgccggtcgcctgagccttggccaccaagccttcaacggcggtacgtgcgatgtcgcgcgcccgctcggcctcgccatcgggctcggtagccggctgccaggactcgcggtaatcgccggactcctgacgttggccgatcggcgcgcacgtcacaatgccggcggacgaagaaacggtcagtaccgtcagctcacgctccagcggggcaagcgcctcaacgatcacgcgcgacacatcgccctcatcggcggcgcggcggccctcctgcgcttcggtccaagcggcatcgatggcgtcggcggaacgcaccaccgactggccgtgaccagacgagctcatcaccggcttgaccacgcacggatagccgacttccgaagctccggcgcgcagctcttccagcgagccggcaaaacgatacggtgtagtcggcaagcccaattcttcgtgggccagtacgcgcaggcgctcgcggtccatgcagatcgcggcgatttcggcgctcggcaccacctgggcgcccgcggccgcagcaccggccagcacatcggtggcgatggcctctacctcgggcacgatgatgtccggcttgatttcatcgaacaatgcctgcaattcggcggcattcgccatatccaacgcgcggtattcatgcgccacctgctgggccggagcgccggcataggagtcagcagcacacacccatgcgcccagtcgcatgagttcaagtgtgacctccttgcccagctcgccagcgcccaaaaacagcacacgggtggggtgcttgcccagcggtgtgcccagcgggtggttggctgcgcgagttgcgggggagacggcggaagtctcggcgggaattgcgggagaggaggcggaagtcacggcagtattcacggcgttctcagtcatacccacattctgccatgacgcgatgatttcggtatgtcgcgtgagcggagtgcctcgcgcggcaaaattacgggcggaatatccggcttcatggggcggtaaattccccatggggcggtaatgagtccatggggcggtttgttggttttgtgaaaccgcggaattaagccgttttgccttaccgccccatgggaatttcaccgccccatggggtaaataccgccccatgggcaggttgccgccccatgaagattcagatgcccgtaacccgccataaatactgcgtatagacacgccattgcgtgtgtaacagagccgtcgtaccttagcaattaccggccgatgaagtatggggcggtcgggccaacattttgggatgcgacatatagcgaatagcggcgtgtcggttccggcgtttcaggctacaagccggcacgctggcaatagtcgaagtacttaacgattccgcctatgcggggctcgaattcggtgacgtacgctcgctgagcctgctggagactccgggcgcgctggacgtggcgctggaacttggctcgctgtccaaaatgtatatggtggccggctggcgcggtggcatggcgattccgccgcattcgtggattggctgctcaacacggccggcgtggcgctgatgccgggggtctgcttcggtcaggtgggcgaaggctgggtgcgcatcagtctgctcaagcacaccgccgagttgttccaggtcgtggcccgcgtcgatcgtgcgctgcgaagcgcgtgattcaatattaggcaaaatgcggcagcccataccatttcacacgcgttcaggcagcgcggccgacgccattgcctcgcggtggtttaggatgaggcaatgcgcgaaaacgggattgaagagagcattgatcgtccgctgactatcgctcttgtggtcgatacggtgggcaatcagggcaacggcacctccaattcggccttgcaatgggctgcggaattggagcggcaaggccatcatgtgaggcttgtcggtataggggcgcccgaatatccggcgcgtgtgaataaggtgccactcgtctcgtgggtggccgccaagcagctcatgcaattcgccgaacccagcgacacgttgttccgcaccgctttccaaggcgtggatgtggtgcatatctatatgccgttcaaattcggccgtcgtgccgctaaagtcgcccaccaaatgggcattcccgtgactgccggattccacctgcagccggagaacgtgctgtattcggccggcccgctacgtcgcattcccggtatttccagcttcctgtactggctgttcaagcactggctgtacaagcacattgaccacatccatgtgcccaccgaaatgaccgcgagcctgttgcgcgcgcacgggtataaagccaagttgcacgtgatttccaatggttattcaccggtgtattcgccgaagaagccggccgatccggatgcctcggctcccgtgccgttccgcgtcatcgcttccggccgactggctagcgagaaagatcagattacgctgatcaaggcggtgtcgatgtcccggcacgccggcgatattcagctggtgatcgccggtactgggccgctcaagcagtatctcaagttccgcgccgggcgtttgctggcgcgcaaggccgatatcggattccacaagcacgccgatatgcccgatttgttgcgttcgggcgatttgttcgtgcattgttcgattgccgacatcgaatcggtgagcgtgatcgaggcgatggcgtgcggattggtaccggtgatcgccgcgtccgaactgtcggcggccggccagttcgcgctgatcgacgagtcgttgttccccgtgcgggacgcggccctgctggcccgacgcatcgattggtggatcgcacatcaggccgagcgcgccgaatggggcgagaaatacgccgaatacaccaaggcgcattattccgtggaagcctcggtccacaagttcgtggatatggaacgcaaggcgataggggagtaggagccttctcgtttgcggagaggttttccctcagtccgcctgcggcggccagctccctcatcggcgggagctacgaaaaaacctccctctgatgagggaggtggcatcgcgaagcgatgacggagggagggattagcgaagggttttacaacaactcaataagctgatcgacttcttcatgcgtggtggcccagctggtgcagatgcgcatcacggtatgcgtgtcgtcggccttctcggtgaagccgagcttgacctcgcgctccagacggtcgatggtcggctgatccatcgtcacgaaaatctggttggtgggcgcttcgaaagtgagcatgtagcccttggcgcgcagggcctcgcgaatacgatcggccgcctcattggcgttgcgggcaatcttgaaatacaggttgtcggtgaataaggcgtcaaactgcgcgcccagcacgaagcccttggccagcaaggcgccgtgctgcttgatgcgggtcaggaagtgcttcggcgtgttgtgcttggtaaacaccacggcctcgccgaacagcgcacccaccttggtaccgccgatgtagaacacgtcggcgatggtcgccagatccgtgagcgtcatgtcggaaccagtggcggtcagcgcgtagccgagtcgcgcgccatccacgaacagcggcatatcgtacttatgcgccacatcggcgatagcctgcagttcggctttggagtagatggtgccatattcggtgctttgcgagacgtacacggatccagggaacaccatgtgctcgtagttgccgtccgcatagaaggtcttgcagaactcgtccagttcggttggatccattttgccgttgtgttggggaatcgtaagcaccttgtggccggagaactcgatggcgccggcctcgtgcacgttcggatggccggaggcgaccgcgaccacgcctgcatacgccggggtgatggtgtcgatgacgacctggttggtctgcgtgccgccgacgaggaaccacacatccgcgtccggctggccgcaggcctcgcggatcttggccttggcctgatcgctcagttcgtcggacccgtagcccgaatacagatggttgttggcttcagccacggcttcaagcactgcgggatgggcggcgcgggagtaatcgttctcaaaagacagcatgacggaccttttgtccttgtgttagatgaattggatatgcccgagtgtacaacgtggcggttcccggcaggagcggggaattcatggagaaaaacaaaacccttccgcgaacggaagggttttactggggtggccaacgcggctcgaacgcgcgaccttctgaaccacaatcagatgctctaccaactgagctatggccaccatggtgtcgtattcagcaagctgaattcgcacaacaggtgaatactatacacaactttgcggatgtgtgctcatcggtgtgtcgcgatggaatcaagcggttggtttcattcttggggccaggctgtgggctgtctcaaatggtgggatgtggacgagtgggtcttgtgtggcgattgatgaaaagtcagggcacacaacggcgtgatggtgcggctggggattgcagagatgattacgtgagcgttcacaatgtgagcattatgtttcatatcaaccgcgacccgcctagtttcatgcgatgttacctacaccgaacaagggaagagaaacaccatggaaaaggttaaagcctttgcagattggctgaccaagtggtttacggtcatcgtcatcgtctgggccgtcttcaactacttcgtgccggccgccagcctgtggggcaaggcgtacaccggctacatgctgggcatcgtgctgttcggcatggggctgaccctgacgctggacgatttcaagcgcatcctcacccagccgatgatggtcatcgtcggcacggtggcccacttcgtcatcatgccgctcgtcgccgtggccctgtgcgcgatcttccacctgtccggcccgctggccgtgggcgtgattctcgtcggctgctgcccgtccggcacctcctccaacgtgatgagctacctgtcccgtggtgacgtggccctcgatgtctccatcggcatcctctccaccctgtgcgccccgttcatgattccgctgctgatgcagctgctggcctcccagtatgtgagcgtgccggtcgaatccctgttccttaacgccgtcaaggtggtgcttttcccgatcgccctcggcgtgatctgccacatgatcttcggcaagaagatcgagaaggtcacggtggccctgccgatcgtgtcccaggtggccatcctgctgatcatcggcgtggtcgtcgccgccaacggtccgaagctgttcgtggccagctccctgatggccattccggtggtcatcctgcacaacctgtgcggctactcgctgggcttcggcttctcgaagctgatgtacaggatctacccgaagggcttccgctacgcgcagcagaaggccatcacgttcgaggtcggcatgcaggactccgccctgggcgccacgctggccctgacctccttcgcgtccaacccgctcgccgccgtgccgtccaccttcttctccgtgtggcacaacatctccggctccatcctgtccagctggtggcgcaaccatgacgaccggcacgagattcattgggattctgacaacggcgagaagggctccgccaagagcaccgtttccgtggcccacccgttcgacgccgacaaggccgccaaggtcgctgcctgaaatcctgagatggtgagaaaggtcgggtaaggcacgactccagtcagtcggtcactcacctttcctacctcgcataacatagccgctcccgcttactcccgattgatgtatcgggcgtttcgcgagggcggttttgctataattagtaatgcagaaagcggcaaggtgatacggcaaagaggccgggtcgctagaggttcccatcggatatggaagagcacgaggatgtgctggaaacagataacacagaagcggcatgtggtgaaaagaaacataatgtaacctccttggcggtgcccccgtgtgacatagtctccgcgggggcacctgctgtgtggcgttcgcttttttgcgacgcattcccgggaatgttgcgttgggagggcgtgtgtgcgtgtgttgtgcgatgcattcccgggattgttgcgccagaaggagaggaaaagtacagggcgcggattgtcccaagctagtgagtcgaggcccggcgcgtcgttgtccggcggaatcgtagtatagatattcgtgtgtgccagtagcacgccttatgtaacaggcgagcatgctgggatatccttcaaaccgctgatcgcacgcagcaatgcgccgacgggaggggcgaaggccatcgggccggtggactgggctatcttttccgattcgtcgggtgtcgccaacaggcggatgccaagcgagtgtgctgaaaagtgtgggcgcagtgcggcggtcacacaaaagcaagagaaaccactgaatcggagaattcaagttgcctactattgaacagctcgtccgtaagggacgtcaggcaaagccgaagaagtccaagactttggccctgaagggcagcccgctgcgtcgcggcgtgtgcacccgtgtctacaccaccaccccgaagaagccgaactcggctctgcgtaaggttgctcgtgtgcgcctgtcctcgggcatcgaagtcaccgcctacattccgggcgagggccacaacctgcaggagcactccatcgtgctcgtgcgcggcggccgtgtgaaggatctcccgggtgtgcgttaccacatcgtgcgtggcgcgctcgatacccagggtgtcaaggaccgtaagcagggtcgttccctgtatggagcaaagaaggcgaagtaagagatatgtcacgtaagggaccttccaagaagcacgtcgtgctgcccgatccgatctacggttccaccgtggtggcgcagctcatcaacaagattctgcttgacggcaagaagtcgatcgccgaagacatcgtctactccgcgctcgatatggtcaaggagaagtccgaccaggaaccggtggctgtgctcaagcgcgccctggacaacatccgtccgtccctcgaggttcgctcccgccgtgtcggtggcgccacctaccaggtgccggtcgaggtcaagccgaaccgcgccaacaccctgtcgctgcgctggctgaccgacttctcccgcgcccgtcgtgagaagaccatggccgagcgtctcgccaacgagatcctggatgcctccaacggcctcggtgcttctgtcaagcgccgcgaggatactcataagatggcagaggctaacaaggccttcgctcattaccgctggtaatcactcgccctgagtaaaactaaggaaaaagatggctgaagagatttcggacctccacgacgtccgcaatatcggcatcatggcccacatcgatgccggcaagaccaccactaccgagcgtattctgttctacaccggtaagaactacaagatcggcgagacccacgacggcgcctccaccatggacttcatggcgcaggagcaggaacgtggtatcaccatccagtccgctgctaccacctgcttctggagccgtcagtcccacgacaccaaggacaagttccagatcaacatcatcgatacccctggccacgtggacttcacggccgaggtggagcgctccctgcgtgtgctcgatggtgccgttgccgtgttcgacggcaaggaaggcgtggagccgcagtccgagaccgtgtggcgtcaggctgacaagtacggcgttccgcgcatctgcttcatcaacaagatggacaagctgggcgcgaacttctactactccgtcgacaccatcaaagagaagctgggcgccgctccgatcgtgatgcagctgccgatcggcgccgagaacgacttcaccggcgtcgtcgacctggtcgagatgcaggcctacgtgtggaacggcaccgaggagctcggcgccaagtacgacaccaccgagatcccggacgatctcaaggacaaggcccaggagtaccacgagaagctcgtggaagccgccgccgaagccgacgacgaactcatgaacaagttcttcgaggacggcgacctgtccaaggaagacatccgcgccggcgtgcgcaagctcaccatcgccaaggaagccttcccggtcttctgcggctccgccttcaaggacaagggcgtccagccgatgctggacggcgtcgtcgactacctgccgtcccccgaggacgtgccggccatcaagggctacaagcccggcgacgagtccgtcgagatcgaccgtcacccggtcaagaccgatccgttcgcggctctggtcttcaagatctccacccacccgttctacggcaagctcgtgttcgtgcgcgtctactccggctcagtcgtgccgggcgactccgtgctcgactccacccgcgagaagaaggaacgcatcggcaagatcttccagatgcacgccgataaggaaaacccgatggaccgcgccgacgccggcaacatctacaccttcgtgggcctgaagaacgtcaccaccggtgacaccctgtgctccatcaacgacccgatcaccctcgactccatgaccttcccggatccggtgatccaggtggccgtcgagccgaagaccaaggccgatcaggagaagatgggcatcgccctgtccaagctggccgaagaggatccgaccttccaggtcacgaccgacgaagagtccggccagaccctgatcgccggcatgggcgagctccagctcgacatcatcgtcgaccgtatgcgccgcgagttcaaggttgagtgcaaccagggcaagccgcaggtcgcctaccgcgagaccatccgcaaggccgtcatggaccagggctacacccacaagaagcagaccggtggttccggccagttcgcaaaggtcctgatgaacttcgagccgctcgacaccaccgagggcaagaccttcgagttcgagaacaaggtcaccggcggccacatctccgccgaattcatcggccccatcgaggccggtgtcaaggaggccatggagtccggtgttctcgccggcttcccggtcgtgggcgtcaaggccaccgtcaccgacggccagatgcacccggtcgattcctccgaaatggccttcaagctcgcaggttccatgtgcttcaaggaagctgccccgaaggccaagccggtcattctcgaaccgatcatgaaggtcgaagtccgtacgccggaagagtacatgggcgaagtcatcggcgatctgaaccagcgccgtggcaacatccagtccatgaccgacggtgtcggcgtcaaggtcatcgacgccaaggtcccgctgtccgagatgttcggctacatcggcgacctgcgttccaagacccagggccgcgccatgttcaccatggagatggactcctacgacgaggtgccgaagagcgtctccgaggagatcatcaaggcccagcgcggcgagtgacacgcgccacatcatgaagtggccggtgtctccagtcagcggtaatatcgtataccgctgactgggttctggctcttcaaagtggcacataacccagaaacccagtagaataagcgagtccctgtgcgaaagggcgcaggaaactcacgagacgtccaggaggacaaaagtaatggcaaaggaaaagtacgagcgtactaagccgcacgttaacatcggtaccatcggccacgtcgaccacggtaagactaccctgactgccgccatctccaaggtgctgcacgaggagttcccggatgtcaacccggagtacgacttcaaccagatcgattccgctccggaagaggccgcccgcggtatcaccatcaacatcgcccacatcgagtaccagaccgagaagcgtcactacgctcacgtcgactgcccgggccacgccgacttcgtgaagaacatgatcaccggtgccgcccagatggatggcgccatcctcgttgtggccgccaccgacggcccgatggcccagactcgcgagcacgtgctgctcgcccgtcaggtcggcgtcccgaagatcctcgtcgccctcaacaagtgcgacatggtcgacgatgaagagctcatcgagctcgtcgaagaagaggtccgtgacctcctcgacgagaacggcttcgatcgcgactgcccggtcatccacacctccgcctacggcgccctgcacgacgacgctccggaccacgagaagtgggtccagtccgtcaaggacctcatggccgccgtcgatgactacatcccgaccccggttcacgacctggacaagccgttcctgatgccgatcgaggacgtcttcaccatctccggccgtggtactgtcgtcaccggtcgtgtcgagcgtggccagctggccgtcaacaccccggtcgagatcgttggtatccgtccgacccagcagaccaccgtcacctccatcgagaccttccacaagaccatggacgcctgcgaggctggcgacaacaccggtctgctgctgcgtggcctcggccgtgaggatgtcgagcgtggccaggtcgtggccaagccgggctccgtcaccccgcacaccaagttcgagggcgaagtctacgtgctgaccaaggacgaaggcggccgtcactcgccgttcttctccaactaccgtccgcagttctacttccgcaccaccgacgtcaccggcgtcatcgagctgccggaaggcgtcgagatggttcagcccggcgaccacgccaccttcaccgttgagctgattcagcccatcgccatggaggagggcctgaccttcgctgtgcgtgaaggcggccacaccgttggctccggtcgtgtgaccaagatcctcgcctgattatcatcagacaagaatcttcgcttgaactagcgacttaagaaatccccttcgaggaaactcggaggggatttcctataaccgcagcaggatatggatatgtaccacgacttccggcctggatgcgctagtgttgctttccaatagataaacggactgctgcactgcgagggtatgacactgatggcaggccgggaaagaaggtcgatgatgactggttcgcaagccgcacactgtggttccgtatccgcgctttcactgggactgcccgtctccacggcgattcccgaagccaaaggcacactgccgaaagccttgttcgtgggcaaggcaccgatttcaggcaaactcaagcagcgattggtgaacgaaatcgaatccattaccatgctggcgttggtccggtcgattaacactgggcttgcggacggcaaactggttccggaagtgctggtcatcggactgaagcttacggccaaagccactggcataccgaacgaggtcatcgatttgattgccgggcagcgtaaatcgggtatcgtgttcgtgtgcgtacgcgacgtgccgttcgagggcagcacacgtgaggaatgtgcgttcgccgtgcgtcgggcgataccggggcgtgccggccacacgccgatctatcgggtatatgccggcgattggcagccggcgggggaggcccagctggagctggccggctctactattgatgagctgtgggcctcgctgtgctcacagaccattctgggcacgccggagatcgaaaatctggatgcgcgcatcattcgccatactgaaattgctcggctcgaatccgaagtggacaagctcacccgcgaccatcagcgcgtcaagaatcctgttcagcgcaatgaaatctatgccaagctccacaaggccaaaacacagctcgcagaactgcgcgaagcatagtgatatgaaaaccattggggtcccgctggcgggagctggctcgcaaagcgagactgagggtggtccaggtccgtggcctagggctacgcccaagctaattgaaatattcgtgcatcatacagcgtacagttaaaccatgttccctctgctcgaaaccctggtcgccgtatacgaggtgggccagttcacgctggctgccgacgaactgaaggtgtcgcagtcgacggtgtcgtcgcgtatcgcccaattggagcagatggtcggcgcgccgctgttcgtgcgcaatgcgaaaagcgacgtgacgcccacacaggccgggcggatgctgtaccagaccgccatcggcatcgacggattatggcgggatacgtgtgagcagatcgcccgcgtgcaggaggcgcgtgagccgctggccgtttcgttctcgcacacgaccgcggcgattctgctgccgaaggcgttgccggtgatggctcggaacatggacagtttcgacttcgccgtacacgtgatgaactcggatgcgattctcgaacgggtcagcatgaaggccgtgcagctcggcgtggtggaaaagccgatcgtgaacgattcggtggaccgcgtcaccctgtgcgaggaccggctggtgttggcgggggagcccgacggcgtgtggatggtgcgcgagcacggttccggcgtgcggtattacacggatttgtatttcaagaccgctcaggttgtgcctgcacgcacgatggaagtgtccagtaatgcggcgattgtggcggcgctgtccgccgggttcgggcagtcgttgatttcggaagccgccgtgccggcgggcgtgccggtgcagcgggagcttggcgatgagtttgtgcggcggttctatgcgctggtgccgagatccggtctgacgcacgatcagcgggagttggcggagatgattattgctgcgctgcgcgggtagtcagatagtcgactgaggggaggtcgcgaacgttgtttctctctctccgtccgcctgcggcggccacctccctcatcagagggagatcaattaggtatcgacaaaatcgatgatatgtattggttgcaatgatttgaccgatgtaaatgcttgagcttcaatagacatcgtgagagagttctgtacaaaatggtggaagcgcattaccaccgttgacatgttgttcattggcgttctgactctgctggcctcgctgttcgcctcctggctcaagcagttccccggattcagcctgttcggcgcgcttatcatcgcgctgctcatcggtatgatcatccagttcccgatcc

SEQ ID NO: 2583 - DNA, 39200 bp, Unknown
  R222_15m  MAG No. k141_2835
accacaaacgacgcacaaagtcatgagccattcgaattgcgctggcccaatcgctacgaatcatatttgccgtagcccttaagtgaatcccactgcatcgagatatcgcgcccgctatcccttccgataacgccgaccacgcgtgttgccttcagcaatcagctttccttgcgcaactaaaccgtttaggaatttgcggactgttctgttatcgagctctgttatcttggcgagttcaggtacagtcacatagtcaacctctgtcaagcgtcggttcatcgccgacagcatcgctgcccgcgaatcaatttcacccgatgcggttgcatctgctttcttaccatccacacgttccccgccaatgagcctcgcaccctcttcggcatctttctcaactacagatctcacgctagcaaaaccagaaccatccacggtcttcagcgcaggaacaataggaatcgtcgcctcgaatatgtcaccatcgcggaactcaggctctcgctcagtatattgccgggacgctcttatcagattccgcagtccgctacccagctgctcggctatgccggtctgcacaaacacattagcgataatcggattctttggcattggcgtgaactcgcccagcttcattcgaccttcaaagaatgagcgcgaagcattaaccgtccggatggattcattatcaatggtgacacgcgccaccaccggactggaatactcccgatgcatgaggctgtttgccaccaattcacgggcgatcatcgtacgcgggctcactcgcttatcgccctttaacacaaagcggtcaggcagattccgctcagtaaattcacggagttgctcgtacgaatcgaacaagttggtccgcaccataagtcggtcatcgtatcggtcaatattgtctcgccgaaccacggcatcagtaatatacgctgggcaaaccgaggaaatgacttcatccttgcccaagagcagcactgcagcaagattaaagccctcttcgccggtcgtgtaatcacgatcgtatagcttggcgctgcggaacagttcttcgtcagacatagttccccaagggtgcccagctcgctgagcgaccgccagctgccgcattcgcgcaatcagctcaggacgcaaatcaaacggagtcacgtaacggaaaattcgccgttcggaatagtagttctgcttgcgaatatacatttgactaatctggatatcgctttcgatgtgtgtatccacatcagcaatgcgatcaaacactgcgcccttgaaccgcacaaccgaagaactcggagctacccaaatacgaacaataatccgttcgtcgtactcgatatgttccgtttccaccattggagccggttcgaacatcttacgattagacactacgttgacaacgttgcgctctatctcactaacgcgcttagaatcgacgccgagcacttgaccgtcatcgtcaacgccaagataaatgctgccaccagaacgattggcgaatgagcatacagtctcaaaagtatccgtatgaggcaattcgctgcagcgcttgaactcgaccatagatgattcaccggcctgcagcacttgcataagttcatcctgcgtcatcgcattccgcccttcatagcgataattcatacattaggacatggcacttatcgtattttagcatctaattagtacattaggacattgttttatgtcctaatgtactaattaggcggctaattgtactaataattgcacactgatgtactaatccgatgatcgaatgcactaattgtccgcgcaaatgcactaatcggatgaccgaatgtatcaatgagacctataggcagccgattggctgacgatcagcccggtcattggctatcggccgctaaccagtcagccgccaacagccaacagccacccaactaatagccgccagccaatcagcccgtccaatcactccttgtgttccagtgcggccttcaaatcgcggctacggtagcgttcgcgcagtatagagaatccaccgaagcccacaagccacaccaggccggcaatcgcggaattgcgcgtatcgtccgcaaggaacaacgtcaggtagatgaacacgaagaacacgattgccaccgtattgagcaccttccacgcgggcatgacgaacccgtccgcgatgaaatcggcggaacggcgatacctgcgatgcgccagcagcgtcaggatgtagatgaacaggaacaccgcggaactggcggacgagaacagcacgaacgcccccgagatgccggggatggcgttgacgatcggcgacagcagtatcagcgccgcggacaccaggatggcgcgggccggcaccttgcgatcggacaccttgccgagcttgttcagcatcgggttcggcgacacctcggacagctggtacaggtggcggccggcggaatacaacagcgaattgagcgacgaggacgcggcggtgatcaccacgaagaacaccagggcggacgcccagttcaacccggcatactggaacaccatgatgaacggggaggcgaaggagccgtcctcgttcggcttgaacgaggtccacggcacgatgcacatgatggccacgagcgcgcccacgtagaagatgagcacgcgcacgatgatctcgttgacggctttgggcagcacctcacgaggattcttggtctcggagacggtgacgcccacgaactcgagcagctcataggcgaagaacaccatctggaagctcatgaggaaggccatccagccgttcggggcgaacgagaagccggagaacaggttgtcgagtccggcgtggcccgccgggctcacatgatccacgccatgaatccgcgcggccgggtaatggtagccgatcacgatcatgaccacggcggtgacgatcatcgcgccgatcagcgtgatcttgatcatcgagaaccagaattccacctcgccgaacaccttgacggcgatcaggttgacggacaccagcgacaccaggaaacacagttcgatcagccatttccaatgggtcaggtcgatgccgaacgtgtcgaagaaggtgatgaagtacgtggagacggccgtgatctcggtcatgcccaacagcacgagcgcggcccaatacgtccagccggcgaaatgcccccatccgttgcccaggtagcgggtgatgaaattgatgaaggtgtgctggctggggtcgcggtacatcatctcgccgatggcgcgcatcaggaagaacatgatgacgccgaccaggatatacacgaagacgatcgaggggccggtcagtgccagcgacttgcccgaacccaggaacaagccggtgccgatggtgccgccgatggcgatgaactgcacgtggcggttgctcaggccacgctccatctcgttggtctggtccaggctttcgacagacttgagtttgcccgtagcctgccgtgtaccaccattcacattcgtatcggccatactgatttcatttctcttctccgccgcccgattgttacgtaccggacgcgatactcgttcaaaacaagttcagactgtatcaccgaaatatgtcgcgaaaaccgctcagctcaagaatacatgcgatgatgctgtaaatattccgccaaaaaagttcaattcaccaacacctaattgaacttctacctctattccacggacttgagcgagctgaccgggtctacgcgatcgagcactgggttggtgaacagctgcaccagcagcgcgaacgccagcgtcgccaccacggcaatcgcatagctgtaccagtgcacttccacttcgaaatacagcgacggcatattcaacgcagcagtcagtaatccgcctatccacctgccaagcggcagaccaaccaccacacccataccggtcaatatcatcatctcgcggttcacgtagttgtgcacctcgcggtcatagaagcccagcaccttcagtgtggccatctcgcggatgcgttcggacacgttcgtattggccaacgtaaacagcaccaccagcgccaggccgccggcgagccccacaatcagcgccaccacggcacccatcaaatcgaacttaaacgtggcggccagatgcgcacagctcacggccttgagcaccgacgattcctcgcccaaccgatccgcatattcggcctgttcggtctcggaacctttcagcttggcgagcatcgcgttccacgtcaaggtcgaggcagtgccatctcccgaagccgaagacgtcacaccgccggccgcaaacttctggtcgtacagtcgctcactgatgtacacatcagagccaataagattgcgcgtcacggccgtgacctgcaccttggcccggctgctaccgccattgcccagcgtgacggtgtcgccggcatgaatattcagcgagttggcggcggactgcgatacaatcacgccactatcgtccagcgctacagtgccgccacccgctttgccgaagatattgggcagcccaaaccatccatcatcgccagcttgttccagcgtgaccatatcgttcaagatattcagcgaatcgttgggcacggtcatcagctgcacggcttcgctttcctgcgccgcattgctcatctcgccactatccacgcgcagattcagcgtttcggtggtttggccatcttgtgccacctgcttgcgcatcgcggtggcgtcatcgtcattggccacgaccatcaggtcgtactggtagatctgctcgtattgtttgacgccaatcgtgtcgacggtgtcattaatcgcaaatccgcagataatcaacgccgtgcaaccggccacgccgcccacggtcataatcaagcgcgacttgaatcggaagatattgcgcgcggtgactttgccgaggaagttcagccggctccataccgggcgaatccgctccagcaatatgcgagcgcccgctttcggtgccttcggccgcatcagcgcggcgggcgtgtgccgtatctcctcgcgacaggcgagcgcggtggccacgcccacgccgaccacgaacagcacgatgccggccgaaccgtacagccagtcgtattcgagtcgcacaccgggcaatatatacagtccctcaatcaccaccagcaggaatgccgggatgccaaggaatccgaccagcagaccgatgccgccgccgaccaggcaggcgagcaacgcgaacagcagataccggctggacacggcgagtccgccatagccgagtccaaggtaggtgccgataagtccgcggtcttcctcgaccatgcgggtcatggtggtcaggctcatgagcacggcgaccagcaggaacacaatcgggaatgcgcggccgatggattcgatggaactgacgtctgatttgagcgagctgaatccgtcgatcgaagcgcgcgtctgcacataccaacgtgcgttggccacatcgtcgatgcgccgttgctgcttggcgaattcgctttccgcttcgcttcgcttcgcatcgagttcagactgcgcatcatccagtttcgccttgccgtccgcgagctgttgttcgccttcttccagctgccgctcgccttcttcgagctgctgcttgccgctggccagttgggcggcctgcgcttcaagttgcgccgactgggtttcgagggttgcggcattcgcttcgagttccgcggatttggtattgagctgtgcctctcctgcagccgcttcctgttccttggcggtcagttgcgcgttctgctggtccaaggtggattgtgcgggggcaatggtttcgtttaatgtgcgctgcaaatcggctttctgctgggtcagactgtctcgctgcgtttgcagttccgtttgcttggcggccagctgttgccgcagctcactgattgacggcacttcaggcagggtaatgccaaggcgcgcgagcagttgcttgatggcctgccatgtgggtgagttgaagtcgatattcgggtcaagttgcgccagtagattgtcggcctgttgaatcatggacagcatctgatcaatttgtgccacgccttggtcgatttgggtaatgccctgttcgattttcgtgcgattggcagtcagttccgtttgcgccgcatcgagctgtttgcgagccgaggtgagctgcgctttgcccgattcgagctgggtgcgcgcttcggctatctgctggcgaccttgcgcgatctgttgacgggccgatgcaatctgcgcacgtccatcggcgagctgccgttcgccatcggtaatggttgtcctgttgttctccaattcggtacggctatcttgcaatgtcgttttgttggcttccagctcggcccagttgtcgtcgatctgcttctgggcttcgtccagctgctcgttggcctcgtctttggcatcatccagtttgcgctgcgcgctggagacgatctgttgacgacgggctttctggcgtgtggcctgtatctgatgttcgatacggtcggccacggttttgatggcttcatcgtaggcatcggaaaacgtgtcaaaatcggacgcaccagtgacggcaaccgatatcgcagtgtatatattgccggtcacgccgtcgctgggtgcaaagaacgtatagtcctcggatgaggtggaccggaaggaggtcatgcccgaatagccgtctggattgttgaggtcgcgcgggtcgagtacgacgccggtgatggtgagtttcgtggggaactgcggggattgctcggcgtcggcgtccgtattggcgtcggacttcgcatcggatgccgaggcattggcggcgacacctaccgtatcggcattattggaatcgtcagtctccgtggccgctaccgatatgacggatgaagaggtgtcttgtggcgtcacagtaatggtgccgccaatcttgagtccgctatcgttcaggaattgctgcgtaaccgccacttcgccggccttgttcggcagtttgccctgccgtatgtacggctgatcaagcccttcggtaccgatttcctgcatggtcacggttttcttggtgccgtccaccaacgtggtcaccgtctgagaacgttcgggctgcacggtttgcacaccgtcgattcggcgcagtgccgttgcatcatcatcggtcaggccgtatgtggatagcacctgcaggtcatgcagtccctgctgatcgtaaaaacgaccggccgccagaaaagcatcgcggcatccggcgtagatgccggtcagcacggccacgccaagcagcgtgatgacggcgatcgagacgaacctcttccagctgcgcagccagcaacgcaacgtatctttggcaaataccgcagaaacgcccgctcctcgaccgccgctatcgtcgaggttccgccgtttcacagaatgtttcacaggttgtttcacaaatcgcctcgcttgtttcacggggcgtttcacagagtgtcttgcagtgagcatcgccaatcacctaccattcgatatcggcgatgggccgcggcgttgcgttgacctcctcgctggtcaccttgccggagcggaagcgaatcactttgtgagccatcggtgcaagcgcggaattatgcgtgatgatcattacggtcatgccttgtgtttggcaaatatcctgcagcaactgcagcacttccttgccggtctcgtaatcgagcgcaccggtcggctcatcgcacaacaacagcttcggctttttggcaatcgcgcgggcgatggatacacgctgttgttcgccgccggacagttgcgcggggaagttgtccatcctctcccccagtccgactttgcgcagcgtttcctctggatcgaaatggtcagggcagatttgcgaggcgagctccacgttttcgagcgcggtaaggttaggcaccagattgtagaactggaagacgaagccgatatcgttgcgccgataggtcaccagttcctttttccgcagacccgtaatatcgcgtccgccgaccactacgcggccggttgtggcggtatccatgccgcccagaatgttcaatgccgtggttttgccggcaccggactgccccagaatcacgcttaattcgccttgttcggcggtgaagctggcctcgtcgagcgcgcgaatcacactgctgccagaaggatattccttgaccacatggtcgaattcgatatacgccatcgcacacctccaacgcgctcgtggcagccacctagccccataggccccgccagaacttcctgctatactcaagtaaaacaacactgtgtcggttctgcaaccaacagttggattgtgggttgtcggaacttggggagaaggccatgaccaaagaattgacggaaagccgccgcacccgctacacgagacgtgccatgcaggacgcgcttatcgagttgctgcgcgatcagccgctcggctccatcaccgttaaagcgttgtgcgagcgggccgatgtgaatcgttccacgttttacgcgcattatgcgagcatcgaggaactgctgcacgacattgaagacgaaaccatggcctgggtcaccaccgcactcgaacagctactcgcccagccagatcctgccggcatcgagcatgttattgagcgcatctgccagtacattgccgacaatcgcaatcatctccaagtgctgatgagcccgaaagcggatatcggtttccagcagcagctgctgggattgatttacagccagcgcggtgtaggcgaacagttgcaatcttcggcgggttacccagccgaggcgcagatgcgtatgcgattcgccgtgtccggcagcattgggcttttgcaatattggctcgccaacgatctcgcggcctctcccgaatcggtgtcccacaccatcttcaccatgtgtatgcctgccacgcagtgagcacagtgaattcagtgaactcagtgaactcagtgaagcgtgcggtttcataagcatcgctcgctatagcttcgcctgctcaccggccgcgcccacgcccgcgcttgcaatagcgcacaaatagacgattgaccatttctgagacgatacggcggcatagaataacgaacgttgcgcatcacggcaagccccgcgtgcgccaaacccaagaaatgtgagagaagagcacaatgagtactactgatgcgcctaagaagccgcgcgaaaccgacgacgtgccggtgccggccacgctgcgcaagtcattgaaaaaccgccacatccagctgattgcgctgggcggcgccatcggaaccggcctgttctatggttccagtgaatccatcgcgctggccggaccctcgattctgctcgcctacttggttggcggcctcgcgattttcgcgattgtgcgtgcactgtctgaaatgtccgttgaggatccgaaggcgggcgcgttcagctactatgccacccgctactggtccaagcgcgccggctttatttccggctggaactactggttcaactacatcctcgtctcgatggtggagctatcagtggtgggttcgtttgtgaactactggttcccggcgattccgacatgggtgtcggcggccgtgttcttggtgatcatctgcgccgccaacctgctgggcgtctctaaattcggtgagttcgagttctggttcgccatcatcaagattgtggccgtgatcgccatgattatcggcggcctggccgtcatcatctttgtcctgcccaccgcatccggcgtgcgcgcaagcttcgcgaactggttcaccgtgggtaacggcttcttcccgaacggcctgatggggcagaattccgacggttcctggaccggcctgctgatggcactggttgtggtgatgttcagcttcggcggcaccgagctcatcggcatcaccgccggcgaaaccgaggatccgaagaccacgattccgcgcgccaccaatgatattatttggcgaatcctcgtgttctacatcggcgctctgggtgtgatcatggccgtagtgccgtggaacaccatcgatggcaagtccagcccgttcgtgcagatcttcgattccgtgggcattcacgcggctgccggtattttgaacttcgtgtgcctgaccgctgtgatgagcgtctacaactccggcctgtacgccaactcccgcatgttgtactcgctggccaagcagggcaatgcgcccgcttacttgggcaagctcaactcgcgcggcgtgccagtggccggcgtgctgacgtccgccgcgatcaccgccatcgccgtggtcgtggtgttcgtgtggcctgagttcgcgttcaactacctgatgtcgattgccaccattgccggcatcatcaactggacgatgatcatgctcaccgaaatgaagttccgtaaggtggtcgccgcgggcggcgctcccgaggattccgagctggccggtctgagcggccaggaggcactggacgcgattcacttcaaactgccgtttgccaaggtgaccccgtgggtggtgctggcgttcctggcgctggtcgtggtgctgatgtgcttctccaccagctaccgcatcgccgtcatcgccggcgtgatctggctggccatcctcttcgccgcctaccagctcactcaggcgaagaagtaaggctccatttgcgaatagctctcactgatgagcactcagtgagagctattcgcaaatgggatttattcatgaaacagctcatcgatgccgacgagctgaacgtcggattgagacgccgcagcatcgtcgaccagtgattgatcgaaaccgccgagcgaaaacagcaggtatgttcgctggccgataccggttcgcgcagcacggtctcgcagtagattcagcacggaacggtccaccggcgcattgcggaatttgcactcgcccacaatggcagcatcagacgcattgtcaacggccatcacgtctatctcatcctgacgatcccaccaacggccaaccgcacgcgcacggaagggcaaccgtccagcagcactctcacgccacatccattcacggcacagaccctcgaacggtttgccggcaaaatcatgtaataccggcttgatatgacgctcgtatacgccttccacatcgccccgctccaattccgaacgatacggaaagacaaacgaataccagaatcggaagaaattgtcgctcagctgatacagcccacgcgaacctttcgcccgctccttaggctttgccgtgactgggaactcacgttccacaatccccagttccataagattggcgagatacgacgatactgttgcgtttgccatcatcgtgtgtgtcgcgatctcattcagcgaagttgcgccgagcgcgatcgcccgtatcacgctgttatatttcgcagtttcccgcagttcttcgtgcaacaaaaattcaacctcgctgtatagcggagcaatgcgtctcagaatatgccgcttgacatttgcgtctatggtctcatctgggtcaaattcctctaggtaacgcgggataccgcccagtattgcgtaggccagcgccttatcctcgctactatagttggggaagaattgcgctgcatcccaatatggcatcggcagcatcttcaggatgccggtcgcacgaccatatagcggcgatttttctcccaacagctccttttcgatgaagctcatggcactgccgcaaatcacaatcatcagatttgcatgacgcaacgtgtggtcccaaagattctgtagcactgacggcaatgacggatcagatttgaccagataaggaaactcatcgaatatcacaagcctgcggccgccatcgctcggctctggcagccgggttaactcggttaacgccctttcccaagaaggatattgactcagataatccttgcccggggcacccgcctcgaacatgagacgggagaacgatgccagctgttcatctttagtggcattctgcgccgcgaagaataaggtttccttgtcttttgcgagttgaataagcgtctctgtttttcccacgcgcctgcggccgtagacgaacacaagctgtgccctacgctcagtgaaacattcctgcagttgcttgaggtcatcgtctcgtccgatgaatgccatgctgcccgcctcctttatgccatacgccggcgtatttctatcgcatcacgatttattgtatcacgattagtataatcgtgattatacaagctgtgacgaggtgcgggtacgggccaatttgcaaaaaactctcactgagggggaggtggtgacggctttgaggtcgagcttgccgcaggtcaggtagaccatggtggcgaagtagtccatgtcacggaagccgcgggcccgtctcttcacgttccggacgacgctgtcggcaccctcgaggacggcgttggcgtacgggtgctcgaagtacgcgacgacctcggcgaagcggcggcggatcagacgggcgggttccttcacgggttcgagcctcgagtgtatcatccacgagcacaggcggtatagcctgacccatgccccggcgggcggctgtccatgcagatgccctgcaggacctcgcgcatccggcacgcgcgggcggtcttcagccgctgccgcgtgaggccgcgcttggtctccagccgcaggtcggagagggccgcctcgttggcgtgcctggccacgtggaacttgtcgatgatccgcctgacatggggcaggtgctcgcggatgtccttctggaacccgcggctcatgccgcaggtgacgagccgcacgcgcccaggcaccccgtcgtggtccatgaagtccccggcgaaccgttcgaccgtggtcgagtccctgaccggggtcacgtcggtcacgtcgtgctcgaccaggccggcgatcacggtgatgcagttgcggcccttgcggctggtcccgtcgacgccgatggcctccacgcccgtgtggtcctcgagtcccctcgcctcgtccacgtaatgcgagatgaaccgccacaggcgggtgtcggtctcgtccaactgcccggcgagcgtgctcaccggcaggtgccgggccatctccacggcccacgcctcgaacaggagcgtgaacccgctgccgggcctggcccacggggcgggcaccgtcctcaccccgtgctcggggcacgtgacgcggggcatggcggcgtggatgaacgccttgtactggaagaagttcaggtgtcgccacacgcgctccctcgtgtcatgcaccggacaggcgccccccggcagcccgtctcggggcaatggaagcgcacgccgggctcgaagccgatcatgatgtgcagtccccgcccgccgtcgcccgcgtccctgaaatccacggacccgaccttccaaggcccccgcaactgcaatgcggcggtgaacaggcaagaggtatccatgcctccaacccacccgccggcatcaccccacaccacaaccacccaccacaaacagcgaaaggcccaaattgttatcgtgcgatgatcgaccgcccctttatcggccgggttccgcacctttttcgcgctgacgaagctgctccgtttgccagcgcgaactgtgttctcatgcggccatgcaccgctctgcccccctcgaacgacaccgtttttgagggactggggcgctgcagggccgcatctttagttgtaagtacttacaattttagtgtgagcgttcacttttggaggggtggattccttttcgggaaggcaatcagtagaacgcgaatgttgttcacaggtcgtaagtctcttccccacatggcttcgccgggagcccgtcccgcaatcaaggacgggctttgcccgcagcttgtcggttcgcctatcggctcaccctcgcctacgaacagcccactgggctgttcgctatacggctcggcccgtcagagggggggggagcttgatggccactcaggcgcgacgcttgcgctggagagtcagagcgataccggcgacagcaagcgccacggctacgccgctaagactaagcacagccgcaccggtcttggacaaaccaagattgttgcccgtcttatcgcccgcatcgacgctcgaaccgtcgctcggcttagtcgaatcgcccgagccatcgcctgaatcggaaccatcaatcttcactaacgcagcctgcgccttaaccaacgcgacggtcgtgtcatcgacgtccttctgcgtagcagtatcgtcggcatagaccttctcagcggaggccagcatcgtggcaaacgccttccacgaggcggcggtgtagtcggacccgtgcagctgcttggcggacgcaagcgccttggacaaaccagacttatcgaccgcaaccgcatcgtcaaccacatgcaccgtaacggaaacgatcttgttcgccagctcctcggaagagctcatgtcgaacaccggcataccgtcggcagcccagtgcacgcggcgtacgaacatgtcgcggccggtggcattcacggagccgaggttcttcgtagcataagcatggaacacgtagatctggttgccgtcctcgtcctcgctccacatgccgtgaccggtgccgagctgcatctcgccattgaatggaccggacttctgaatcgggtagttgagcgccgtccagctggccgggtcggtcaggtcggagccggcggcatcagccacggccaaaccggtggtgtaggtcttgcctacgccggaaccggaaaacatgaggtacagcttgccatcacgcatggtcacgttcggaccttcggctatggcggcgttccacgcatactccggggtaacgatgcgcaccggggagctggtcacatgggccgggtccttcggatccatcgtggcgatgtaggtggcgccgagctgctgccaggcgtagtaggacctgccgtcggcatcctggaaataggtcatgtcgagcgacatgcccactccgccggacgcggtggctgcgagctgcttgttaccgttgagcagcgaggcgtcattgcggtagatcggtgtcggcacagtccagttatcggggtcggtcgggtcgaggtcatgaccgtcgacatcctgcttgagctgcatgtacaccgacttgccgttggaccatgtgttgccgtatccggccatgaacagaatcgtgagcctaccatcaatctcatgaatttctggagcccagaagctgtgcatgatggcattaccctcggagtccttgtcgccagccttgagcagcgacacctccttgttgttgtagccgttcgactgaatcagggcattcgggttgcccggctcgtcggcgagaccggaaatcgtgtcggccatgcggaacggcatgtggggcgaaccatgctgccaagtgacatcaccttggatgtcgttggaagcgatcatcaggaacttggtttcggtgacttccttgccgtcgacctcatgcgtccactgccacttatacaccgatggatcggcgcggtcctcggcgaacggaatctggtattcggtctgcttgacggtgccggtgacagtgtaatcacccaccttcgtcagatctataccctcagtgttccatgaggaaatcggcagggagccggtagaaccgtcggagtaagtgaggtccacgttcttcggcagctgcgaggtcatctcatcaatcgaggaacctttctcgacggtgatgtcagtgagattgctcgtgccggtgttctcagagcggccgtaacgggtgttgagcgccttgacggtcgcctcgtccaccgcgatggtggcaccggagcggaagttcgcgatgccctgtacaccgtcggcggcgagtacgccggacttggcgacggaaccgtacagtacgctgccgtgcttggatgtggagcccttgagcgaatcgaacgtggtgtacttggccacgccgttgtcatcggcccagccgacaacatactgcttgctggcggtgtcgtacacggcgtacggagcgttgacgccgttggtctcgccaaggtcgacgatggaaccggagttctcctgttcgctataggtgagcaggtcttcggaggtggcgatgagcacgctggacttcgcggtggagtcaccggtggcggtgccgcggttggtacgcacggaaatcacgccataggtgccgtcggccatgcggaacaggctcggatccttgagactgcgatagtcattgccgtcgaggttctcgttgagcttctgcgccttcggcgagcgtgcgaagaaaatgccgtaattctcgttgtacggggtgtacgagccgtcggcgttctgcagcgcgaggtgcatgctgtaggcgacgtcgccgttgttggcctcattctcgccggtggcgttgcgatcataggcggcgatggtcgcggacttcgcggcgggcagcacctttacggtgaaggccttggtaatgggctcgatgccggcgagaccgttcttggagaactcgacggtgatggtaccggtcgtggcctcgtcgccatcgatggtgatcttgccatcctcgacggctacgtccttagtggacgtaaccgtggcggtagtgccattcacagccgccgggagggcgtctccggaacgcacgacggacgggatcacgtagccggccgcgacttccttgagctgttcagcggcagttttcgtggtcgggttgaccgtgaccgtgaattccttcgtagcggtctggccacggaccgtgacggcggcggtcagcgtgacagtcttggctgcctcgcccttggcgggctggttgaccgtgccgtcagtcgcgatgacgctgctatcggaggacgcccacgtcacgccgttcgcagtgggcagcgaaatgaacggaccgtcgaccgtcgtggggatgatgatgccgttcagcacggaaccggtgagttcaccggcatgaattgaggcatcggcagtgctgatcgcggcgacctgatcggcggtgagcgcggcatcgtatacgcggaagttcgagaccgcgcccttgaacaggttgtcgggccacggcgaacggccgatggtgttgagcgactggtccttgacgctggacagtttggccggcacggtgccggatgccacctgcgtgccgtcgatgtacagtttcgcggcggtgccatcaatggtggcggtcaccgacaaccattggtcggccttggccacgcaggagctggactgcacgagcgtctccgtaccgcccgatttcaggccgacgagcgggttacgcgaactgccgcagttgagcgtggcgaagaaatactccgtatcggagctgtcgttaccgatgttccacaggaaatggaaagcattgagcatgctggaatccgctttgacctccaactgcaccgtggcggcgtccttgccggacagcagattcgagggcagcttgacccagtcgccggtgccggtcttggcaccgccggaaagggtgagggcatcatcggcccaaagcgagtcggcggagttctgtacttcggccgcgccaagcgtagcgttcggcgcactgttggccacggtcttgccgtcacttggcttcgtggtgaagtcgtaggcggcgatgagattattggtcggaacggtatcggccgcgaccgccgtggtcgcgccgattcccatgccggcgagcgccatcggcactgccagcatcgcgccgagcaggcgtttgcctatcgatggtttggttgtcattggtttcctctttgcgcgcggtgatactgcttgtcgcgcagcagatctagatgttgagtggtgaagttcggtaatggctattggagctatggggctatagagcctatgcgtccgacagcgtcgtcggacgaacgtgcgatacgcccctctgatggggccgcgccatgaagcaaacaatccagtaggctgcttgcttcacagctcgactcatccagaaggggcttggtctacgctgcaaacagttcaggcgcggcgcttgcggaaggcgtaggcggcgccggcggcggcgagcagtatgaccgcggtgatacccacaccgaacaccgaggcgccggtgttggacagagcgctgcccggcttggcggcgggcttttgcgtgccgtcatccttgccatcggtcttgccggaatcgccggacttcttgaccagcttgtcgacggcggactggagccgagacagcgccttgtccacttcctgctggtcggtggagttctgcaacacctgctgcgcgtcggcgagcgcgacggcgaaagcatcccaaccagactggtaatcagccttgttatagcccttcaccttatcgacaagcgcctgcaacttggacttgtccagcgtggagccgggctcggcggccttgatggtgaacgttgccgagacagtaccggagtacttgccagcgccggttacggtcactgtggcagtgccaggttcgacgttgttcgtataggccaccgtgtagtcggcgccttccttgagcgtcgcgccatcgagtacaacggtcacggctggttccttggcagcgccgtctgcggtgaactcgttgggttcgacggtgacggtcgccttggagaggtcgatgccgttcacaatgacggtagcctcaaccggcatacgggaatcgtcttgggtgatgcccttgacggtgaaggtgccggtcttggcgtagaaagatgcgtcaatggcatcccactcaactgcaacgtcagaaacggaaccgtccgcatgagtcagatgcgcggtctccggcagcgtcggagccacaccaaccgttgtctcggcagacagcgcgtcaacggacttcacagccacagccggggcgtatgcctccagcaccttctggtactgggcgcgggtcacgggcagcacggttccgtggcgcggcttgccgccatcggaattggtcgggaagttcgcctcaggcatcttattgccgataacggtccactgaccgctggcgatatcctcagtcgccatcggcacatagtggtttggaccttgatgatagctcggctggtcggcgaacaggtagtactggtagccgttcacatcgccatcgttggccttgaatagcgatggaccttcgccggaagtgaaggttttaccgtaaccgttagcctggcctttaccgatgttcgtggcaacttcgctccatgcactacccttaagcgcatcggcgtagttcttcacgccggcaccaccaattgcggcagtcaaatctgtggacttctcctgacgcaaagacatcgtgttttcatctttgtagatgcggtagtaggtatcccctaccttttgcacggtcacatcgatggatccactgcctacaccgcctcggcgatcaacgtcaatccacactgtcgggtcggagaagttgacgaagtcatcggtggtgacgtacaccatgcggttgtaggtcagctgcttgcggctgttctcgtcggtgttgtcgtacaggttcgaggcccaatagaccacgtacttgccgatttcctcgtcgtagtaggcctcaggcgcccaagtgttgcctgcgtaatcagagctcactttgacgtggctttgcttggaccagttgaccagatcgtcggacttccagatctcaatgtacttggaaccgttagcctgtgcaccagcaaagccattcagcccgttgaggggggcacgaccgtcaatcttcagatcggtggcgagcatgtagaacttgtcgccgtccttggacttcatgatgaacggatcgcgcaaacccttctcgccaaactcggaagtgaatatcggcgtgccgttgttcagcgtgttccagtcgagcgcatcgttgcccttggaggccgcgaggctgattttctcgccgcccacgccctcgccggtgaagaacgcccacacgtaggcctcgtccttctcttcggcggcaggcatcggctgaatggtgacggtgaaggtcttagtttcagtggcggtatcgtacttggcagtggctttgagcgtcacagtggcggcatcgctaccggcggcagggcgcttaacagtgaccgttcgagatttgtcgctcacgccttcgcctagtgtggcgatatccttgccaccggtcactccccacgagatggtcgaaccgttgtcgcccttggtgggcacggagaagttgctacggatgtcgtcggagtcctcgatggtgatggcgtcaaggtcggccttggcttgctcggcatcggagagctgcttcggcacgaggaccgtgtaggcggcggttttggcgttgttgccgaacgtggcggtgagggtcacctcggcatcagctgcggttgcggccggacgagtgaccgtggccttgccggtggcgttgtcaacggcgatggctgcgttgtccgacttccacgcgacgctcacaccagcggcgctggtcggcagggtgaagtcctcggtagcggatgcgggcacagcggccttgacagcggcctcggccttgtcgagcacctgaacgtcatacagcttggtcacgtctgcggcgctgatggcagtgtcgtatacggcgtaatcgtccacgtcgagcttggagttcgggtcagcgtaggaggacttgccaatgtaggcgacgagatcgccgtaattggtcaggccaccggccggaatggcgtaggtggcgtctccaacctgcttgccgttgaggtagaagctcatagtgctgttggtgccgttgatgacggtggtgtacagagccaaatcgctggtggccttggtgccggtgatggcggcgttcgtcgatccagggccgacttcggtgccccacgggctgttattcgggtcggccgcagtggcattggtcattacggatttcgcgtagccactcgggttggccgggttgagcagccagtaaccgttggccggataattgccggtcttggccgcgccgatgtacgcggcggcggtattgccgttgccgtaattgttcttgagccagatggagacggtgacgtccttcttaccggcgatggccgtggtcggcacgctaatggtttgcgagccggtcaggttgatctggccattggccaccgtggcgtcgccggatagggtggcatcgctgttggccgcgctgccctcgttggcgatggtcttggacgtcagtgcgttatcgaatgaatagtggatgatcggactggcatcgattggcgatgcgctctcggcactggccgtcatcggcagcaccagaccagcgagcagtgttgccacgccgaccgtgagtccggttgcctttcgtatcagctttcccatgtttctcctcattgatagggttgattgtggttgcgccttcagttatggagcgaagttttgtggccgccctctgatgagctgagccgtgaagaaaacgccagagtcgtttttaggcgaaggcgaacgacagtgagcaaatatgaagccagctgaaagctggtccttaattgcgttcgaggtggccgccgttaggcagtcgggggagagacctgcggcggcagtcgcgggatacagaatcggccgaaggccatgccgttctttcggtggcttcgccgcggtctctcccccagtcagccttcggctgacagccccccctcgtcagaggggggcttggttgccgtagcagctcaggcgcgacgcttgcgccagagggttagggagatgccggcgatggcgagtgctaccacggcaccacccaggccgagcacggccgtaccggtattgctcagcgcgctgccgggcttgttgacgttggtcttgtcgccggtggtcggggtagtcggcttattgccgtcgcccttatctccgtcaccttcgcccggattggtcggagccttctgcagggcttcgattgcggtcttaaggtcggctgcggcggtatcgacctcgccctgattctcagcggcgagcgcggccttggcagtcttcagcgcggcggcaagcttggcccaggaatcggccgtgtagtcggattccttgagcgcttcggcggcggcgatctgcttgttgagctcagccaaatcgaccttgccctgttcaatgccgtcaaccgtagtatcggatggattgaccaaaccatcggtgtagccgtcgtaagcaaccgcaacagtgccagagacgctggccgggagggtcacagtggccttgccttcggcgtcgagcttcacggtcttggaccagtcgccagcagagaacttcaccgaaccggcgagcgtgcccttatcggcggcggtcaccgtggcggtgagctcgcgggtgccggcgttgtacacggccttggtggtggagtcaacagcctcgatgtgcgtcgggttggcagcggtccaggacttcgtcaccttgagcacagactcaggcacgttcacgaacgcaccgtgacgcaccttgtccggcagaccgccgttagcaccctgagtgatgtagccctgagcgcccggctcggctttgaccggcttcttttcgttgttgaagtccgggtaacgcttggtcatcgggttgtcccacgtggtcttggaaagctcggcacccgtggtcataaatgcacggtaggcgaagttgtcggacagcagaatgtagccgtcgtcgtccttcgtgttgagttcgtcatccttgttgagcttgatggtctctggtccttcgaacggcagcaacgcctgctcgagcagctgccaaccggtgttcgggtcctgacccggagatgcctcggtggtcggtgcagtcagcaccttggaacgctcaaggaagatgctcttaccagtggtgatgtaatcgccagcggcaccgccctgctcattcttggtgaatcggtagtagtagccaccgatcttacgcacggtggaatcaatgcgcgagtagccggtgtcctgccacatctgcggctcggtgaagttcacgaagtcgcgggtgatggcgtaacgcacctgagcataggagctattgccggttttgtcgttcttgaccggagtggtacgggtgtcatcagtgaacatgcgggaagagaagaacaccacgtaagcgttcaggtcatcatcccagtaagcttccggcgcccaggtcataccggcgttcggcgtgttgatggtgatgccgccgttgccgtcgccgttggtacgggtccagttcatcatatcggtggactcgtagacctcaactttccgagaaccgttaacctggttctggctccagcccattgacgagaccttgagatcagtggcaatcaggtagtacttgtcgccttcgtgggaacgcagcacgaacatgtcacgcaagccacccgtgtctgcatcattggtaagtaccgcctggccattgttgcgagtcttaaacgtgaagaaatcgttcttctcagtggaagccacccaggccttttctccaccgttgctgtcgctctcaaaagtgacggccgcatagccggtgtcaggcgcgatgcgggtcttctccttgacagtgacctcgatggtcttggtgaccttctcaccgccgttgtaggaagcggtggcggtcagcgtaaccggcttggaatcaccgtcgccgtagtccggacgattgatgatgccagcaccacgatacgggtcatcggcaccagtggtcttgttttcgtacttctcgttagtggacgtaatgagcttctcgtccgaggacttccacgtaatcgccgagccgttcttggtgcccttggcgactagcggcagattctcggccgccggaactttcagcgcagcaatcgcggcatcgaggtcggctgcggcggcgttctgggcgttcatcggctcaacggtgacgggcagttcggccttcacaccacccagctcagtggtggcggtgatggtggcagtaccagccttgacgccggttacagtaccgtctgcggcgaccttggccacggactcatcggaggaggaccaggtgacgttcttgctcacggcgtcgtccggagtgacggtggcggtgagcttggtggagtccttctcaatcagggtgagcttgttgttcaccacaccggtaccggaaatcgcaacggcggtcggcatggtcaggtcagcgcccctgtagacctcgatatcatccattgcaccattccagtactcatcgacggagtagaacgacttgccgatgtaggcggtggtcgcaccgagatcgctcatcttgatgccggtgttggccttgaaaatgatcagggcattgttgcggaacacggcaaggttggtgccgtccacgacaatcttgtaatcggcccagctgttgtcgttgccggaaacggtgaccttggatccctgttcgttaccccagttgttgttggagataacgcccttgatggcggtcttgctgttgtagaacatcaggtacttgttggcgttggcctgatcggtggtgttggcgtcgttcgagccgtccttgccgacgatgaacgagaagaacttgccgctgtcgtcgtgacgagtcttggacgcgaactccagagtgaaggagtcgcccgcatccttgaacagctggtcatcgatctgggcgtactggccatcgccgcgcagtgagagcgcctcgttgttgctgcggtcaccgtactgttcgatcttggcgccgtccttcagcgtcaggttgtacttgccggtcgaatcggcaatcgcgctgttcgtggtgccgtttttgcccgtgaagtcccagctggcgagcagcgtcggttcagcagccttagtagtctgcactgtcgcggtatcggttgtctgtggttgggaatcttccgattccatggcatacgtcgtcggaactactgccaccatcgttgatattgcaatcaacgatgctgccatcttcttccaatgcttcaccgcatctctccttgtcctttgcctcgacccacttgtcgggtgtctcgttcgcctctacgtgaacgcaaacattatttgcgatgataccattacggcactgagactcagtgtgccagattccttatgtatataagcacttacagggggcaaccgcccagcacgaacactccccgtatgccaaagccccccttccaagccaatcactaatacccctcaatcggcaccccgctccgccagccgccccaaactgttatcaatttgttatctttaccgcgcttgcgtggacagagaacgctcagacctcgaagatcgccgcatattcgcgagagaacccgcctagtcaatgagatatggattgaaaacacgctcggtgacggggatatggagcatcagcacggtgccgtaaccaagaatcaccagcaggaacagtccaccgggcatgtagaaccagctggccaccagcagcgccacgaacacggcatccacgatgaccagggccacggtcatcgcgatgtgggagatgccgaagatgaaggcgttcttcaaggtgccggccacggtgttctcgaagcgtgcctgaagcgcgaacacccattcgaagccgataagccagaggatggtcagcgcgaatttgatgatgagcagcggcgtgatctgcaggacgatccatgaccagaccagtgcaatcagcaccaccaagaacggcagccacagcagtgtggctttgatgaagttggctttgaatgacttgaagtagttggcggttacgcctttgccctcgccctcgatggagcggcggcaagcatcatggccggcggtcagggccgcaccgatggtgatgagcggaatcgaagtgaccagcatcagaatgttgatccatacgccgtcaacaagattgctccacgcgcgcatgaatttcgagtccggtgccagccagttcatcaactactccttgtgtcgcctgtggctcccctctctgaggggagctgtcatcgcagatgactgaggggagacttgatggagctcaggatactcccctcagtcggcttccgccgacggctcccctcaaagaggggagccggattggtggagctcagcccttgacggctccgccttcggccctgcaattacggactcgcctacgacgaggctcatcattagcttcgccgctgtcgcggctcagcctggagcctgctggaagcccactgggcttccagccatgggctgacgacgcgagtcgtcagcccttgacggctcccgccatgacaccagagactatatacttctggcataccaagtagaagacgatgatggggatgattgccagcaccaggcaggccatcatggcgcccatatccacggaaccgtagccgcccttgaggtattgcacggcgaccgagatggtcttgtacttgccgaggtcgagcgtcaggtacggcagcaggtaatcgttccagatccacatggcttcgaggatggccaccgagacgatcgacggcttcatgatcggcaccacgatctggaagaagatgcgcggcactgacgcgccgtcgatcatggcggactcctcaagctcctgcgggatgcccttgatcacgccggtgaagatgaacacggccagaccggccccgaaaccgaggtacacgatgcacaggccccacggggtattgagcttcagcatgtcggcgatcttggagagggtgaacatcaccatctggaacggcacgatcatgttgaacaggaacagggtgtagagcagcttcgcagcccagttgttcacgcgcacgatccaccatgcgcacatcgaggtgcacaccagaatcagcaccaccgagccgacggtgataagcagcgtccagccgaaggaggcgaaaaactgcgtggtctcgatgccgcgcacatagttctcaagtcccacgaacgccttgccggcaggcagggagaaggcgttcttggagatgtacgccttctgcttgaaggagttgatcagcaccaggacgatcgggaaaatccagaacagggagacgacggcaaacagcacggtccataatgcgccatgcttcacaggcttgttctcgttcatcaggctgccacctccttgctcgtggtgagcttgttctgaatcagggcgatgaccgcgaccaggatgaagaacagcacggccttcgcctggccgacgccttcccagcccatacggccgtagaaggtgcgggtgatgttcagcgccagaccttcagacatgttgctcggcgcaccgttggtcaatgcgaggttctggtcgtagagcttgaaaccgttggtcacggtcaggaaggagcacacggtgatggacggcatcatcagcgggatgatgatgcggaacatggtctgccgtccgttggcgccgtccacggccgcggcctccagcacatcggtgggcagggcttgcaggccggcgatgtagatgatcatcatgtagccgatctgctgccagcacaccaggatgaccaagccccagaacccgtaggacgccttataggtcagggcgcggccccagtgggccagtacgccgttcaggagcagcagccagatgtagcccaggatgatgccgccgataaggttcggcatgaagaataccgagcggaacagcgtggagcccttgatcgccttggtcagcatgtaggcgatggcgaaggcgatcacgttgatcacgatggtggtcacgatggtaaacgcggtggagaagccgagcgcgtgcaggaattccttgtctttcaacgctttgccatagttcttaagccccacccattcaccgtcggtaacggtggtgaattcgcaaaagcttaagtagacgcccatgatgaagggcaccaggaacccgatgatgaatgcggcgaatgtggggagcgcgaacagcgcccaccatctgcgtatcgccttgccagccatgctgatcatgacttttcctcctccttgagtccgctgcgttgcgacactgcatcgtgcgccggctgcggagttcaactcaatgcgagcctgccgatcgagaaccgcatgcacggcctgttctcgttcaagcctatgttcatagtaaacgtcgaatcattatatgtcaaacgttgtcattttcagcgtttcaatctcgagcatactccagctccagcaatcttctttcaactaagataatggctatataaagccaatctgacgccgtcatagacactttgcaaacgtttgtaatacaatcgttgtcatcgccgcaaatcaatcaatcagcatgtacactgtagtcagttgtgcatgtgtattgcgattttccattcaacgcaagggggctgcaatggctacgagcattcaggatgtcgcccgcgaggccggcgtctccatctccaccgtctcacgttccttcaccaggccggatctggtgtcggccaagacccgcgagcgcgtgctcgccatcgccgacaaactcaatttctcactctcccgctcggctgcggccctgaaatccggccgcgccctgcgcatcgcagtactgatgagcggccatatccgcctgtggttcaccgcctcggtcatcgaggggctcaacgaggtgctgcacacgcagggctacgatatttcggtattccagatttccagcatcgaggagcgcaaggaattcttcgagatgttgccggtacgccgtaacgccgatgccgtgattgtggcgtctttcgatatcgacaacaacgaaatcgcgcaactggcttcggtcggcgtgccgatcgtcggcatcaattcagtcgagcccgaagcccgcggctttaccgccgccgtcaatatcgacgacgtgcagggctccacgctggccgcccgccatcttatcaatctcggacatcgccgcatcacctatatcagcaccaatcgcgaggtgtcgctgagcttctccgtgcaaagccgattcgactcattcaccgcctgctgccgcagggaaggcatcgagccgcaggtcatcgtctgcaaggtcgatgacgatggacgttatgaaatcagcgacgtggtcgaccaactcatgagccaagacgagatgcccaccgccatcgcatgccaggaggatggcatcgctttgccgcttatgttccagctggagcgcaatggattctccgtgcccggcgacgtctcgctggtcggctacgacgatagtttctacaccggcgatatcggcctgaccaccatccgccaggatccggtggaaatggcccgcgtggcagcccgcatgacgctcgatctcattgacgaaaagccgattgagcaaccctacatcgtgttcccggcccagctgaaggtccgctcctccacctcccgcgttaagtaggctcacacaacaaagcccaccatagaaaaagcgtgaggcaaccgcacaataacgctcaatcgcacattgtggagaatggcgaaaaatcgccgattcatggccccacagcgtgcgattgagcgggtgcgtgcctcacacttttctgcggcggacgattttgtgcgagactcagcaatacaaagcggcgcccctggagaaggaaaggcaggggcgccgcggattgttgcttatcggctatgggactctatgagactcagtgcgaggcctcgtattcggaagcccaaccgtccacgaaggcggtcttgacggcatcccacttgccggtgccctgcgcgtactcgagcagcgcctggccgaccttgttcttccattcctcggacggcatcatggtgaagttccaagaaacctgggtcttgccggactcctggtcttccacggcggcctcggtcagcgggttgtcgcttttgacgtcatcgaaggtcttgaacggggtggtgaagcccatgtcctgagagagggccttcttgccggtatcagaggtgatcacccacttgaggaagtcctcggtggccttcttgtcggcgtcggaggccttgtcattgatgcaccagtagttctcggaaccggtggtcagaccctgcttctcctcgcccttgacgccgatgtagatcggcatcatgcctacctgatcggcggtcatgccggccttctgcaggtcggtccaggcccaggtgccgttctggtagaaggcggcctcgccgagcgcgaactcggagttcgcatcatctccggtcttggcgctcagctgggtgggttcggtggtggagtcggtgatgtacaggtcgaagatcttcttgtagttcggcaggtaggtgcccttgatcttggccggctgctcggtgacgttgtcgtccttgaactcgtagtaaagcggcagattggccaggtgggtcttgaagcgccagtcggagctggagtcgaagccggcggaggtgaacgcgcccttgatgccgagctcgtccttgcgggcctgcatgtcgtcggccacggccttcagggtgtcgaagttgtcgatttcgtccatggacgtggccttggcgccatccagcgcgaagtacttgttgaggatgtccttgttgtagatcaggccgtaggtttccatcacgtacggcacgccgaccaccttgtcgccatccttcagggccacatcttggttggtgagctccttgtacacatccgtattggacatgtcggcggtgtacttcttccagttctggtagccgaccgggccgttgacctggaacaaggtcggggcttcggttttggcgatttcggacttcagggtctgctcgtaggtaccggaggccgcggtctgcaccttgacctcaacgcccttttccttggtgtattccttggccagagcggtccactgatcagccgcttccggcttgaaattcaggtagtagaccttgcccttggcgtcatcgccggaggtcgagcttccgcaggccgccaaagcgccgagggacatcgcagcgacagccgccatcgcgactgctgacttgactgtacgattcatcatcgaacctttctctttcatcgtcgacccggccgtccccggtcgggacaggtacgctagcacgcacctttacgactatcgacatgcactattgtgcaacggtttgcttctttttgcaaacgatagcaatatcggcgcgtcataaatcatcattttcaggccattgtcaacaaatatcccattaattcagtcatttttgcctcattatcgcaatgcaagcgttcgcaactatgagagcgctaacatatctttcatggcgatcgattgccacttatacccatcaaaaaacaacacgccgacgctatcgtttgcaaatcatttatcgacataccgcaattcccgccacaaacaataaaggcccgcccgcagtagcgggcaggccagcgcaatcgcagcgcaaccggggctaggcgttccaccgttcgatgacgttatctcccttatagacgctgagcaccgagtagtgcgccgtatccaaacgcagcaaccgtgcgaaatgcgggtccacgcccagccattgcgaggtgaggatgcgcaggatgtgcgcatgagccaccaacagcacattatggccgtctttcagcagcggcgtaatctcgtcgatggcgctcttggcgcgtgccgccgcttcttccagcgtctcgccaggcccggcatggaccggcacctgttcgcccgaaggcaaggtctcgacccagtcgccctccagcgtgggcgtcagcgagcgcggcccgtcacgccacacatcccattcaaaaccgctggcctcactcacctgctggcgcgtacgcccctcggctcggccgtaatcccattcagcgatgccgtccaacacaccgtggtccgcaaaaccagccaattcagcggtttggcacgcccgcttcagcggactggaaaacacacagctctggctgaatccttcggggaaggcctcgcgcaggcgccttccggcatccgctgcctgctgctcgccgaccgcggtcaacgggatgtccgtgcgcccggtatgctgcccggattcgctccacacggtctggccgtggcgcagcaacaccaaaaatccattgccgccacgagagttctcgacggcaacggtgccgttcacgttctgttcgctcatgcctccactctagtctgcgctcgttcatgactccaccattaacgcccatcttttgcgctgagatgattgagatgctattagactgagagtcatgagcgacgaaacgaacaccgacttcccctccagcgccgaccgcgcggtcgacagcctgcaccgcatcgacgagaaggtcaacaggctgcgcgaggaccggctcaacgaccctgattctctgggcgacaagctcatcaagtcggcagtcccagcgctggcaggcttggttgccggcaaagcattccagatgatatgggacaagggcacaagcaaacgcaatctgcgcaagggactggcggcagacgcgccgcaaagtctggcaatgagtctggcattcgccgccgtttcggccgcactcggcgcagtggtttcgcagctgtcggatcggggctccaaggcgttcgtcgaccaccgccatcgcaagcccagccgctaatcccccggttggatgatggtttctgttggctgactgatgactcatcgctggaatttcgtcaaggaaccatcagtcaatcgacaggaaccatcagtccagcacagttccgccacacaatatcggcatttcactgtgaggtaatccaccgtggcgtccggcgtctgccgtgcgacaataaagccatggttacaacgcaacaatcgaggctcttctgggccgccgctccatccgtaagttcaaggacgaggccatcgacgacgatacccgcgccacgctcgaaaccgtcgcccaacatgccgcgtccagccagttccttaacgactggtccgccatccgtatcaccgacccggccaccaaagccaagctcgccgaattcggccatcagccgtatatcgccaccgcgccgttgctgtacgtgttcgtcatcgacgagcaccgcaacgcacgcatcgccgaacgcaagggtatcgatcccgcttccgacgaattccatctcaagtacagctatcgcttcacccaagctcagaacgacgccgtgctggccctgcacgccatggagaccgccgcctattcgctgggactgggctgcgtgattctcggctctctgctcaacaacatccccggccttatcgacgtgctgaatctgccggaatacacgtatccggtgctgggtctggccatcggcaagcccgatcagaacccgaccgtcaagccgcgcatgccgcgcacgatgcagttcttcgagaacacctacccggctgacgccgatggcgtactcgaccagctgcccgccttcgacgaggaagttcaccggtactacgatctgcgccaagccgaccgtccggtggacgctttcagcgatcaggtcgccacgatcagtcggcaggatgtcagccatcagacactgctcgacaaggccgccgctcagggcttccgtctggatcagtgagaccagaaccaacgagatagcctcggataggctcgtcactgagtcgtctcggtctcagcactgcgacgactcagttccaacacctcaacatttcatcaccggataccggcaaaattgcacaaccatcccgccggtgtcgcaccatcaacaaacgttcacatatcagtcccattatgcggacaaccaacggccagttttgcaagaaaacccgccaaaccagcagtatccgcaccagtggtgggaatagactgcatgtggccgcaatgactacgaaccggaaaagagggactggatgcggacggtttggcaagtctttctacgcgattgcagacgtatcttacgcaatcccgttgccgttgtggtgacgctcggcgtagcaatgctgccctcgctgtacgcatggttcaacattctcgccaactgggatccctattcagccaccggcaatctgcaagtggccgtagccaatgaagaccaaggcatcaccaacgatctggtcggccatctcgatgcgggccggcaggtcgtcaagaaactcaagcagaacgacgaactcggctggcgcttcgtagacaatgaggaacaggccgtccacggcgtggagaccggcggatactatgcagccatcgtgctgcccaaggatttcagcgccagcttggtcgaatcggtgaccggaacctccaaacagccgaaaatcaaatattacgtcaacgagaagaagaacgcgatcgcgccgaaaatcaccgacaccggcgccaccaccatcgatgagcagatcaactccgccttcgtcaccacggtagccaccaccgttgcctcggccatttccgaaaccggagacgatctcggccaagccactggcaaagtccagcacgatacgatcgatgatctcaatacggtgatgtccacgctgaacaccgttcaggattcactcaccgacttacaggacacgctggcccaatcagacacgattctcgccgacgccaaacagaccaccgcctcactcaagcagaccgtcgcggccgcgcagaatgcctcccgccagtccggcacactgttggcggaaacacaggccgggtcacaagccttctccaccacactggtcggcgcgctcgacagcagttcagcacaactctccggactggccgtccacgtcaacaacgccgccggcagcatcaccggctccttcaacagcgcgcagaactccgtcgacaccatcaccaacacactttcggccccactgaacgccacccaaacgtcaatcagcgatctgaaagacgcgctgaccaaagccggcatcggcaaagacaccaccgacccggtcggccagaacatctggaaacaaatcgatgcgctcgactcattgatcagcaaacagcagacacagctcaacaccttccataccgacaccacacagttcatcaactccggcaaagacgccaccacgaacctttccggagccatgaccaacaccaccaccggcggcatcgcggcgctgaataccgcgcgcggctcgctgaccggcaccgtaatgccgtcgctcacctcatcattgaacagtttcgccgccctgaacggcacgctggatggcacgttgacttcgttgtccggcaccttggatcaggccgacgggctgttcgaccagcttgtcgataccctgaaccaaacgaaaaccaccatcggcagcacgcaggattcgctgcgccaggcggccagcgatgtcgccaccgtacgcaccgatatcgccacgctcgatagttccgccgcttaccagaaaatccgggatacgctgcatctggatgacaagggattcggcgagttcatgggcaatcccgtcaccctgaccacgaaagtcgtgtacgccaccgacaattacgggtccgcagtcaccccgttctacacgaatctggcactgtgggtaggcggtttcgtgctgattgccatctacaagcttgaggtcgaccgcaaaggcattcgccgtatcaccgctacgcaagcatatcttggccgctggctgctgctggtcaccatcggattcctgcaagccatcatcgccaccattggcgatctggtgctcggcatccaatgcgagcatccgctgctgttcatcttggccggaatcttctgttcgttcgtctacatcaacattatttacgcgctggccgtggcgttccgccatatcggcaaagccatcgccgtaattctggtcattgtgcagatacccggtgcctccggcctgtatccgattgaaatgatgccgaacttcttccgcgaactgcacccatggctgccctttacctacggcatcaacgcgatgcgcggcccgatcgccggcctgtacgcgaaccattactggctcgacatgctgcacctgttctggtatctgccggcggcgcttttcgtgggacttgtcgtacgccggtatgcgatgaacctgaacgcgctgttcgaccatcgtttgggagataccgacctgatgatcaccgagcacaacagcatggtgaacgaacaggtgagcttgaactccgtattccgcacggtgtccgacagcaaggaactgcgcgatatcatcgctcatcgcgcgcaccggttcttcgcgcggtacccaaagatgatcgttgccggtctgacattgctgaccgtactcccgttcgtattcctggtactgctgttcgtcacccaagagaaaatcgccatgctgacctcctggattctgtcgattattcttatcgacgcctatctcattgtggttgaatacgcacgcgaaacctacgccatgcagcttggcgtcagtgccatgagtgccgacgagttccgcaatgtgatgctcaacggatatgtgtggcggcgtttccacggccacggacgtcacgaagcggcgatgggcagcaatccggatatcggcgaaaccactgaacgactcacactgttcggcgatcaggccgccgagccgactgcgcacaccgcacagttcgagcagtccggtcagtctgggcagtctgggcaaggaggcgcacgatgaagcttatctggaaaatattcgtacgtgacgtgcgccaagccacccgcaatgtgatcgccgtaatcgtggctatgggattggtgattgtgccggcactgtacgcctggtacaacatcgccgccagctgggacccgtacggcaacaccaaggccttgaaggtcgccgtggcaaacgtggataagggctataagtccgatctgatgccgatcaccatcaacgtcggcgaaaccgtgaccaatacgctcagggccaatcatgaccttgactggcagtttgtggatcgtgctaaggccatcgatggcgtgaactcaggcgaatactatgccgcgctgattattccaaagagcttcagctccgatatgatgacgctgttttcaccgaagatcaagcacgccaagctcgaatactatctcaatgagaaaatcaatccgatcgctccgcatatcaccgaccagggtgctaccaccgtggccacgaccatcgaccagacatttgtgaagaccttggcgagcgtggcgctggatttggtttccaacgtggccgattacgcgcaaagcccgcaaatggagcagtacgtcaacaacgcctccagtcatattgccaccatgtcgtctcgtttgaccggtactgcgtcgcagatggattcctatgccaatctgctcggggccgccaacagcatcattgattccaccgataagctgctgggatcaacaggctcagctgcggccacaaccaaaaaggcgttgaaacagacccgcaacggcgtctccagcctcgacaaggcattgtccggagccaccgatggcgtcggtacggcattgcagcaggccggttcatcctacgacaccattgccaagcagatcgatgccgcttttgccgatgtgggctcacaatcctcgcagatatcaaacaagctgaccgatatgcaatccaaagtggaggctcaggccgacagctttggaaagtatgccgccgctttacgagatctcgccaaacaagcggcttcactgcccgtgggcggagataccgttgccgctcaactgaacgcggctgcagaccaagccacaaaggcgcagcagagcatgcagcaagccgccaccgcgttgggcgatgcggccacgcacatagcaaatggtactgccgatgccgatacagcgcgtcgagatctgaaatcacaaatcgccgccgccaaacaatcgattactcaggcttcagacacgtacaagagcacgctgaaaccgcaactgaacaatctgacctcgtccatggacgaagtggccacgcaggcaagttccgtaatcgacgggcttgcgtcgaccgtcagcagcgtgtcaggtctttctggcggcgtttcagacagcctgacggatatccagtcggccttgactgacgcagctagcgctttgacccgttcggcgaagaaactcgacaacttgtcttcccaactcgcctctatcaccagtggcggcaccaacgacctgtctgtgatttcctctgcgaagcccgatgccattgcttccatgctggcggcacccgtagcggtcgaccgcatagcgctctatcccgttgccaactatggttccgcgatggctccgttctacacgattctgtctatctgggtcggtgcgatcattctggtcgccatgttgaaagtatcgatttccgaccatgagaaggcccgtatcttagggttgggcaatgatctgccgctcggttcgggagtgggtcttcgcgaggccatgattgccgggcggattgccggaccggccgccgcgttggatgtgctgaagaagccgcgtgccgagtcttccggcaatgcgcggcagttcggtttacgcttgcaccacgaatatttcggccgatacatgattttcggtttccttgctttgctgcaaggtacgctggtgtgcctgggcgatatgttctatctcggcgtgcagtgtgagcatccgattcagtttttgatggtcgggtggttgtctgcactggtgttctcgaatattgtgtatacgctggccctatcgttcggtgatatcggcaaagccattgccgtggtactgctggttatgcaggtagccggttccggcggcacattccccattgaaacactgccgacgttcttccaggtcgtttctaaatggctactgttcccctatgcggtggatgcgatgcattcggccatggcgggctcattcggcatggaatactgggtttccatgggcaaactggcactgttccttgttccctcattgctgttgggacttatgttgcgcaagccggtaattcgcttcaacgattgggttatccgcaaccttgaaagcaccaaggtgatgtgagtgttggacggagtgtgtccgagcgccctgaacgcttagcagcctacgacctggcgtgtttggaccgtaacctgcctcagatacggcgttggcgaggcctgtggagcttctgacgctaacgtctacgtggcttgtagccctttttacgactgtgtggcttgagttgctggttcagcggtacatgccggtaactggattgtggatcgcgatgtgtgaggtgccagcatccgcaatattcgcaacggtacacccatagctcggctccacgctcgatcaggctttgatcagcggcacgctgagcctgcgccttatcgtggtacatgattttattcgacgtggcgcaacgtttaggggtgaagtaatgcatagcagaagccagtgtagagcgaccccataaccaagccagtttctggctcccctctggaggggagctgtctgcgcggcggaccggggggcctgggcgtcgggctcccacggtcgcggacgcgccgcgccgttcggcatcgccgtcggggctggccgggaatggtcccgggcgtgggtctcatgggtatgcggggaggtcccggtgcccgtgcgggttcgggccggggccggttccggatataggggaagccccttggggcgtgtgctccgaggggcttcctgtacgtgtggtgcggcggcgtgctactctcccacaccctgtcgggtgcagtaccatcgccgtgccaggccttagcttccgggttcggaatggga

SEQ ID NO: 2584 - DNA, 73096 bp, Unknown
  R222_15m  MAG No. k141_3631
ctctccggcctcaaggtcgtggacgacaccaccttcaccgtcgacctgaaccagtccgactccgtgttcccgattaaggtcggctactcggccttcgccccgctgcccgagtccttctacaaggacccgaaggccttcggcgaggctcctgtgggcaacggcccgtacaagttctccaagtgggaccacaacaaggaaatcgccctcgtcaagaaccccgactacaagggcaacgaggacgtcaagaacgatggcgtgaccttcaaggtctacaccgacgactccgccgcctaccgcgacattcaggccggcaacctcgacgtgatggaatccgtcccggctgccttcaccaagaccttcaagaccgacaagaaggtccaggcttactccgaggccggctccgtcatccagaccttcaccatcccgtcctcccttgaccacttcaagaacgacgaggaaggccagctgcgtcgtcaggccatctccatggccatcaaccgtgaccagctcatcgacaaggtgctcaacggcaacgccaccgccgccaccgagttcacctccccgaagaccccgggctactccgactccctcaagggtgccgacaacctgaagttcaacgcctccaaggccaaggaactgtgggccaaggctgacgccatctccaagtacgacggccagctcaccttctcctacaacgccgatggtggtgccaagccgctttacgacgccgtcgtgaaccagctcaagaagaacctgggcatcgacgcggccaccaacccgatcccgaccttccaggaattccgtgacgccgtcaccaaccgtcagatgaagggcgccttccgtaccggctggcagcctgactacccgtccgccgagaactacctgtggcagctgtactccaccgctgctgctgatggcaacggctccaacgatggtgactacaagagcccggccttcgatgacctgtgcaagcaggccgctgccgcttccagcactgatgacgccaacaagctgtaccagcaggctgaggagatcctcctcaacgaccttccggccatcccgctgtactactccaacgcctccggtgtggcttccctcaacgtgaagtccggctacgccttcgattggcagaacctcccgacctacgccgagatgtccaagaagtgagtctgactcactgaacggataccgttaggtagttcggaaataaagggcgaggaccgcaagatccccgccctttttgttgtgtgagggtgcttgctcccgccagcgggaaccaagttaaagtatccactatccgaccgcaaccatggacatatccaccggcattgcttactctcaaccttgcgttagcgcaaatttacatatcacagtccgggcatgcggtagaatgtcggagtatttatcgaccggcgggggcgtgctatgccctttctggccggtctaggaaataaggagcaaccgtatgggtaagtatcttctgcgacgcatcctgcagatgatccccgtggttctcggtacgacacttctggtctatgcccttgtcttcgccctgccgggcgaccccgtcaaggccatgttcggagacaagcccgtcaatgaggccgtcgcagcccagatccgcgcagaataccatctcgaccagccgttcatcgttcagtactttatctacctgaagaatgcactgaccctgaacttcggcgataccttcgccgggcagcctgttctcgacgaaatcgcccgcgccttcccggtcaccatccggctcggcctgatggcgttcgtgttcgaggcgatcttcggcgtggtcttcggcatcatctcgggcctcaagaagggcaagtggtacgacaccgtcatcctgatcgtctccctgctgctcatttccgtgccgaccttcgtcaccggcttcgtcatgcaatatgtctttggtattcagtgggcgatattgccggtgacggcaggcgcagacccgggcttcatcgacctgctcatgccggccatggtgctcggatcggtgtcgatggcctacatcattcgattgactcgctccgaaatctcctccaacatcgccgaggattacgtgcgcaccgcacgtgccaaaggtatgtcgaacggtcaggtcatgctgcgccacgtgctgcgcaactccctgattccggtcgtcacctaccttggtcaggacatcggcgccctgatgggtggtgccatgatcaccgagcagatcttcaacatccacggcatcggcttcctcacctaccagtccattctgaagggcgaggcaaacctggtggtgtccatcgtcacgttgctcatgctgatcttcgtggtatgcaacctcgtcgtcgacctgctgtacgcggccctcgatccgcgtatccgttacgcgtgatagggaggagtgagtcacatggcaaacgaaaccactgaaaacgagctcaaccagaccggcgagtcggaaaccgaatacttcatggaaaccctgcccggtcaggaccgttatgtagcccccctcgaggagaccccgctgcaggacgtcgattccgtcgatgaatccgcaccggccaccagcatgtgggctgacgcatggcgaaccctgcgccgcaacccgctgttcatcatctccggcttgctgatcctgttcatcatcgtggtggccatcgcccccggtctgttcaccaagcaggatccgaacgcctgcgatctgggcaactccctgagcccctccaccgccggtcaccccttcggcttcgacctgcaaggctgcgatgtgtacacccgcgtggtctacggcacccgtacctcactgtccgtcggcgtgctctccacgctgctggtcgtgatcgtcggtaccctgatcggtgccgtcgccggcttcttcggcggctggatcgacgcagtgctgagccgtatcaccgacatcttcttcgccctgcctatgctgcttggcgccatcgtggtgctccagatgtttaagacctccaagtccatctggaagatcgtgctggtgttgacgctcttcggctgggtcggcgtatgccgtatcgcccgaagcgccgtgctgaaatcgaagaacctcgaattcaacaccgcctccacggccctcggctccacgcctgccaggaatctgttccgccacattctgccgaactccctggccccgatcatcgtcatcgccaccacttcgctggcctcctacatcgtggccgaagcaaccctaagcttccttggcgtcggcctgccgaccaccacggtgagctggggtggcgacatctccagcgcacagaccaacctgcagactgatccgctggtgctgttctacccgtccgccgcactggccatcaccgtgcttgcgttcatcatgatgggcgacgccgtcaaggacgccctcgatccgaagagccgtacggcctgagcgaggggagtggagaaacattatgactgacaacaccaacgccaagatgctggctatgcagaaagagcatggtccgctgctcgaggtcaaggatctggccatcgacttcaccactgacaccggcaagccggtgcacgcggtgcgcgatgccaacttcaccgtctaccctggccagtgggtggccatcgtgggcgagtccggttccggcaagtccacctccgccatggccgtgctgggtctgctgcccggcaccggtcacgtggtcaacggctccatcaagctcgacggcgaggaaatcgccggcgccaagcagagcgagttcgacaagctgcgcggcaccaagatgggtctcgtgcctcaggacccgatgagcaacctcaacccggtgtggcgtatcggcacccaggtcaaggaagcactgaaggccaacaacatggacgtggctcacgaaaagcgctccgcccttgccaaggccctggccggcgacgaggtcgaagtcaagggcaacgacgacgagaccttcctcggcgccaaggaactgcccgagctcatgaccgaggccaagaaggctttgactgaagccggcgtgtccggcgaggccttcgacaaggccgtcgcccgcttcaccaacgaatgggttccgggctccgaaacccgttggcgcgtggccgacgacctcatcaaggccggcgtggccgacgaccaggcctggtatctggctaagaagtacgtcaccggctccacaatggatgaccgtatcgcgggtctgctgtccgaggccggtctgcccgacgccgctacccgtgcccgtcagttcccgcacgagttctccggtggtatgcgccagcgtgcgctcatcgccatcggtctggcctgccgccctgacctgctaatcgccgacgagccgacctccgctctggacgtgaccgtgcagaagcgcatcctcgaccacctgcacatgctcaccgactcgttgggcaccgccgtgctgttcatcacccacgatctgggcctcgctgccgagcgcgcccagcacatcgtcgtgatgtacaagggccaggtcgtcgaatccggcccgtcccttgaagtgctccagcacccgcagcacccgtacaccaagcgactggtggccgccgccccgtcgctggcctcccagcgcatcatctccgccaaggagcgtggtgaggatgcggacgccctgctcgatcaccacatcgccggcgaaagcacgctcgaaaagagcgagcacatcatcaccgtcgaccacctgaccaaggaattcaagctgccccgcaagaaggagatgttcaaggccgtcgatgacgtgtccttctccgtcaagcgtggcaccacactggccatcgtgggcgagtccggttccggcaagtccaccgtggcgaacatggtgcttcacctcctgaagcccacctccggcaaggtgttctacgaaggccgcgacatctccacgttcaaggccaaggaccttctgggcttccgccgccacgtgcagccggtgttccagaacccctacggttcgctcgacccgatgtactccatcttccgttccatcgaggagccgttgcgcatccacaagatcggcgattccaagtggcgagccaaccgtgtcaaggaactgctggacatggtcgagatgccggcttccgtgatgggccgttacccgaacgagctttccggcggccagcgtcagcgcatcgccatcgcgcgagccatggctctggacccggacgtgatcgtgtgcgatgaggccgtgtccgccctcgatgtgctggtgcaggatcaggtgctgcgcctgctcaacgacctgcaggccgagaagggtctgagctacctgttcatcacccacgatctggccgtggtccgccagatcgccgacgaggtcgtggtgatgcagcacggcaagctcgtggagcacgccaccaccgacgaggtcttcgaccacccgcagaagcagtacacccgagacctgctcgacgccatccccggcggcaagctccaactcggtctggactgataatctgcgtttgagcgcattgtattgggttctttccatccgtggaaagaacccaatattcgtatgcgcaggtttgcatgatggttcgcgtgggacgaaaggcaaaaattggtgttttcccgatgttgtcccacaaattgtgggacaacatcaacatcaatcgatagacatgagtgttgtcccacagcagatttctcacgaagcccggaattacgccattcttagtgtggtcgataattactcatgctgtggggtgtgggacggcccgcgaaaatcgtcgattttcggatgttgtcccacggaatacgtcatacctcgtatgtgatcgtgagtggggcgtgatcggaccagcgtttgtcatacgtgggagccttgtcgatgacgaatccgcgtgcggtctccgccaactcgggcgtggcgaactggtagtcgattctccagccgacattgttgtcgaaagcgcgccctcgctggctccaccaggtgtatggcccctgaatgtcgccggccaacgaacgcatcacatccacgaactcgtattcgtccagccatttgtccacgtaggcacgttcttcgggcagaaatccggcgtgcttctcattggccttggcgttcttgatatcgagcggcgtgtgtgcgatgttgaaatcgccgcagagcacggcctgtttgccgccatgcgcagcctcgtcccgcaacgcgcccatgcgcttcagcatcgtgtccagaaaacggtacttctgttccattttggtcggataatcggtgttgccagcatgcacatatacggatgccacagtgatcgcgtagccctcaggcgttttgacatcggtttcgatccaacgccctgaatccacatcctcgctcagacctggcagcccatatcgcttgtcaagcacttccaagtcggtgagcagtccgactcccgcgcggcctttcacccggcagacctcgttcatggcatggaggttggccggtgcctcgatcttgccggcggtggcgtattcgaaaccaaattcatcgaaaatagaatcgacatcgtcttgaggcgcgcgaacctcctgtatgcaccagacatccggcgcatgcttgccggcccaatcctcgatgcccttgcgcttggccgcacgaatgccgttgacgttagacgtggtaatggtgatggtcatgcggccatactattttggcctccctacgaatcgaaccggacatcggcggccgcgatgctcagctttctctaagcctgagtgctagtgttagcaaggttgcaaccgttacatgaaacgaggaattatgggactgttcggattcggcaagaagaagagcaagaaggaagccgagccggccgttgagcctgtcgatgaagacaaggtggctgccgcagaagcgaacgctgccgcaaaggccgagagcgcggagaccgtgctcgccgaaccggccagcgaataccagggccgcggagaagagcgaggcccgtgggacgtcaatgatgaggacgtgcccgattatgacgattatctggatctgggcgcctactacctgcccttcctccggggcatccaactgcgtatcaaggccaaccgcgccacccagcaagtgcttggttccaccatcaccttcggctcctccagcctggagatcgaagcctttgccgcacccaagaccctgggactgtgggatgacgttcgcggtgacctgcttgaagccaacaaggccgcttctgaagtggacggtgtgttcggcaccgaactgaagctgccggtcaatgtcaagggcggcaagaccgtgaacacgcgcatcgttggtgtggacggcccgcgctggatgctgcgtggcatcttctccggcaaggctgctatcgatccggacagcccggagaccgaggcgctgaacaagttcttcgccggcatcgtcgtcgagcgtggcgaggagcctttggcgccgcgcgatctgatcccgatgcatccgccggtcgcccccgctgagcgtaaggccgccaaggccgcggccgaagccggcgaggcgaacggcaaggaacacttcaaggacattccggacaacaagccgaagggcccgttgagccaggaccagcagaccgaagtgaagaccacgctgtctcgcggcccgatgttctccgaagttcgctgatttataggaagagacttggcagacaacaaacgcaccggcctgtccgctctagccgacgccggcaatgaaggcgaggatttctccgtcatcgacgccatcggtggcccgcgtggcgtcatcgaatccatgctgcccggcgtggtgttcgtcgtactgttcgtggccacgagcaatctgaatctcaccattgcggtttcggccgtgttggcggtattgcaggttattgtgcgactgattcagcgccagtcggtaatgggcgcggtctctggtctggtggcggtaggcatctgcctgatttgggcatggcagactcatgaggcccgcaattactacatcttcggattcattaccaatgccggctatgccgcgttgcttgccgtgtcgctgattgcgcgcgtgcccggactgggtttggtcgtcgaattcatccgtagcctgcccaccgagcatttcaaggcatggttccatgactggatggacgacaaggccctgaaacgcgcctatatgattgtcaccggcctgtgggtcggtctgttcctgctgcggctggtggtgcaggtgccgctgtatctgaccaaccatgtagctgcactcggcgtgacccgcctgctcatgggcattccgttctgggcattggcgatttgggtgagttacctcattattgccacgccgatgcaccggcataaggtcgcggctaggaagatacagactgaagtcgctgttgatgccgaactcgaaccgagcgcaaccggaaaggacgatgatgcaagctgaagttcgtatcgaacgatacgccgaccaaggccgctgcgtggcccatatcgacggtcgtgtggtgttcgtccgcttcgccttgcccgacgaactcgtgcgagtcgaacttgacgagccccacgaccgggacgaccggttctggaccggcgaagtcgtcgaggttctcgagccgtccgaagaccgagtcaccccggcatggccacttgccggtcccttggcgatgggcgggggagtgggcggcgcggatctcgtgcacgtctctttgcccggccagctcaagtggaaggccatcaccgtctccgaacagatgagccgactcggccatatcgacgtggccgttcccatcgagcgcatgcccggcgacaaggcagccggcggcctcaattggcgtacccgcatcgaaatgattgccgacgacaacggcatgccatccatgcgccggcgcggcacacacaaccgcgtggccatcgacaccatgccgcttgccacgcgcacgctgctggacgtcgccaagcgcgaacacgtgtgggaaggcggctttgaacccggctcccagattcgtctttccgtgcccgaaccgcgcggcgagatcgtcgataccgcggcagcaggcgacaattacgccgtacttgtggacggcgaactgcgcgccggctcccagctgctcaccgaacaggtgaccatcaacggcacgaccttcgactatcaggttgacgccaacggtttctggcaagtgcatcgccaagcgccgatcgccctcggtacgcacgtgatcaacctggtcaacgggcagctgcagtcagcggcggacgccgtaatctgggatttgtattccggttccggcctgttcaccctgccgctggccacaatgaccggtgaacgcacccgcatgctcagcgttgaaggcgcgcgtgtggccgtcaagaacgcccagcgcaatctgcgcgccatgaacctgaacgacgtggacgcccgcgcgggtgacgtctcgcgcacgctggaccatgtgccggcgcatctggccaagccgaatgtcgtagtgcttgatccgccgcgtgccggtgctcgtgccaaggtctgccgccagattgccgcggccggcgcatccagcgtggtctacatcgcctgtgatcccaccagcctcgcacgcgacaccgcgacactcatcggcgaaggctacgagctcaaagacatccgtgccttcgatatctacccgatgacccaccatgttgagacggtggccctgtttacccgctgacaggtgagcatatgacacgacgaattctcggattgctggcctgcatggcggctgtgttgtccctggccgcctgcacgccggccggtagggcggtcggcgatacccaagacagcatgccggaagtcgcccacgattccacacatcccacggatgtcacagtcggctttgtggggtcgactgacaccgccgcagacgagttcgtcatcaatgcgctgtctgatgacaaactcaatgtctactatgcctcgctcgaaacatccgcaagctcggcaaacgcaactgatggtgtatccggtgaaaccgaatcttctgacgccggcactaccagcgaaaacggtgccgatagtatggatgctcatactggcgtcgacaagaatgcggccaccgcacagcagggtgttgccgatttcgtagctcgcgcggtcaaaatcgtggttatcagcggcatcgacgttaccgacgccaaccgggagagctggaaccagacgttgaccaatgcgcgtgaagccggtattccagtcgctctcattgatccaaagcatgcgcccgaagatgaactgctgtacgccgtcatccttcacctcaacaccaacagtgccgattctggcgacactgccgataccaagccaatgactattactgacgccgtgctcaccatcacgcgcgatgaaccccacgaacgcgagatcaaagtcaccgtttcctgagccgaatcaggcccttgaagctgagaaagcaccctgaatcatccctgagccttagtggattgcgaaacaagacgcggtaggctggggaatatgagtgcaacaacagccgtggaaatgcctgaaatcggagtaaccggtcttacccccaaagaagtggtgcagcgtatcgaaagtggccaatcgaatgcggtgaaaacatccacctcgcgttcggttcaagatatcgtgcgagccaacgtattcacgctgttcaacggcatcatcttcgccgcgatggtactggtgctgatcaccggttcctggagggacgcggtgttcggtttcgtcatcatcatcaacacgggcatcggcatcgtcaccgaactcagggccaagcgcacgttggataagctttccatccttgtggcctccgaattcctcgtgcatcgtgacggcagggacgtggaggtgccccacaacgagatcgtgctcgacgacctgctgtggatccgtgccggcgaacaggtgccggccgacgggcagatcatccagacctggggactggaactcgacgaatccatgctcaccggcgaatctcgtaccgtgcgccacaaggtgggggagcaggtgtattccggcgccaccgcggtctccggcatggcattggtcaaggtcaatgcggtcggcagccattcctacgccgccacgctcaccgcgcaggccaaggtatacaagaaaaccgtgtccgacctgaacaagggcatcaacacgattctgaaattcatgaccttcctcgtggtaccgctgtgcattctgctgattctttcgcagattcatacggtcggcggttggggcacggcactctccaccggcgaatggcggcaagccgtggtttccgcggtcgccggcgtagtaggcatgattcccgaaggcttggtgctgctgacttcgctgaacttcgcggtggccgccatgcgtctcgcccgtcacaatacgctggtgcaggagcttgaatccgtggagacactggctcgcgtggacgcgctgaacctcgataaaaccggcacgatcaccgatggcggtatcgccttcaaccggctcgtgatgctcgattccgccaatgcggctgcggaacaggcagccacgcaggccctctacgattgctgcaacgaagagcagcccaacggcaccggccaagccgtactcgccgggctcaaggcccaaggatatggggcaggtgcggttgagtctcgtgtcccgttctcttcggcgcgcaaatggagtgcggtgcgtaaatccggcgagacctggtacatgggagcgccggaggtgattatttctgcgcttgagggtgactattcgtcggtgttgcagcaggttaacgagtatgccaatgacggcaaccgtgtgttgcttgttgcgcggtctacagctcccctctccgaggggagctgtcgccaaaagcgactgagggacgcagttgagggagccaatgtctcggacgacccgcaactggatgtgcaggctgagccggtggcgttggtgttgtgctctgagaagattcgcgaggacgccgagcggacgctcgcttggttccgtgagcagggtgtgcgctgtcgtgtgatttccggtgacaatccagtgaccgtgggtgccatcgcccgcagagtgaaactgacaggcgaccatgagccggtggcgatggacgcgcgcgaactgcccgaggacgtgaacgaactggcccgcgtgctcgaaaacgtcgatgtgctcggccgcgtgctgcctgaccagaagaaggccatagtgaaggcgctgcacacgcagaaccacgtggttgccatgaccggcgacggcgtcaacgacgcgctcgccatcaaggaggcggacctcggcatcgccatgggcaacgcggcacccgccaccaaagccgtggcccaggtggtgctggtggattccaagttctcgcacctgccggacgtcgtggcgcggggccgtcaggtcatggccaatatggagcgcgtggccagcctgttcctcgtcaaaaccgtgtactccgcgctgatctcgctcggtgtagtgctgacgcaaatcccatacccatacctgccgcgccatatcacctatatcggcgctctcaccatcggcatgcccgcgttcatcctggcgctcgcgccgaacacgcgccgctatattccgggattcctcaagcgcgtggtcacgttcgcgctgccgggcggcatcgccactgcgctgtcggtgctgctggccgcttgggtgctgccgccggtcatgggctggaacgtgaccggcgatgccgcggacctgtccgccctgcgcgccaccagcgccatcatcctgttcgcgatgggcgtgttcgtgctggcccgcgtggccagaccactcaacggttggcgtggcgtgctggtggcggtgttcgcggcggcgggcgtgatcggcgcgttcgtcccgttcgtggcgaacttcttcgccctgattctgccgaccggcgccacgatggtggccacgctgatcgcgttggccggttccgcgctgatcttcgcgctgtgcctgtggctggcgccgttcgtgcgcggactgacgggcaagctctcgcgtcggcattgagacggcggcgcgattgtctcatacttcaagccgacacgccagagcctcggtaacgtgcccgtaccatgtgtagcggataatcagcggcatcataagccgattcatgatttcggaggaagcatgtccttacgcgacgaccagctggctaccctcaaggcagccggcaaggacttcgattactacaacatcgccaatctcgacggcatcgatcatctgccgtactcgctgaaggtgctggtcgagaatctggtgcgcaacatcgacggtgccaacatcaccgacgagcacgtcaagaccctgctcgactgggatccgaacgccgaacccagccacgaaatccagttcacgccgtcccgcgtgatcatgcaggacttcaccggcgtgccctgcatcgtggacctcgccaccatgcgtgacgcggtcaaggacctcggcggcgacccggaggtcatcaacccgcaggtccagtccgatatggtcatcgaccactccgtgcagatcgacaagtacggcatcgccgacgcggtccagcaaaacatggacatcgaataccagcgcaacggcgaacgctaccagttcctgcgctggggtcagcaggcattcaagaacttccgcgtggtgccgccgggaaccggcattatccaccaggtcaacatcgaatacttggccaaggtggtcatgagcaaggccgaggccaacggcaacacgctcgcctacctcgactcctgcgtgggcaccgactcgcacaccaccaccgaaaacggtctgggcgtgctcggctggggcgtcggcggcattgaagccgaggctgccatgctcggacagccgatctccatgctcgtgccgcgcgtggtcggcttcaagctcaccggctccatcccggagggcgttaccgccaccgatgtggtcctgaccatcaccgacatgctccgcaagcacggcgtggtcggtaagttcgtggaattctacggcgaaggcatcgcctccgtgccgctggccaaccgcgccaccatcggcaacatgggccccgagttcggctccacctgcggcatcttcccgattgacaatgtcacgctcgactacctgcgcctgaccggccgctccgaagagcaggtcgcgttggtcgaagcctacgccaaggccaacaagctgtggggcgacgcttccgacccggattacgtggaaccgcagtactccgaatacgaggaactcgacctcggtaccgtggtgccgtccatcgctggcccgaagcgcccgcaggaccgtattctgctgtccgaagccaagagcatgttcgagaagaccgcccccgcctacgagaccgagaagaccgtcaaggatccggtggccgtgtccaccgacttccgtggcgatttcgacatcgaaaacggcgacgtggccatcgcctcgatcacctcatgcaccaacacctccaacccgtccgtgatgatcgccgccggcctgatcgcccgcaacgcacatgccaggggccttaagcccaagccctgggtcaagacctcgctggctcccggctcgcaggtcgtggccgactacctcaaggccgcggggctgcaggacgacctcgatgcactcggctaccagcttgtcggcttcggctgcgccacctgcatcggcaactccggcccgctgctgcccgagatttccgaggcgatcaacgccaacgacctgaccgtcaccgccgtgctttccggcaaccgcaacttcgaaggccgcatcagcccggacgtcaagatgaactacctggcctccccgccgctggtcatcgcctacgcgctcgccggcacgatggacttcgacttcgagacccagccgctcggcaccgacgcggacggcaacgacgtgtacttgaaggacatctggcccaccaatgccgaggtcgccgccgtggtcgacggcagcgtgagccgcgagatgttcctcaaggactacgcctccgtgttcgacggcgaccaccgctggaagggcctcgacgtgccggaaggcgagctgttcgcgtggaacgacaagtccacctatgtgcgcaagcagaccttcttcgacggcatgaaggccacgccggacccggtcgccgatatccacggcgcccgtgtgctggccctcctgggcgactcggtcaccaccgaccacatctccccggcaggcgcgttcaaggcctccagcccggccggcaagtacctgaccgagcgcggcgtggagccgaagaacttcaactcttacggttctcgccgaggcaaccacgagatcatggtgcgcggcacgttcggcaacatccgtctgcgcaaccagctgctcgcctccgtgggcgaggaggtgacgcctggcggcttcacctacgacttcctcgccaagaagccgaccacgatcttcgaagcctcccgcgactacatcgacaacaaggtgccgctcgtggtgctcgccggcaaggaatacggcaccggctcctcgcgcgactgggccgccaagggcacggtgatgctcggcgtcaaggccgtgatcaccgaaagcttcgagcgcatccaccgctccaacctgatcggcatgggcgtgctgccgctgcagttcccggcaggcgaatcctatgagtccctgggcctcaacggcaccgagacctacgatatcgccggcgtcgagaagctcaacgagggcgtgacccccaagacggtccacgtcaccgccacccacgaggacggctccaagaccgagttcgacgcggtggtccgcatcgacacgcccggtgaggccgactactaccgtaacggcggcatcctccagtacgtgctgcgcaacctcatgaagtaaccaccttcttggctcccctctcttgaggggagctgtcagcgaagctgactgaggggagcaaggccggtatccgccaacggataccggccttttccacgcatgccaagatgctatactgtatagcatctttggaatggaggttgccatgaccatggtccaaatgaacgttcgcattgatgcgaaactgaagaacgaggtcgaagaagtcctcaagggcaaaggcgtatcggtaagtgacgtaatccggtcgctgtggttgtacatcgccgaccgcaaggaagtgccggcattggaaacgaccgccgaagagcaagcccgcgaggaggaaaagcagcgcaagctgaaactgattcgagaaggtgccggatacgtacacaaggaactggtcaaggccggactgatctcagaagacaccgacctcatggaaggccttacctacaagcagttccgcgacaaaatgtacgacgagcgacttgatgcgtattacaacatgaagagggccgattgatgaccgacgtttccatgcagcgtattttgcttgataccaatgtactgttggactatttgctccatcgcgatgatcacgccaagatggcggaagcggttatggaacttggcgcgaagaacaacgttacgttgttgtgcgcgtcattgtcgctgaaggatatcgcatacctatcatcatcggcgattcgtagggaattcaaaccgaatgaatcggaagtggagaatttcactcgcggctttctgtcgtcacgggtgccatggcgttgtatcgagcaggtgaaggagatgtgtgacatcgtcgctgtcgatgagtcgacatgtgataaggctttttccctgcaaaaacggcatcgggattttgaagatgatctgatcatcgttgccgcgcaacaatccggtgccaactgtgtggtcacatcggatgccgaactaatcagtcattttcccgaatattgcaaaacaccggctgaaatcgtggcggcgctggaataaatgagcgtgtggctcccctcacggaggggagccaccaatgatgtgccggccaccgtagcctactgcgcctgtagacggaactgcttccagatgtcgctgagcttctgaccgttgcgcgtgcgcttccacacgtccagaccgccgccgcgacgtcctccggcggcggcacgggccgcggcggtcggagtcggatattcggagccgtcatccagacggagacgaccgttttcggtgaccgtggcgaaccagcgctcgcccttgcgcggccgctcccacaccagacgctcgcccggcaccagcagaccagcgtcaatcacctgccggatcgtgacgcgccgcgaactatgagacggccgtggagaggtcttcgacaactcatcgacattctgcttggtcagatcacgggcgtccttgtcataccggatgccccagtattccacgatgagtcggaccgactcttcctgccgcgcctccagcagggcaggtgtgtagtcagcgaaatccttcaactgattggtcagcgggaaacgacgcgaatccgcgcgcaacagcatgcggtcgcgacgtgccggatattcactcaacctgtccaactgatcctcagggccctgcaccagcgccatattgccgagtcggtacatccagaaatcatgctgatcctgcggccagtccgcaaacgatttcgaccgttcgatatccaacggcataatcggcagcgcactgaaccggcgtggtcgatccaactgcatgccggccttctgctcgttggcgcgaatcagcagcagacggaccaaatcgccgtcaccctgcatctcgccatgcaaacggaccaatgcgccttcacggtcgccgtccgagacatgcaacccgttcacgcgctggaccaaatagcccttgtcaagatcacggatggcggcgttcgcataaccgcgccgctccaacgctccagtgcgattcagcgtacggatgcccgtcacctgttccaatgcggtcagaatttccagcagccgacgctcgtcatgggcgcccaacgattccaacgtggccgtggttctggcgatacgtgaggcacgaaccacaaacggcgacaaatcggcgtcgcccagcccgcgatacgaattgaccaacgcccacatggccacgggcttccactcgtggctgcggtaatcgtccaatccctcaagccggctacgcacctcggcgggcagtacggtatcgctggggcgcgcgatgatccgccacgccatcgcgtagggtgccagcacctggttgatgaacgtgggcaccgtgcctttgtcgatgtacggttgcagcacgtcggccaggaaatcctcgatgagcttgtcggtggccggcttgtgcgtgagcacgagatgcagataggcgaagaattcctcacagtcatgcggatcgtcgccaagcgggtcaatgatgtcatcccagcgggcggcgtacacgtcaagttcggcggtcgacaggctggccgtggcgcgcgccttgaacacgtcggacggggtgagcggcaggccgcgcatgttcatcacgtcgaagatgcgatgcgcgccgtcgagatcgtcggtggtcacgatgacgagcgtcacctcgttgaccagatactgcgcgaattgctggcgttcggatgccgaccaattggagatctcgtcgtacgtcttgcggatgttggcgacgatgttgcgttgcgcagcggtcgccagatcgtcgtcgttcatgtcgaacacggattcgaggttgtcctcctgcacgtgttcgcggaagaacgccgcgtcgcgctcgcgcaacgtgaggcgaggctcggtgacgatgccgcgcagcttgtcgccgggctccaccagcagcgcgtcgagttggcacatgaggtccgggtctcgctccagatcgcgcaacacggcgatgatgatcgacagggataccagccgctgctgcccgtcgatcacgtcataacggttatcgccctcgcgcaccagaatcagcgagccgaggaaatacggggtaccgggtgacttgcaggcgtcatccaagtcgcttaccagttgcaggatgttctcggccttccatatgtaggcccgctggaatgaggggattgtgaaccggaaatccggggtgaacactttcccgagtggtagttccttcgcgctgattgccatgtcaatcccttcgtcgccggcctctggacggtatgccgacgtgccgactgtgctcaagcctaccagtgttcgcccgacggcgggcacatcacgccggctcgggcaccgacccctcatacaagtagaacgaagatgggttttctcccggcacggatgcgggcagtgactgctcgcacacctgcgtcaggccgcgatgtacatagaatccgacatcgcacgtggtatccgtgaataggaagtactgacgtatgccggctgcgcggaatgcgctcatcatcgtctcgaacatgcgccggcccagaccgtgaccgcgcgccgccggatcaagtacgaacagcaccacttcagccgaatactcatggccaatgttcgccgcctgcttacgcagttgcctatcgacatgaagagtcccgagaatctcgctcgcagctgccatgccgtcgtgggcaaacgccagttgcaatagcttgcgcaacgaatgacgccggtgcatgttcagcgggctgcgatggtcgagctcgtcgatacgccccacaatcaatgcgacgggtttatcttccagctccgcgacaaaggccgtggtcacacgtgccagacagttctcccaatcggcctcggctgccagcaagccggtccgctcatcatattcggcgtaccaagtgcggcgcaccagatcgatcagcgccggataatcgtctttacgtaacgttcgaataatcgcttcactcatgttctccattatgactgatatggctcgataacccgacgtgttacagtcgcgccggcaaatcggcccgctccaccagcctcgccatctgtacgcggcccatattgagcttgtccgccgcggaggagagatgcgccttggccgtacgctccgagataaacatacgggaggcgatttcggcggtgggctatgtgctgcaagacgattcgccgattacggtgtatgccactgcgttcctatcaacggatcaagacaccaaggtgacgcatgccttcacgttgcagtgaatcgcgcggcggtccaagctgcggtcgaatgccaatcgaatctcaagtgcatgccacgcgcatggtggaaacgcccgttacgctttgcgatgagcagaacgagccgatcgatcctattcatggaatgttcagttttgttcctctaagattggtactggaacaaacgctaaaggagcgattatgacattcggtcagcagccccagaacaacgggcaatacaacccgcaatacaacacgcctgattacaacgccgcccaacagtctggatatggccagcaatacgcacagtccggttacggccagaactactatgcccagtcgcagggcgcccccacctaccagtacgcgccgcaggatgcggccggtgccggcgcgggtgccgccaccatcaacacgacgatgacctacaactatgaggaggcccgccgcgtctccgtagccaaggtgtacggcgagatgaccatcggcatcctcgtcaccgccgtggtcgccgtgctcggccagatcaccggagcctactacagcttcctcatggccaccggcatggtgggcctcatcggcctgtgcgtggtgcagattgccctggccgtggtgctcggcatgcgcgtcaccaagatgaagtcggccactgcgcgcgtcatgttctatgtgtacgccgcattgatgggcttcaccttgagctcgatcttcatggtctacgacctcggctcgatcggcgtggcgctcggtgtcaccgcagcgttcttcttcgcgctgaccatgttcggcatgactaccaagttcgacatgctcaaggccggcccgatcctgatgatcggcctgatcgtgctcatcatctcgcagatcgtgctcgccttcgtgcaggtcgacggcatgaccaagatcgtctgcgccatcggcctgatcctgttcgccggcatggccatctacgacgcgcagtccacgcgcgcgctgctgaccgaatacgaggcccagggcccggaaatggtcaagaagatctccatcctgtgtgccctgaacctgtacctcgacttcgtgaacatgttcctgtacatcctgcagctgctcggcaacagggactagcctcgccagccgattggtgggcggcatgtagcctgctcgtcaaacgtcacagcccgaccacattgtggccgggctttttcatgtctgtcacattcgcacgttaggctgtctccccgtgaaaagacaagaactcgtaggcatgctgagcctgttgttgaccgcgctgatctggggttttgcgttcgtggcgcaggtccagggcatggatttgatgtcgccgatgttcttcaacgccacgcgcttcacgctgggagcactgtctttggtgccgattctgctgtggcagcgtggccgggggagcgcggataagggcgatacagccggggtcgatgtcgttgggaccgaggcccccagggccgtctccacagatgccgcatcgaacggcgcatccgacgtcgttaccatcaccggtgccaagctgaatgcgaacaagcccgattcggccgtggcgcgattgctcgccaacccggtggtcatttccgtgatctgcggcatcgtgctgttcaccgccagcaccctgcagcagtatggcattctgtacggcaaatcggccggccgcgcgggattcctgaccgccatgtacatcgtgatggtgccgttgctggcctgcgtgttcctgcgccggcgcatcggcatgctggtgttcgtggccgtggtgctgtccatcgccggcttctatctgctgtgcatcaccgatggtttcggttcgatcggcctggcggatatcctgctcgtgttcacggccgtgctgttcgccgtgcatattctggtgatcgatactttgggcggcaccgtggacgccatcaagctttcattcggccagttctgcaccaccgccgtgctgagctgggcgggttcgctgatcgaaggctcggtcgactgggccggcgctgctcattcctggattccgatcctgtacgccggcatcggctcggtgggcatcgcgtacaccttgcaggtggtcggccagcaatgggtgccaccgacgcgagccagcctgctgatgagcctcgaatcgttcttctcggcggtaggtggtgcgttgcttctcggtgaagtgatgaccccgcgcggctacctcggctgcgccctcatcttcctcggcaccctgctggcccaagcgccggccaggctgccgaagtggctgcaacggtgaatgaatcggacgcaggccgattccatagcacctcagtccgtggtcttaggcgcttcacccacttgcggcgcgccgttgatgtcgcggtggatgttctgcatttgcacttcgatgttctgcagcgaacgggcgcagtcgagcagtgtctgtgaatgctcgctgagcttgttgtccggcaaatcggtcttgtagcgcagcgcatgctccagcgacgcccaataatccatggcgatggtacggaactgcacctccaccggcgtgtaatgcgcgcccgaggagagaaacacgggcaccgcgtagattacgtgcaatgaacgatacccgttctgtttcgggttcttgatgtaatccttgacgcgcagcacctgaatatcggactgcgacgacagatagttggacacggaatacacgtcgtcgcggtaattacagatcacgcggatgccggccacatcgaacagattgtccttaatcgaattgacactgattggcagattcttgcgctccagcttgccaatgatcgaactcaccgacttcagacggcgttccatatgatgtatcgggtcatggctgaaccgcacctggaactcgtcgtcgagaatctccagcttggtgctgatctcgtacatcgcgccttcatacacctgcatgaggtcaacgaatttaacgacctgttcgggagtgaaggtgcctcccggaagatccaacgctttgagacgggcctgtagatcggaggttttgagtcggctatgtcggtcaagtatcacgtccaccaatatactcggcggattccagacaatctggatgttcgcggggaatctttccaagaacccatatttaagatcgtgacaaccaatggcatacgtgaccggagcatgacgaaccccgccgatagaatcggtcgttatgaatgaagacatgatgaccgaggcggagcgtgcctcgattgcagccgatggaaccgatagcttgctgggggagcgtggaaagggcgtattccatatccacacgctcggctgccagatgaacgtgcacgattccgagcgcatcgccggcgtgctggaggccaatggctacgtccctgcaaccgaggaccagatcaatgacaatgacctcgatttgctggtgctcaatacctgtgcggtacgcgagaacgcagccgaacgcatgtatggcaccatcggccgattcaatcgcgtcaaactggttcggccgaacctgcagatcgccgttggcggctgcatggcccagcttgaccgcaagaagatcgcggatactgcgccatgggtttccgcggtgttcggtaccaagaacatcgaagatctgcccaagctgttggatcagaatcgtgcgaccggcaaggcgcaggtccaggtcactgaacaattgcggcagttcccgagccagcttcccgccgcccgcgcctcccgcatcagctcgtgggtggcgatttccgtgggctgcaataacacctgcacgttctgtattgtgcccaccacgcgaggcaaggaaaaggaccgccgccccggtgacattcttgatgagatccgccaatgtgtggccgatggtgccaaggaggtcacgcttctcggccagaacgtgaactcgtttggttatggtattggcgatcgatacgctttcagcaagctgttgcgcgcctgcggaaccatcgacggtctcgaacgtgtgcgcttcacttcgccgcacccggccgccttcaccgatgatgtgattgcagccatggccgaaacgccgaatatcatgcatcaactgcacttcccgctgcagtccggttccgaccgcatcctgcgcgcgatgcgccgctcctacaggtccgccaagttcctcgatatcctcggtcgtatccgcgaggccatgcccgacgcccaaatttccaccgatatcatcgtcggattccccggcgaaaccgaggaggacttccagcagaccatggacgtggtgcgccaggcgcgcttctcctcggcgttcacgttcatctactcgccacgccccggcacgccggccgccgcaatggaacagattccgcgcgacgtggtgcaggaccggttcgaccgactggtggcgttgcaggagcagatcaccgaagagaacctcgccacattcgagggccgcgacgtcgaagtgatgatcaccggcaaactcggcaagaaggacaccgacacccaccgtgtcaccggccgcgagaaaaccggcgtgctggtgcacatcggcgtgcctgaaggcgaaccggtacctgaaatcggcgatttcgtcacggtcaccgtcacacacgccggccgccataatctgcttgccgaccccgatgtggccgctggacagacctattccgtgcgacactgagggggcgtatatgacgcaacgagtcgtctccatcgtcggtcccaccgcgtcaggcaagacggggttgggcatcgccatcgcccggcgtcttgccgaagcgggggagcgggccgaaatcgtgaacgcggacgcctaccagatgtaccgtggcatggatatcggcaccgccaaacccaccgccgaagaacaggcggccgtgccgcatcatctcatcgacatcatcgaccccgaagacacgatgagcgtggcccgattccagcagcttgcgcgcgagaccatcgccgacctgcaatcacgtggcatccggccgattctcgtcggcggctccggcttgtacgccagagcggccatcgatgacatcacctttcccggcaccgatcccgacgtgcgcacacgtcttgaggaacgcgagaaaaccgagggtgccggtgctttgttcgacgagctgcgggccaaagaccccgaagccgccgcgcgcatggacccacgcaacccacgccgcaccatccgtgcgctggaagtcatcgagcttaccggcaaaccgtattcggccagcctgccgcgctaccggtacgtgattccgtccgtacagatcggactcgacctggaccgcccggatttggaccatcgcatcgacctgcgcaccaagcagatgtatgacgatggattcatcgaagaagtcgaacggctgcgcccgcatctgggtgccaccgccgtacgcgcgctcggctatcagcagatcatcgacctgctggacggcatctgggatgtgaacgacgccttcgcggacatcgcacagaaaaccaagcgactcgcccgcaaacagatgggatggttcggccgtgacccgcgcatccactggctgcaggccctgaacccgaaactggtcgacaacgcgatggccattatcgcgcacgccgacgccggcgactacgacccgatcgacgcccgagccgacgaatacacccagcatcatctgggcgatatcacggcgtaggaatcagccaaaggccgatgcaatcacccgcaatcagtgtgcaggcccctgattccagccggcgatcaagaacacgcgcgtcggattcgccgggcgtagtatcgcgtcgaacatcgtctccagtgcagacgtgtcgccccgatatgccgagtgcttggcggagcgatactcctcgcgcgtcactgagccccagtcgagatcccagccggcgtcatgcgccaagcgtgaaccgaatatacgcagcaccatcgcattgccgccacggaacggatgcagataaccgagctcatcataaatagaagcgaacgcgtgaacgaacacgtcgcgatccaacgcatgcaggttgcgcttgtccgccaactccatcgcgatgttgtgcgcgccggtctcaatgagcccagccgggaagaacgcctccggattcgcggcccgagcccggtcgttcgtcacctcgcgtgtggtgtttgaggtacgcaacttgcccgcatcctcgaacacgccttcgaacagccccttatgaatggcggtcaactcgtccaagtcgccagacggattccaccgacgttccgccaacaatacggtacgtgcgaacaccgcatccgcgcgatccgtggcatgatcatccagactgccggcagccagacgatcctttccggcagggtcggcggcggcgcgcagacgcatggcggtctgctcgtccgccacgtcgatgagatgggtcacgggctccaagccacgttcgtaggcaaccgcggcgcgcatcgttgcctcgcccggcgtcatcgcttccagtgcgcagttcttgagtgcaaatgcgactgcgctcgcacgctctgcgggtgtcatgcaacccatgataaggcatattcgcgctccagcggggaatcgactcggacgaacctcgacgaaccgcggcgaatcggctgtcgggattcgtcaatcgaccatatcgtcacggtgtcgtcaccaaccatgcacccccgtactagtagaatcagacccgatatggcacgaacagcatcctccaacagcaccaaaccccgtaaatccaaagacaacgggtctacccatgatggcgaaaccaaggtccagcccgagcttgacctcgaacctgagccgttgtggaagaagatcctgctcgcgattccgcgcgcgttcggctccggcgtacgcgccgtcaccggcgtcggcgaatacgacccagcctaccgtcgtgacggtttgtgcttcctgctgctcgtgctcgccgtactgttctgcgcgtccgaatggttccgtgtcagcggtccattcggccagctgcttcacgccatcgcggccggtgtgcttggtctgatgagcgtcgtgctgccggtgttgctcgccgccgtggccttccgactcatgcgcaattccggtaaagggtccaataacccgcgtgtggtcaccggttgggtgctgctcatgtggtcgatttgttcgatcatcgacgtggcgatcgccgccgaccacaccggattcgacatcacgattctgcaatccgccggcggcctgttcggcttcttcctcggctcaccgctcgcctggggcctttccaacgtgttcgccatcatcattttcgtggtcgtcggcctgttctccttgctgatgattaccggcactcacgtcaccgatttgccggaggatgcgcgcaaaatcgcagctaaaatccaacgcaaaccgtatgtgccgatgggccaggaggccgacggaagcgccagccagttccccaacgaggtccgtgtgggagataccacactcgcctttgccgacggtgttccctcgcatgacggcaacgacgacggcaacgacaacgatcaggccggcgatgcacggcccagcctgttcgcacgactgttcggccgcaaatccaagaccgaagacgacaaaacccttgacaagtatgctgccgacgatccgttcgaccgtgccgccagccagcatggtgccaccgccgaaaccccggtggtcgatccgatgaccggcgagattaccggtgcgcgaaccattgcatcgtcttcgtacgacggtcgtccgcacctatccagccctgcgcctgctgccgatgcggatgatggcgacgcttcccgaacccgcgtcatcaccagtggccagaccatcgccatgcccggtgggggagcggtagacgatccgtgggcacccagtgccgcccaggccggtactgtcgcgctcgcaggggcagccggggcgatgggagcggccggggccgccggtgccgcggccgcggcagccgcgaccggagcctacgcaggcgccgatgcggatggcagcggagtcggccagggcgtgcccaatacggacggacagccgaatgccgccgccggcaacggtacagacgacgacgccaataggccgtatcagttgcccgacctgaacctgctgaccaaaggtcagccccatgcgatgcgcaccccggccaacgatcgcgtgatccgggcactgacttccaccttcgaacagttcaacgtggacgccaaagtcgtcggcttcctgcgtggcccttcggtcacccaatatgaggtcgagcttggccccggcgtcaaggtggagaaagtcaccaacctgcagcgcaacatcgcctacgcggtggccagttcggatgtgcgcatcctttcaccgattcccggcaagtccgccatcggcatcgaaatcccgaacgaggatcgcgaaatcgtgcacttgggcgacgtattgcgctccgacaaggccgtgggcgacccgaacccgatgctctccggcatcggcaaggacgtcgaaggccacttcgtgaccgccgacctgaccaagatgccgcacctgctggtggcaggtgccaccggttccggtaagtcgagttttatcaactcgatgctcacttcgatcatcatgcgtgccacgcccgaacaggtgcgtctgatcatggtggaccccaagcgcgtggaactgtccgcctacgcaggcatcccgcacctgctgaccccgatcatcaccgatccgaagaaggccgcacaggccctcgaatgggtggtcaaggagatggatgcacgctactccgacctcgaattcttcggattccgccacgtcaaggacttcaacgaggccgtgcgcgccggcaaggtacatgcgcccgccggctcccagcgcaaggtggccccctatccgtacatcctcgtggtggtcgacgagatggccgaccttatgatggtggccaagaacgatgtggaaagctccatccagcgcatcacccagctggcacgagccgccggtgtgcatctggtgctcgccacccagcgtccgtccgtggacgtggtcaccggtctgatcaaggccaacattccatcccgactggcgttcgccacctcgtccgccaccgattcgcgagtcattctcgacacggtcggtgccgagaccctgattggccagggcgatgcgttgttcctgccgatgggttccgccaagccgattcgtgtgcagggctcgtgggtgtccgaatccgagattcgcaaggccgtggagttcgtacgcacccagcgcaagccgaagtaccgcgaagacatcgaacagatggccaaggaagctgagaagaaagacagtatggagcctgacgaggagatcggcgacgacatggacgtgctgctgcaggccgccgaactcgtggtcaccagccaattcggctccacctccatgctgcagcgcaagctcagggtcggcttcgccaaggccggccgactcatggacttgctcgaatcgcgcggcgtggtcgggccgtccgaaggctcgaaggcccgcgaggtgcttgttcagccgcaggacctgccgcaggtgctcgccttcatccgaggcgaaaccagctcgctcgaagccagcgccccgcaacaacccgaactcggcgaataattcacccatcgacctccctctgatgagggaggtgcccgaaggggcggagggagagaagcgcggacagcatcagcacgaaacctgattcccgaataatagcagtcaatatccagccaccactcactcaaggtaggagtatgggggtaacgtgaacactatggatgagaacacaatggacaagcagtcatcgcccaaatcatcgctgttcgacggatggaacgcgccgccgaacctggtcacctactcgcgcatcgtactcgtggtgattttcctgacactcgacattctcgccggttcctggggtgagaacaacctgatcatgcgttgggtcgccgcggtactgttcatcatcgccgcgtccaccgataaaatcgacggttggatggcccgcaaatacaatcaggtcaccgaaatgggcaagctcatggatccgatcgcggacaagctgctcacttgcggcgcaatgattgtatgctccgcgttcggcgagctcggctggtgggtaaccatcctgttcctgattcgcgaaattggtatcaccgttatgcgtttcttcgtcatggagcgtccgggcggcaaggtcatcgccgccgcatggcccggcaagctcaagaccgtattccagtgcgtgggtctgtccatgctgctgctgccgttctggtctctgggtaacggacaagccacgccgttctggatgaccgcttactacttcctaacctacgccatcatctacgtggcattggtcctgtgcctctactcgggtgctgtatacctatataacacgttcgtcgccccgaaaaggaagtgacggatattccaatgcaggaattgtgcgacagtctcgcggccggcatcctcaagatctgcgaggcgaacaatacgaaaatcgcctgcgctgaatccctgaccggtggcctgcttgccgatgcgttcgtgcgtattcccggtgcctccaacgtgttgttgggctccgctgtcacctacgacatcaatgccaaggcctcgatcctgcacgtggacaaggccctattgggtcgagaaggcgccgtacacccagaagtcgcccggcagatggccatcggtaccgctcgcctatacagccagccggaatacggcgaccgaatcatcggcctttccaccaccggcgtggccggccccggtccggacggtgacaagccggccggactggtgtatgtgggcctgcgcatccccgcaagcctcaccacgaaccatgccgaagtgctcaaagccgtcgaactccatcttgatggcatgcgcgaagaggttcgtcgcctcgccgtattccacgttctgcaaaacttgagtctattcacagcaagttttaaggaataaaaccgcgggaccgtcgtgttgtacatagtggaaacactgaaccgaccttggaaggggcgatggcgatggaaacgatgacccgagtgaacgaacagatggatgtggccgccaagaagccgatggctgtgcagccgggtgtcgcccgtatgcgtgaactgactccggcccagcgccgtgcggtgatgttcgcccagcagcaggtgctcaaggcgcaggccgccaagaaggccaaggatcagcgtcaagccgttcgtgaacgtatgtgggatgaggattcgccgtcgtacaagccgactgccgctgccgagcccgtggtggttgaggaggagcctcgcgaggtttcgctgcgtggtgctatcggtcatgtgctgcgcgaactgcgcacacgcgatcgccgtacgttgcgtgaggtctccgagaaggcaggcgtttcgctgggctacctttccgaagtcgaacgtgggcagaaggaagccagctccgaactgctgagctccatcgccgatgcgctcggagtctccacttcgtgcatgctgcgcatggtggctgattatctcgactcggtcgagggctgatcggttggcggtgtgaagccgtgtcccgtaatctatgtctagctgtgaacccgtatcgcttgtggcgatgcgggtttttgctgtcctgcgggtggtggcacactggcgtgtatgcgtgaacgggaattctgggaattacttgaagaggtgttcggtcggacctacggtcgttcgctgtcgcgtgatcaacggatgcccaaactggcgaatatgactgtggtcgaggcgttggacgcgggggaggagccacgcgtggtctggaatgtgctctgcgaccagatggaggttccggactccaagcgttggggccgcgatcataacgcgccgcccatgcccgccgtctgacactgcgggattacggagtcactgaatcgtgaaattggcgatttcggcgtgttgcacgccaaattcgaacagatgttcgtgtgtgtggttatagttatccacagtgacaagaagccgcatacgtgtgcacagggtgcttgccatccgccataagccttaccgcagtagggcttaaggaggtcaggcggccgagcttgggcaagctgggaccacaatggttggtttggattgcctcacatggcatgtccgtcatacggtggaggcatccgattcgcgcacgacttcgacaaggagaagatcatggcacttgagaccaagccggccaaggacccggcagccgaggacaagcacgagctcgatcccaagcgcaaggcggcgctggacaccgcgctggcgcaggtcgagaagagctttggcaaaggttccgcaatgcgactgggcgaccagcccgagcagaacgtcgaggtgattcccaccggttcgttggccctcgatatggcgctcggcatcggcggcctgcccaagggccgcatcgtggagatctacggccccgaatcatccggtaagaccacgctcgcattgcatgtggtggccaatgcccagaagaagggcggcgtggcggcctacatcgatgccgaacacgcgctcgacccggcctacgcccgcaagctcggcgtggacaccgactcactcatcgtctcccagccggataacggcgagcaggccctcgaaatcgccgacatgctgattcgctccggtgcacttgacgtcatcgtcatcgactcggtcgccgccctagtgccgaaggccgaaatcgaaggcgaaatgggagacagccatgttggtttgcaggcccggctcatgagtcaggcgctgcgcaagatgaccggcgcgttggctcaggccggcaccaccgccatcttcatcaaccagctgcgtgagaagatcggcgtgttcttcggcaaccctgaaaccaccaccggtggtaaagctctgaagttctacgcctccgtgcgtctcgacatccgccgcatccagaccttgaagaacggcgacgaagcggtgggcaaccgcacgcgcgtcaaggtggtcaagaacaagatggccccgcctttcaagtccgccgaattcgacatgctctacggtgaaggcatttcccgtgagggctcggtgatcgacatggcccagcaggtcggcgtggtcaagaagtccggttcgtggttcacctatgagggtgatcagctcggtcagggacgagagaaggtccgtcagttccttaaggacaacccggccatcaccgaggagattgagaacaaggtcaaggccgagttcggtctgatcggttccgccgatcagttcgcggaagatggcgaagccgcagcagcggccgccgtcagcgaggccgctgcggccgacgtggccaaggacagcaaggccgcagcggcgcctgctgccaaaacgacccgtgccaaggccggcacagctaaggcctgaacatgattagtgccgaagcattcttgcggcgcaatcctgttgcgtcgcaaaacatgcccattgccgagaagcgtgttcagtcgaaaccggcgggacgtttttctcgacgggggagaggcgctgccgttgtcgaagatcccaatgatttggacgcttgccgcgaggctgcattgcgtttgctggacgcggccccgcgtgcatccggtgcgttacgcgaacgattgcttgccaaagggtacggcgaggtgatcgtggacgaggtcatcgaacggctgattcgcgtgcaactgattgacgaccgcgcttatgccgaatcggccgtacgctattgtgccggtcgcatgatgggccgtcgtggtgcggtcctggaacttgctcgcaaaggcgtggaccgcaaactggctgaacaggtgtgtggcgaagctgagcaaaatggcatctttgaagatgccgcatgggaattgggccgccagatagcccgcaaaacccatggcctcgatcatcaggtccgtcagcgtcggttttggtccgcaggcggccgcaaaggacacagccccgaaaccctccgccgagtcgccgccgaattgttggcgtagccaagaaaaaaaatgagacctctcataccccgggttctgtcgtgccgtgcgcgaacgcgcagcacggatggccatccatctcgacctgacgttaccgccaggctctagcagcctacccgatgacacgggcgagcagcccttaccgccatctgcttggccttgctcccgatgaggcttgccatacgacctactgttaccagaggcccggtggtctcttacaccgccgtttcacccttacccgtcgaggacgggcggtctgttctctgttgcgctatctctcaggtcaccctgggcggacgttatccgccatcgtgctctatggagcccggaagttcctcagccgatcccaatgaagatcacggccgcggccatcaagaggtctcaagcttgcaattatacataaggtgcggaaaaggcggcatcccgccctgcggtgaggccatgacgttgcccggttatcctgttttctccatagttgggcgattcgtgaacgacgcgccgaatatcggatggggcgtgtcgggcgtgtcgtatggagacgaatcaaatctgtaagagcttggtatgtgcgagaaagagcaagaaaacgctgcctatccattgcagtatttaccatgacgaacaaacaagccagcctgataaaccggtatcaaatcttcttataggagactgctgccaaaaccccagtatatacatcgtttcattgcagagaaaagcccggagataaacatatattctctgggcgagtttccggccgttcacccattgttcgtctacaatgaaacatacccggtcggtgatgatgccgttcggaacacatatagcgggttacaccgcttgagttagaggaggtcaacatggaaatcgtcgttaccggacgccacacgcaggtcaagcaaaggttccgtgatgtggtcgagaccaagatgaatcgtgtgaccgctatcgccccggatgctcagcgcgcgcagattgtgctgacccatgagggcaacccgcgtcaggccgataccgccaagcgcgtggaaatcaccgttatcgccggacgtaccgtggtgcgtgcggaggcttccagcaccgatgaattcagcgcgctggacatggcgctggataagttgacgctgcgtctgcgtcgtactcgtgaccgtcgcaaggatcaccgtcgtggttacgcgaacccggtcccggttgatctgggtgttatcgccccggagcccgatccggaggagtcggaggaagagccgaacaacagcccgcaggctgcggtcgcctccgatcttggccctggcgaatccgtggaggtccaggttggggatacgccgattgtcatccgtcgcaagctgcacatcgccgagcctatgagcatcgacgaggcgctgtacgagatggaactgatcggacacgacttcttcctgttcgtgaacaaggagaccggacgcccgtccgtcgtctaccaccgtcacggttggagctacggcgtgttcgaaatcgatactccggagaacgtcaagaaggcctgaagataaggcctgctgacacgatcagctgataccgcatggaccgcttccaatatggaggcggtccattttttcgtaagaaggtcgaaaaattcgactgctgacggtgcgaggcgctattctggtacgcggacaccaccacttatcagtcaagggagaacccagtggtcgatattgttgacaaagccctgcgaatgggtgaaggccaccagctcaagaagctggagaacgtggccaaggccgtgaacgctctggaggatgagatctccgccctctctgacgaggatctgaaggcccaaaccccgaagttcaagcaggaaatcgaaaacggcaagagcctggacgagatcatgcccgaggcgttcgccaccgtgcgcgaggtctccaagcgcacccttggccagcgtcacttcgacgtgcagctcatgggcggtgccgccctacactggggcaacatcgccgaaatgaagaccggtgaaggcaagaccctggtcgccaccctgcccacctatctgaacgccctcgaaggcaagggcgtgcacgtggtcaccgtcaacgactacctcgccagctaccagagcgagctgatgggccgtatctaccgtttcctcggcatgaacgtcggctgcatcatcaccgagcagaagccgcctgagcgccgcaagcagtacaacgccgacatcacctatggcaccaacaacgagttcggcttcgactacctgcgtgacaacatggcctgggagaaggccgacctcgtgcagcgtggtcaccactacgccatcgtcgatgaggtcgattccatcctcatcgatgaggcccgtaccccgcttatcatctccggcccggccgaaggcgacgtgacccgctggtaccgtcagttcgccaagctggtgctgaagctcacccgcgacgaggactacgacgtcgacgagaagaagaaggtcgtcggcatcctggacccgggcatcaccaaggtcgaggacttcctcggcatcgacaacctgtatgagccggccaacaccgccctgatcggctacctcaacaacgccatcaaggccaaggaactgttcctgcgcgacaaggactacgtcgtcacccaaggcgaggtgctcatcgtcgacgagcacaccggccgtatcctgccgggccgccgctacaacgagggcctgcaccaggccatcgaagccaaggaaggcgtggaggtcaaggccgagaaccagaccttcgccaccatcaccctgcagaactacttccgtatgtacgacaagctcgcgggcatgaccggtacggccgaaaccgaggccgccgagttcatgaacacctacaagctgggcgtgctgccgatcaagaccaacaagccgatgatccgcaaggaccaggacgacctcatctaccgcaccaagaaggagaagctggccgccatcgtcaaggatgtggccaagcgacacgccaagggccagccggtgctgctcggcaccgcctccgtggaaagctccgaagtggtctccgccctgctcgacgtggcgaagatcccgcaccaggtcctgaacgccaagcagcacgagaaggaagccgccgtggtcgccgtcgccggccgcaagggcgccgtcaccgtggccaccaacatggccggccgcggcaccgacatcatgctcggcggcaacgtcgagttcctcgccgacgccaaactgaagtccgagggctactctccggaggacaccccggaggagtacgagaagcgttggccgggcaccctcaacgagatcaaggcccaggtcaaggacgagcatgaggaggtcaaggagctgggcggcctgtatgtgctcggcaccgaacgccacgagtcccgtcgaattgacaaccagttgcgcggtcgttccggacgccagggcgacccgggtgaatcccgcttctacctgtcgctggaagatgacctgatgcgtctgttcaacacccagctggtggcccaggtcatggccaggggcatggaggaaggccagccgatcgaggccaagtccgtcaccaagggcgtgcgcaccgcgcagaaggccgtcgaatcccgtaactatgagattcgcaagaacgtgttgaagtatgacgacgtgatgaacaagcagcgcacggtcatctactccgagcgtcaggccgtgctcaagggcgaagacatccacaaggacatcctgcgtttcatttccgacaccgtcgagtcctacatcaagggtgccaacaagggatccgagaaaccgaaggactgggattgggagggcctgttcaaggcgctcaacaccgtgattcccaccaaggtcgacgaagacgaggtcaggaagatcgtcggcggcctcaagggtgcgaaagccgtcgaggccgtgcgcgacctgatcgtcgaggacgccaggcagcagtacggcgaaatggaggagaccatcggcgagaccggcttgcgcgatctcgaacgccgcgtggtgctcgccgtgctcgaccgcaagtggcgcgagcacctttacgagatggattacctcaaggacggcatcggcctgcgtggcatgggccagcgcgacccgctggtcgaataccagcgcgaaggctaccagatgtacaactccatgatcgaggccatcaaggaggagaccgtccagctgctgttccacatcgacatcaagcaggtcgccaccaccgacgatgccgttgacgaggtcgaggagaccgccgaaagcgccgacaccatcgccgtggcctccggccccgacgagaacggcgaatccgtggtcgaggccaccgagggcgaagtcgaagaagaggacgaggatgcggacgccaagcaggcgattgccgaatccgcagccgcctccgaggccggcgagtccacgctgcctgttgccggcccggctccggtcagccacgccgaaggcaaggtcccggtttccaagcgtccgaagagcgaagagctcaagacgccatgggccgacggccgcaccttccctggcaccggcaagaacgccccgtgcccgtgcggttccggccgcaagtacaagatgtgccacggccagaacgaagcgtgacggtgacaatgaatcggcattgaccatccgatggttcgacgaccgaacggatatacgccggggccggcgcccaatgatatgggtgccggccccggcgttattcacgatcggtatgatggtcctgcattatctggcggcgtccgccaacagtatcccggcgattgcatcggcgagtctcgcgtggccttccggattcatgtgcagtttatcgagatcgctgggttcggcgaccgtcgcggcgtcgaggaacagccacccattgcgttcggcggccttgcggtaccagcgagacagttcgtgcgagcgttcgacggcgctctgcgcgaaactggcatagggaactccgggtttgatgtggatgggggagacgagaaggattctcggcgccggcccgcaacccgcatagtcgtaatcgcgaatcgcgcgggcgaccatttcggcgcctgccgcgacgatgcgcgatgatgcattgaacatctctttgaggtcattggtacccagcatcacaatcgcgtaatcgagcggacagtgcgattgcaatacgatcggaagcgcctccaaaccggaacgatgcggttccaaagggttgtcgaacacggaggtgcgaccgctcataccctcttcgatgacgtgccatccatcccccaacagcgaggccagacgccccggccatcgcacgtcgagagggtgcctggttccgggatccgcgggatcggtgccgaaggtgttggagtcgccgaaacataatacgttcttcatagatgaatccttcttgaagacgggcagcaacgcacacatcatacatcgatcggcgccaagcgtttccgacgtttgccgtagcccgcccgggcgcacacggtgcgaggtgccggccgatggatgttcgtgatacggacgggaacacatgagggagcgccgagccgttacaattggcggcacaatgacaatgacacgggcgcccggaagcgtcgaggagggcatcatggccgatatcacatggaagtcgattctcaccaagctggtcgggggagaccatctcacagccggagaatcggagtggtttgtggacgatctgatgcagggcaacgcggaccccgccgccgtcggtgccgcgctcgccatgcaggagcagctgggtctgaccgccgaggaggttcgcggtgccgccaaagccatggttcgccatgccgtgccgctgcacgtgtccggtgagatcaccgacatcgtgggcaccggcggagacggattcgccaccgtgaacctgtccaccatgggttccgtggccgctgcagccgccggcgtgacaatcgtcaagcacggcaaccgcgcggcgtcttcgaagtgcggtgccgccgacgtgctcgaggacctcggattgccgttggatctgaagcccgaggcggtcgcggaagtcggcgacgaggtgggtattaccttcgcattcgcccgcaccttccacccggccatgcgtttcgtgggcccgatccgctccgcgttgggcatcccgtgcgtgttcaacgttttggggccgctgaccaatccggccaatcccgcacatgtggccgtcggatgcgccgaccggtcgatgagtccgatcatggccgccgtgtatgccagccgcggccagtcaggtctggtctacacctcgcatgagggtatggatgagctcgctcccaccggcccggtgagcgtatgggagattcgtgacggcagggtcgacgaatccgagttcgaccccaccgtggatctgggtttggaagccatcaccgtcgggcaactcaaaggtgggacgccggatacgaacgccaacgcatttagggaattcctggccgccaaggacgttccttcccgcaccaccgcgcttctgaacgccgcctccgcgatcgtggccgacggccatctggtcggtgccggcactctggcgtcgcgcttcgccgacgcataccggttggccgaggaggccgtcgactcaggcaaagccgaggcgctgttcaacaagtggatcgaaaccgcccagtccaagcgttagacccgcgcgccgtcgtcgtagtatccgccccggtcccctgggcggtctttgcggttgaggattcccgccaccagaccacccaagccgagaaggacgcccaatccgaagaggatgttgagcaacgggcccaatagcggaatcgaattcaaaccgggaacgagcaccatcaccatctcgcccacgagaccgacgacgagcagcgtcaccagcagcatcgtggacgtcctgaccggcccgaggtcggggttcgggggagtgaagccgccatcgtcatgcgcgtccatgacgttgtcgacgtccagccagctggagccggtgaaatcgcgcgggccagaacgtctgccaccacggccgggacggacgtcatcggtgaacgatccgatgtccagatcgttcacggaaagcagggcctccttctcgcgttttttggcctgcttctcgaactttctggcctggcgcgaggaagccacgtcgtgcaggtcggcctgatgttcggcttcgaatgcggcccacgccgaatccagatcgttcgtgccatgcgacccgtcgtcgccgtctccgggcgcccggggcgaaatgccgtgatcctgtccgttgcccggcgtgggggttggccgctttccgtcggcattgctattctggttctcagtcataactgtcactctaatcaggcgaccggccaatggctagttcgtctgcgggaggaatgccaagtgctctactggttcttcgtcaaaggtctcggccctattgctcgtcatcgtttgagccctgctgtcagcggactgaataacgtgcctcgagagggtggcgcgattatcgcagccaaccatctggcggtgatcgatgatgctttgattccgattacctgcccgcgcatggtgcacttcatgggcaaagccgaatacttcgagggcaagggattgaagggcaagttcaagaagtggtggttcacgtccgtgggcgtgttcccggttgatcgttccggtggcagcaagtcgcttggcgcactcgagcacgcacgcgagattatcgaggatgggcacctgttcggtatccacattgaaggcacgcgcagcccggacggtcgactgtacaagggacacaccggtgccgcacgacttgcgctcgagaccggttgcccgattgtgccgaccgccatcataggctcggacaagctgcagccgattggcacgtcgattcccaagaagggcaagaccaaggtgctgtatggcaagccgattgaggttgccaagaagccggtcgatgagattacacatgatgatttgcgctcgctgactgatcgtgtttccgccgcaatccagaaaatgagcggtcaggaattcgtgaacgaatacgcccagaaggtcaaggccgagctcaaggcccagcaggccgccgaagaagccgaataatgtgtgttggctcccctcagcgaggggagccagtcgattactctcacacgatggtgagggtgatgacggtggggttgccgttggcgtcgcgcaggcgaatcttgccgccgttggagaggtccgtatcgccgcttttcacggtacgtaccgtgccgaacaggccaccgagcaccttgtcggttttcaccttgaacccgagaccctcaagcgtcttggtcacggcgctttcctgtttgccgacaaggccggacggtatcgtcgccatctccggacccttggaaatcaccacgtccacgctatctccccacttcagctgggctccggcttcctgagacgcggaaatgacttgaccagcctcgaccttgtcatcgtactgttcggtgacattggccgtgagcttcaactcgccgagcgcggcttgcatctcatactgggtcttaccgacgatgtcaggcatggtcaccggcatcggtcccttgctcaaagtaatcgtcacctcatcgttgtgtttggccgtggtaccgggatcaggggaaatcgtcaacgccacaccctgcggcgtgtccatcgaatactcatccttcgactcgtcatgcttgacattgtcgaagccagctttcttgagcgcgttcaacggattcttgccattggccgaattcgcgtcgagaatatccttcgggatggtggccatccgcacgcccttggacaccaccaccgtaagctcctgattggctcgcttgcttatgtggctgttcacaacggccttggtcttgttcacggaagaagagatgatcttgccttccgccacgtcgtcgctgcattccttgtgcgtcttgtaggggatgccgagagccttcaacgtgctttcatacgtggcccaatccgcgccggtcagcgaacattcggtgcctgcattcgcatcgcaggtcacgtcatccggcttgggcacactccaatagctgcccggtcctgcaaaccaccaccagccggcggttccgccgattgcagccagtaccagcacgatcaccagtacgatgatgagcggttttttgctgcgctgcttctttggcccggtgccattggaagcgacgtccggctcatcggaaagggcaggcgctcgggtgaaggcatcgccggcctgaggcagcacttgtgtctcgctgccggactgtgccatgatttgcgtcttatggggagccgaagcatcggctggcgtcgacgaatcaagtgccgtggtgggggcgaccggaggagccggaggattgacgtctgcggcgccaccggtatcggcggtattgcttgcgacatcatcggccaaaaacgccggtacggacggctcgaacgttgctgcaccggcaggtacgccggtcagcggggcctgctcggcgatattgcctaccagcgctgcagcggtggcatcggtatgatcacctccgatgggttcggcatgcaaacggtattgccacgcctccagcggcaatttggcggccaactggctcaattcctcagctgctgccgcgccatcggcggggcgggcatccacctgacgcgcggtcagatgggcgatgaacgccgccacggacggatcaatgccctgacagaccgtggccacggacggcacgtcctcatgaacatgcttgaagacaagcgtcaccggattatcagaatcgaacggcactttgccggtcagcatctcccatgccatgatgcccacggaatacaggtcgccttgcgcggtggcctgattgttctcgatcatttcgggagccagataagcggcggtgcccaatagcatgccggtggagctcaatgtggcttggctggcggccttggccagaccgaaatcagtgatctgcacatggccgcgatcattgatcaaaatgttctcgggcttgatgtcacggtggaccacgccggcgcgatgcgcggaagccagaccatccagcgtttccgcgaccacgcgcagtgtctcacgcacggagaatgtgccttgggcgttcatctcatgccgcagattgacgccatgcacatattccatgaccagaaaatcaagtccattgaactcgccggtgtcatacacctgaacgatgtgcgggttggcgatggacgcggccgaattggcttcgcggcggaaccgttcgacgaactgctcccgatgcgggcctttggcgagttgtgtgtgcatgaccttaatcgccacggtgcgccccagacgctcatcgatggcctcatacacggtggccataccaccctcggcgatattgcgcacgatgcggtagcgtccctcaatcatctgtgcgggctcgttctcactcatgttgtatcgtacggttcctttaatcacgactaaacatgttcagtgtacatggccccggttacgcggccggagcatcagcgcatagctttcacgggttttcaccggtgttcatggtctcatggtccggcggctcgcattgtggactatcgcaaggatttggggacgaatcgcgcacaagcctcggtcagacggcgttgcgcttcggaattcagctcaagaccggcaatcgccttacgggactcaccccatagggcagcgatgcgctcgcgggatcgatcaagagcaccggtcgacgtgaacagttcaatggtgcgggccacctggttgtcattgcgacaatcttcttcgaagatggcaatcagatcggccttatccgccgtatctgccgcagacagagcatcagccaacagcactgtgcgtttgccttctcggatgtctccgccaactggttttccggtattgcggcttgatccgacgacatccaacaggtcatccgccagttggaacgccagtccgagcggccggccgacggccaacgcgcaatgcctggcctgatccgggctctctcctgcggccagcagtgcaagcagcagtggagcgatggtggtgtaactggctgtcttccagcggaatacattcaatgaggcgttcgccagagcttcgggattagacagtggggtcatctcgacggccaagtccagtacctggccgatttccacctcacgctgcatggtaagaaacgcctcgttcagggcatcggtgttgggaagacggctggcggaccggcgtgtgatttcaatgcaggcagtggccagaatgtcgccgagcatcaggcccaagccacggcctatggcaccgctgtgtacggcctgttccaaggcacgatgtgcggaaggcctgccccggcgcagatcggattcgtcaatgatgtcgtcatgcaccagtgcggccgtctgaaacacttcaatggcgcaggccaggtcgatcatggcgtcacgccgatcaggcgtcacgtcgccggcaagaatatcgaaggcgtccaatgcgagcagcgcacgcagtcgtttgcctccttggctggaggaggcggcttggtccacaacctgttccatcaccggtttcagggcgtcggcaacctcgtcggtggcgggggcggcagtcagttcccgcaccaactgaatgatgcgtggctcgatgatttcgcggttgttagcagttgtgcacatgcctaataacttatccacagggtttgaagaacacaagaacgttgggaatcaagggttttgaagctagaaccacaatggtcgttttttcctgcgtcatacggcgttttcagccatagtgggcacacaccccctcggcgcatgagctatccggctcggcgcgcaccacaacaccaatagattgcacaccattagtcaaggaggacatgatgaacaacaacacgccgcacaagccgcgtaagagccgacacgccaaacggcacgccgccgagcagacggagccctttggctttgacgagttggagacgagatcacaggaatttcgcaatgatcgccgacttcgaggcgcgcaacaggctaatgccgactgggtggccgaaccattggacgaatggctgtcttgtctcgatgccgggaacaccgacctaggccgagagacgatggccgcgtttgcggtgggcatgcgcgagaccttatcgattcgtgatacgctgattctctcgttggttattgatgaaagccgttgccccaagtcatggctcatggaattcgcggcgcgaccgcatctggcacgtacgagaacacgaatgggcgagctgctgacctgcgcattcgaggatgaaggcatgatgccggataaggagcgttgccatgccggcatcggtatgttgctcgatatcgcggaagcctcaccggtgccgtactgcatacagccattggccgtgatcgcttacaccttatggtggctgggcgatccacgagcaatggtgttcgccttgcgatgcctgctgctcgatgaggattgttcgctggcggcgatgatattctcagccgccgatcgaggcgtggcgccagcatggtgctcgggctgagtgaacagaaacggcggatctccgaggttttacgcgcgatgcgcggaaggaaagcgtgtggtgatcggcaacacgtcgggcaacgatgtgggaataatcgtccgtggagggtggtttactcacatagttgacgatttgcccttgccagaagtgtgcccatgtggtatatgcgcttcacggcgagagatcagaaggagcagttttggccacgaaggaaacgacggcaaccaagcagacagccgagtccagcgaggagaccgagaagaaggccagctctacgaccaccgcacgcaagacttccgccaagaagtccaagtccgcagagccctcggaaaagaccacgcgcaagtccgccgcgaagaaaaccgcgaagaaggccaaggacgatgaactcgtcaaagacgaggacactcaggtcgatgacgggcttgatgacgatgccgaggtcaacgacgacgatttggacgttgacgatctcgacgaggatcttgacgacgttgacgaagacgatgccgacgacgatgtggaagacgacgaggacgaggacgaggaagaagccaagtccacggcacccgagcagcccaaggaaaagggtgcctacgtggtctccgacacggatgatgaggaagaaaacatcatcccttcgggcaatccgaagcgtcgtgtgattgcggccggcgcaaccgccgacccggtcaaggactacctgaagcagatcggccgcgtgagcctgctgaacgccgagcaggaagtcgacctgtccgagcgcatcgaggccggcctgtacgcccagcacctgctcgacaccgaaagcgaaggcatggagttcaagcgcaagcgtgaactcaagtgggccgccgccgacggcaagaaggctaaggaccatctgctggaagccaacctacgacttgtggtctcgctcgccaagcgctacacgggtcgcggcatgctcttccttgatttgatccaggaaggcaaccttggtctgattcgtgccgtcgagaagttcgactggaagaagggcttcaagttctccacctacgccacgtggtggattcgtcaggccatcacccgtgccatggccgatcaagcccgcaccattcgcgtgcctgtgcacatggttgaagtgatcaacaagctgtcccgtgtacagcgccagatgctgcaggatctggggcgtgaacctacgccggacgagctggcccgcgagctggacatgccggttgagaaggtgcaggaagtgcagaagtacgggcgcgagccgatttccctgcacaccccgcttggcgaggatggcgattccgagttcggtgacctcattgaggataccgacgccatcgctccgtccgacgccgtggccttctccctgctgcaggaacagttcaagcaggtgctggaaaccctgtctccgcgtgaggccggcgtcatcaagatgcgctatggcctggaagacggccagccgaagacgctggacgacatcggccgtgtgtatggcgtgacccgtgaacgaatccgtcagatcgagtccaagaccatgtccaagctgcgccacccgtcccgttcgcagaccctgcgcgacttcctggatcaatgatcatctggctcccctctgtgaggggagccaagcatttgaagagaaaaataggactgtatgcccaaagaagaatacggcgccaaggacctagctgttcttgagggcttggatgcggtacgcaagcgtccgggcatgtacatcggcaccaccgactcgcaggggcttatgcactgcttgtgggagatcatcgacaactccgtggatgaggccttggccggcttctgcaacgatatcgtagtcaccttgcacaccgacggttccgtggaagttgcggacaatggccgaggcattccggtggataaggaaccgaaaaccggcctgtccggcgtggaggtcgtactgaccaaactgcacgccggtgccaagttcggcaattcgtcttataacgccgtcggtggcctgcacggcgtgggctcctccgtggtcaatgccctgagctcccgactggacgtcgaagtggatcgtgacggcaagacgcaccacatgaccttccaccaaggtcaccctggcgtatacacggatgcagacccggccaatccgtctcccgattccccgttcaagcgcactcgcaagaaccgacccaccgagctggaaatcatcggcaaggtatctcccaaaaccactggtacccgtattcgctactggtacgatccggagatcttcaacaaaaccgccgagttctcatacgaacagctcatcgaccgcgtgcgtcagaccagcttcctggtgcccggcctcaaaatcaccatcatcgacgaaaacgtacccgaaacggcgtcgactgacaccgtcgaggccgctgataccgccacagtcgaacccgtgcaagagcaggtgccggctttggacgtctcgtccaacgatgccgaactcttcgacgactccgccgaagcccaagtcgacagtaccgggaacctgaccgaggagaatttctcactgacggccagcgaccaggtcgtcgacggcgcgttcggcgaacagcccgcgcacccgcgcgtcgtggaattcctgcacaccggcggcgtcaaggacttcgtcgacttcctgtccaaaggcgagccgatctccgacatctggcgcatccaaggcgagggcacctataaggaggagacccaggccgtgggggagggcggcgaactgcacgcccaggaaatcgaacgcacctgcggcttggacatcgccctgcgatgggtcaacggctatgacaccacaatcatgagcttcgtgaacatcgtggagacgcccggcggcggtactcacgtggacggtttcatgaacgccatcaccaagcagattcgcaaggcggtggaagacaacgcccgcaagctcaaggtgaacatgaaggactccgccatgaaggtggagcgcgacgatatccaagccggactcgtggccgtggtcaccgcacgcgtggccgaaccgcagttccaaggccagaccaaggatgtactcggcaccgcgcaggtcaagccgatcgtcacccggctcaccgacaagcaattcggtgagatgatcaccggctccaagcgcgggtacaaggaacaatccggccgcgtgctggagaaaatcgtcggcgaaatgcacgcacgcatccagtcgcgcaaggccaaggaggtcacgcgccgcaagaacgcgctcgagtccgcctcgatgccggccaaactctccgactgccagccgggcaatgacgacgtggccgaactgttcatcgtcgagggtgattccgcactcggtaccgccaaggccgcacgcaacgccggtttccaggcactgctgccgattcgaggcaagatcctgaacgtgcagaaggcgtcgatcacgcagatgctctccaacaaggagtgcgcagccatcatccaggtggtgggcgccggctccggccagagctttgacatcgaacagtcgcgctaccacaagatcatcatgatgaccgatgccgatgtggatggtgctcatatccgtatcctgttgctgacgctgttctaccgatacatgcgtccgctcatcgaacacggctacgtgtatgccgcagtgccgccgctgcaccgcatcgcgttgaccggctcgcacaagggcgaatacatctacacgtattccgatgacgagctggccggcaaactggccgacctcgacaagaagcacatcggatacaacgacgacatccagcgatacaagggtctgggcgagatggacgccgaccagctggcggacaccaccatggacccgcgcacgcgcatgctgcgccgcatccgtatggaggacgccgcccaggcatccgagattttcagcctgctgatgggcgacgatgtgccgccgcgcaagcagttcatcgtcgacaacgccgacgatttcgatcgctccaagatcgatacctgatcgaagacgtcgctgataataacatcgtgcttaccgagaatttccgtaattggcgtttgaggtgagcacgttgtcatatgttttatgcgtgttgcccatgagtcattcgatagactgatgacatcgttatcacaaccggtgccgcactgtgaatgggagatggaacatggccagtctgttgcttgccgtcatctatgtggcgtttatcagtctggggttgccggattcgctactcgggtccgcatggcccaccatgagccagaatctgaacgtgccggtggcgtgggctggcggcatctccgcggtgatttccatgttcacgattgtttcggcgctgctttcggatcgaatgacattgaaattcggggccggtaaggtcaccgccgtttcggtggcgttgactgcggcggccttggccggtttctccattgccccgaattactgggtgctgttggccatcgccatgccgtacggccttggcgcgggcggcgtggatgcggcgctcaataactacgtagccattcactacgaaagccggcatatgagctggctgcactgcatgtggggcgtcggcgcatcggtcggcccctatatcatgggctatgcgctctctcaaggccaaggctggccgtggggctatcggtacatcgcgattctgcaggtgatgctgaccgtcattctggtgctgagcctgccgctgtggaagaagcgtggcgcaactgcggccggcgaatcgaccgatggtgctgcatcatctgatggcaatgccgagggatctggtaatgctgaaggggtgtctgttgctgaacgcaaaccgctcggcgtggccggcgtgctcgccattcgcggtgccaaggaaatccttgtgatgttcttctgctactgcgccatcgaatccacggcgggcctgtgggcctccagctatatggtgatgcacggtggcatcgacaagatcaccgccgccagctgggccagtctattctacgtaggcatcactgtgggtcgtgcgctttccggcttcctgaccatgcgattcaaggacccgatcatgattcgcctcggccaagtgctggtgctcgccggcatactcaccatgttcgtgccattgcctcaccaccttggcatggtcgttgggctggtggtcatcggcttcgggtgcgcgccgatttatccgtgcgtcatccactcgacgccggcctacttcggcgaagacaaatcgcaggccatcgtcggcgtgcagatggcctgcgcctatgtgggctcactgctcatgccgccactgttcggcatcatcgcgcaatatgtgacaatcagtctctacccgtggtatttgctggtgctcttggtgctgatggtggccatgcacgagcgtcttcgcacgttgcgcggctgatcatgtgcggcgcaattgggcccgccgcctactatgcttggagcccatggtgataagtgaagaagaacatgaacagatgcccgagcccgtacgggaacgattggaagcgctgaaggatgcgccgggttcggtaatcgtggtcggctcgatgaacgccgattacaccgtgaccactaaacgactgcccaagccaggtgaaaccgtcaatggtggtgccatgaaagtgctgccgggcggcaagggcgcgaatcaggcgtctgccgccgctcgtctcggtgtcaatgtccagttgctgggcgcggtgggcgaggactccaacgcggacttcctattaggcaagctggatgaggccggcgtcgacaccgccgatatcctgcacgttgaaggccccagcggcaccacggtaatcaccgtgagcgctgagggcgagaacaccatcatctattcgccgggttccaatgccaaggcaagtgccggctatgtgcaatcacatcgcacgaccatcgccgaatgcgcggtattgggactgtgtttggagagcccgatttccaccgttatcgccgccgcgcagaccgcgcatgacgctggcgtgaccgtgctgctcaacgactcgccatttatggacgaactgcctcacgaactggtggaagccacggatattctgctggtcaaccagcatgaagtggctcaactgctgggtctaccggacggcgatgtggaatcactcgactggtatgaggtcgccgaacgattcaccgattacggattcgaccgggcgatagtgacgcttggtgcgtcgggattggtggtgatcgagaacggacgttggcatcgcgtatccgccgcgaaagtcaatgcggtggacaccaccggttgcggcgactcgttcatggggaccgtgctggctggcttggccgctggtcatacgctgctgcaatccgcgcaaatcggctcctatgtctccgcctatgcggccaccaagcttggtgcccaaagcgcctacggcactgccgaagaagtcatcgcctacttcagctgacctataatcgtacatatgtacgaaagcctgagcctgttttccgaacccaccaaggtgtggttcgagcatgccttcggtcagccgaccgaggcacaggctcaagcatggccggcaatccattccggctgcaatgtcttggtcatcgcccctaccggctccggcaaaacattggccgcgtttctctcagccatcgaccgattgatgaccgtgccacgtacgcggcgtgccggtgtgcgtgtgctgtatatctcgccgttaaaggcgctcgcggtcgatgtggccaagaacctagaacagcctttggagggcattgccgcacaatgcgaggcgcaagggctgcccgtgccgaagatcgcggtcgccactcgttcaggcgacaccaccgcacaggagcggcggcgcatagcctcccatccaccggatatcctcgttaccacgccagaatcgttgtacttgttgctcacttcgaaagcagggcggattctcggcactgtcgatacggtgatcgtcgatgagattcatgcagtagcgggcaccaagcgcggcgcacatttggcggtaagccttgaacggctggagaaccttatctcagcatcgcgcaagcgagatgcgatcgttgcagatgctgatgagggcggtgatgccgccgttgatgctggccgcggcgatcgtcatatgcagcgcattggtctatccgctacggtgaatccgcctgaaaaggcggcgcgattcctgggcggcgggcaaccggttaccatcgtgaatcccggtgggcggcctgcaatggatttgcgcatgattgagccgttggaaaacatgcgtgatttgcagtccgtgaatgccaagcagcgtgtcggtggcgtggatgctgaacggtccgctccgcatatcagcggtgtcacgccggccatgcagcgacttgccgaacgcaggggcattgtgccggtggatgatagagatgtttcttccacttctggggacgattctgatgcgagtgatgcgttcgattcctccgcgttggttggagcggcgggcgaccgtacctccggttccatttggcccgtggtggaacgcagcattttggatgagattctcgcgcaccgcactacattggtcttcgtcaattcgcgtggtgtggccgaaaagctcaccgcgcgcctcaatgatctctatgcgcagacccggcatggcaccaatcccgacactgtgcgtgatctgggctctccggaaggccgcgaagggttctccacacattacgatgctgtggtcggctccaccaccatgcttgtcggctcacatgagggcgatgatgtcatcgccatggctcatcatgggtcggtctccaaagatcgccgcaaaatgattgaggaacggcttaagcgtggtgaattgcgctgcgtggtggccacctccagtttggagcttggcattgatatgggttcggtcgacttggtgattcaagtcgatacgccattgtcggtctcctccggattgcagcgtgtaggccgtgccgatcatcaggtcggtggcgtctctcacgcattgctctacccgctcacccgtcagcagattgtcactggggccgcaagtctggaagccatgattgccggcgatatagaaccattggccgtgccgcgcaatccgctcgatattcttgcccagcagaccgtggccgctgccgcgatgcacgatttgaacgctgatgactggtatgccacggtgcgccgtgctgcgccgtttgccgaactgccacgtgacatgttcgatgcggcaatcggcatgatgtccggcgaatacaacagcgaggaattctcggccttccggccgcgactggtatggaatcaggataatggcctgatttccacccgtcccggttcgcagaaagtggccgttacctctggcggtacgattcccgatcgagggctgtacaccgtggtcctgcctgaggcggacgccggcaaaggccagcgtcgcgtcggcgagttggatgaggagatggtctacgaatcgcgcgtgggcgatgtcattacgctcggcacctccacatggcagattcaggagatcacccgtgatcgtgtggtcgtgactccggctccgggccgcaccgcccgtctgccgttctggcacggtgaaggcgctggccgtgactacggtttcagccgtaccatagcccgcttcacccgagaaatcgccgccggattagacgtgaagcggactgaggggaggtctgccacagaaggtccagctgtcccaaccttcatcccaacaatcctcactcgcctccaccgagatggcctagaccccaatgccatcaccaacctggcccgcctgctctccgagcaacaagccatcaccggcacagttcccagcgaccaaaccctcatcgtggaacggacccgcgatgaagacggcggatggcgcatcgtgctgttaagcccctttggccgccgcgttcacgaaccgtggtccatggccatcagccgcagactgcgccaacgctacggtttcgatgggcaggtatatgccgccgacgacggtatcgtcattcagctaccggacggtgacggacatattcctgttcaagacctgttccttttcgacccagaagacctcaaagcagatgtagaacgtcaagtgggcgagtccgtgctattcgccgcacgattccgcgaatgcgccacccgatcactgttcatgccgcgatccgacccgggccgtcgcgtgcccctatggcagcagcgactgcgcgccgcacagctcctgcaatccgcacgcatggccaagaacttcccgctgctgctggaaaccgcgcgcgaatgtttgcaagacgtatacgacatgcctgccctgaacgaggtgatgaccggattgcaatccggcatcattaccgtgaaggacgtggagaccgaatcgccatcgcctttcgccgagaacattctctttggcttcgtcggcgtggtgatgtaccagtatgaccaacctcaggccgagcgcagcgcgcgactgttgtctctcgatccgcacgtgctcgaacgcttgctcggcaccaccgacatggcacaagtgctgaatccggacgtgattcgcgaagtcgaacaggaactgggggagcgcactttctggaatgaacttgccgacgatgatgtgactggtcgcgtgacccgttacgccaaaacccatggtcctttcaccgccgatcagctcatagccgacctacacctcgatgctacggatgccgtgcacactctggatgtgctggctgccaaaggcgagttgctgcaaggccactttgtagatgatgacgagcaaggccaacagtggctccataaggacgtattccgtcgcattcggtctcgctcattggccaaggcgcgtaaagcagtcaagccagtagaaccagaggcgttccagatgtttcttgtcgaccgacaaggtatcgggccggtcggcggcgaacgatatgaaggtgctgacgggctcatgcgcgttatcgagcagctggagggcatatcactgcccactgcactctgggagtcggcggtattccccgcacgagtacgagactaccaacctgcattgctggatgagttgctgaccagcggcgatgtggtctgggtcggctcaaaaaccgggggaaccagtgcgatggaccccggtgaggttgctttctatccggcggattcaatattgctcagcgatgtggaacatggtacgacatcgaacgcctcagacgccaccataccggaagcgattctggccgcactggactcagggggagcgttccatgcccgtcaactgatggatgccgccaaacgtgtgtggaatgaggccgcggagccggacatcaatccaaacaccggcgaaatcattccgcaagagtggagcgaacagcagttcaaggatgccttgtggagcttggtctggcaaggtaaggtcaccaattccagcttcgcgccggtgcgtgcattaaccgcaggcgcagcaagcccgcgtaaatccactgcatcacgtcgtcgtgggcgtgtcgctccgattcgccgagccacgacggatatgacgttaggaggtttgtggtctgccgtgatcgggcaagctgaaggcgaagacactgaccagaccgaacgggcactcgcactggtcgagacgttgctggacaggtatggcgtcatcgcacagccggtgattgacaaggataatattccgggtggctactcagcgttgtatccggtattgaagcgcatggaggagcatggtcgactggtacgaggcatgttcgtccgtggtttcggtgcggcccaatttgccgagcacgacaccgtggatgcgttgcgtcatccgtcagagcatcgcggccagtccgtggtggcattgagtgtgctcgaccccgcaaatctcagtggctccgccatcgcgtggccggacgcgcctgccggtgcgggtaaaccggcacgccgtatcggagccatggtcgtgctcaatgcgcaaggcacgctactatacgcggctgccaaagccaagcacctgacggcgttcgatcaatcggtcgaccatgaacccgctgccaacgattccgacgaacagatgcgcaaagccgccacagaactggcctacgccctcaaacgcaatggcaccggttccgtgacgttcagcgacatcaatggcgaacccctcaacgcgcgtcatcccttcgcccgcatcctccaccagtccggcttcacccccgttccccgaggcatgcggctgtactgattgagcccagctatcgaatgcggtagttggagccgcgttgggtcatgatgaggccggcgcgggtgagcttcttatccagtgtgtagagggcgttcttgaggagcccttgttgctcgaagaatgggccaccgacgagcttggccaattcgctggtgttgacgaaccgaccatcagccttgaccagtgcttcaagcaaactgtattccagacgggacagtgagattgcgctgtgcgtggatgcgtagtaggccttgtgattcgtggtgtccaacgtgagattgccacgaatgatcatggcaggggagtcggtggcaagcgagccgacgtatgagagcagttcgccatcggagaatggtttgctcagcgcggcatccgggcgtcgtacgttagcttgtgcgctagcggcggcattgtccgagcgttgttcggcttcggcatctgagttgtttgcgcgtgaatccgcgctgaaggagctgtagggcgtctcttcgataggggcgtactcgtcaggcagcgctcgccagcggctgccttcgccaatggttttgctgagtggcgtcgaagtcagcagcagaatcttgacggaggcacgggcattgcgtagggattcgatgagctgcttggtggaactgccgagcagggattcatcaagaatcactgcgtcaaatgactccttggcgacagcggcgagcgcgatactaccggtgcttgccaaagacacttcatgacgaccggcaagtagggcaccacgaatggcgcgggccaacggttcattggatacggcaaccagtagtctcatcgccacctccttgatgcttagtgtaggtcgggtttagggtctcttctctattgtttggctcactgtcgttcgttcctcgcctacaaacaccccactggggtgtttgctttacggctcggcccatcagagggagcttaattgaggttacgcaatgaaggcgatgggggaggcgaggtccactccggaaccgtctcggcgcatatcgggcttgggaagctcgacaggggagcctgcggatgtggaagcgtgcaacgggtagaggcccacccaggcaagaatcagcgtgttctggcccttcaggaagcgctgggaacgcacgccgccggtagcacgacccttggtggggtacatttccagcggagtgaccttcgccgcgccgttttcggtgccgggcagtgcatcggaatcgccggccacggtgagcaccactgcaccggatccggaagtcaagccgttctcgccctcttcataggtccatgccaccttgccggcgggaaccacgttgaaggccgccacacgggcaccctcggccagcttgatgccggccataccgcccgcggtacgaccctgcgggcgcacgttcttcgcctcaaaggtcagtagcgaggaatcggaggagatgaacaccagacggtcgtcatcctcggccacggcggcgaataccacttcatcgccatctttcagatcaatgacgggccaggaatccatggtggtgggtgcctcacgattccaacgcttgatgacaccgttacgggtaccgatagccagcgacggcaacggcttggcctcggcggccccgccatcctcgctctcatccttggcactggccttgccggacgtcggctgctccatggcaatcgccgtaatcacacgctcaccacgaatcggatcggtggattcggtcatgccgatcagttcgtcggcctgaactcctcccttcagcgacaatgtggcggcagcgggcaaggcaggcaaatcaaccacatgcgcgagcaccaggcggccggccgacgtgaccagcccgtacgtggcgcgcgtggaagtctcgaagattgtggtgatctgatcgtctcgcagacgttcatcggatgcggaccgtgcattgaacacgtccatcgcgcttggcgtggtacgggcaatcaaaccggtagcgctcatcatcaccacgcacggctcgtcctcgatcttcaaggctccggtcagcgcggactgttcgccggtcttcttggctgctgctgcggctgcggccacatcggcttcggcggaggaaatcgtggtggcggccttcaccgcttcgagcgcggacttggacacgcccgaagccccggcaccctgcgccatgaccggcgtcaacgtgccatccgggtcggcatccagcagcacggtacggcgcggcgagccccacttggcgaccgcttcgtccatctcgtcggtgaccacctggtcgagcgtctcggcggaggccaggatccgggtcagctcctcgatacgcttcttcagatcatcgcgttcggcctcaagctcgatacggttcatcttggtcagtcggcgcagacgcaggtcgaggatgtactgagcctggacctcgtccaaatcgaaaacgaccatcaaacggctcttcgcggcatccgcatcatccgaggtgcggattacctgaatcacctcgtcgatgtccagcatggccagcagcaggccctcgaccaggtgcaggcgttccagcgccttcttcttgcgatattcactgcggcggcgaatcaccacacggcggtggtccacccacacctgaagcatctccttcagacccatcgtgtgcgggcggccctccaccaacgccacgttgtttatggcaaagttgtcttgcaacggtgtgtgcttgaacaactgcaccagaaccgcatgcgggtcgaaaccagtcttgatttcgatgacgatacgcgtgccgttatgacgatcggtcagatcgaacgcgccggaaatcccctccagcttgcggttcttcacaccgtcggaaatacgttcgattaccttctctgggcccaccatgtacggcagctcggtgaccacgatggcctgcttgcgggccgtgacatgctcgatatgcgtggcggcgcgcgtggtgagcgtgccacggccgttggcataggcctcacggatgccgtcgcggccgatgatcgtgccgccggtgggccagtcggggccgggcacgtaacgcatcagttgttccagggtggcgtccgaatgcgccatgaggaacttggcggcgtttaccacctcgcccagattgtgggtggccaggttcgtggccatgcccacggcgatgcccgagccgccgttgaccagcagatttgggatggcggccggcagcacggtcggttccttgagcttgttgtcatagttcggcgtgaagtcgacggtgtcctcatcgatatccgcgttcatgccgagagccgccgggccaagcctggcctcggtgtaacgggaggccgcagggccgtcatccagcgagccgaagttgccgtggccgtctaccagcggcagacgcatcgcgaacggctgtgccaaacgcaccatggcctcgtagatcgcggaatcaccgtgcgggtggagcttgcccatcacctcgcccaccacgcgggcggacttcatatacgggcggtcgggagtcaggttcatctcgcccatctggtagacgatgcggcgctgcaccggcttcaagccatcgcgcgcatcgggcagtgcgcgtgcgtaaatcaccgaatacgcatactcgaggaaggacttgctcatctcctcgttcagcggcgtctcgacgatatgctccttgaccgtgcgcggatcgtaggtttgcgcggacggtttgcggtgtgatgccatgaaactccctttcgaacgcccccatattagcgggagggcgcgaaacagtgcgcagagaacggttctcgataacaactgtgcgctggtttcgatgcgccaatcgcacatgtctgccgataaaacggcgtgattccagtgtttcagtcgatgtgcgtttgtttgattatgtgcgttggagcgcacagttgttattgagaaccgttctctgcgcactgagccaaggggaggggtgctacttgaatgggcaactatgagtgttgagacgccggatatggacgagttgctgcggctggtgcccactgtgggctatggggatgacgtcccggccgatcggcgtgggggagcgctgcacctgtccgccgtgctgcccgccttgtccgccgccatcggacatccgactcccaccaaggtccacgccgatcccaaggcctgccagcgcgcgttgggactgcccgacgccgaatcggccatcatggtgctcgtggacggcctcggcttctggaacctcgccatgcgcctcggccacgcgccctatctgcgttcgctgatgaacgaaagcgccaatcagcggcccgtcgccacctgcgctccaagcaccactgtggcggccatggccgcattcggtaccggaacctgcccgggactgaccgcaatggcgggctatacgcagctcgaacccgccagccataagctcatccaactcatccagttcaaagacgcgctggcaaccagaccagccaatccgcacattcctgtgccgcccatggtcgatccgttcgacctgcagcgcgaggagacggtgttcgagaaacttgcggctcaagaggtgcgcgtcacgagctcggggttgcccaagttctccagatcaccattgaccgaagccgcattgcgaggcaccgactatcaaggcaacgtcaccccacgtgatcgtgtgctggccgcctcacgcgcctcacgcacccccggcctgacctacctgtacatccgtgacgccgacaaagtcggccacaattacgggtgggattccgaacactgggtggccgcattcgaacatatcgacgcccagctcgcgctcctgaaacgcagcgcacccaaaggcacgctgatcgtcatcgtggccgaccacggcatggtgcaaaccgacatggaccagcggattgacatcgccgttgaaccgcagctcacccgaggcgtgtcactggtcgggggagagccgcgctcgctgatgctgtatgccgagccggatgaacgacctgaggatatagcttgccggtggcgcgattacctgcaagaccgagccttggtgcggaccagggatgaggccatcgcggacggattgtttggaccggtctgcgagcgagtccggccgatgctcggcgatgtggtcgtgcaggcagcgggagccgtgaccctcgtcgattcgcgtacgcaaggagacaaagccactcacctgccgagcgtgcatggctcccaaacggcattggaaatggatattccctgcctgatcgatatggcctgattcggaaattcagtctccgaacagaatctcgtcccagcttggtacggccgaacgtcctgatttacgcttggccggtttggctggtgcctcgtgtttggtggcggcggattcggccgcccgctcctgctcggtggctaccagctgtgcatcggggccacgccgtatggtcttgtccgaaatattgtcagaaccctgctctggtgccgtggcaggcgattgctgcaatcctgcggcagatgacgaaacagagctggcggtctgcgaagagaccgggctgggggccgtagcgtcatgagcctggttcgtggccggtgagatggacgtggataggtccaccgggggcatggaacctgtggcagtgacggagggccggattgcggcaggccgtgcggccggaatcgaaggcgtaggtgcagcccaagcagacacggcgcgctcgatacgcgcggaacgtacggagtcgccgggcagttcaggaatcgtcggcttgagtttggaatccgtggctgattccggattctgttcgccgagcagttttcgagcggcattgttcaggctcattacggaattgtcgtgcatattccacgtccattcggcatggatctcacggcccgcggaagtgaatatcgccacgatgcgccaaggctcaagtccgcgtcgggtggatttccaggtcactgattccatgccgattcccgcagaggccagcgtgcgttccaccagttcgctgatggtgcgcaccctgctgtctttgggtgccgccacggcaaggaactgttcgatggcatactgtttctcggtttccacagccatggagaaacgacgtaccagcgtttcgctcagatgatatttctccgcgacacgggccggatcggcaccggcgcgaatcagcgactgtatctgggaaatcggcaaagtggactgctgatgcggctggggagcctgtctcatctcgcttctgacctgcttggcctcaagaatcgcccgttcgagcgtgtcgtccacgctcacagccatttccccgccgccaatggagaatacgaggtcccccgtcttgctcacgcgtacgaaacgggctttttcaagccgatcatctggcatattcgcaccactttccgtcgcaaagacattacttcttttaagtatgccccacgtgtcgaactttacgagtatttcaaatcgtgtatcctatgggcgagtacggcgctgaccgtgctatatatatcgacttacgaaccaaagacgacgaaaggaccatgatggctcaggattatgattccccccgcaataaggatgaggacgaggaatcgctgcaggcgctggggaagtcctcgcagaacgcctcgggcgacatcgacgacgatgagaacgccatcgccgaagactacgaactgccgggcgccgatttgagcaacgaggattcctcggtgaccgtcatccccatgcagggtgacgagttcgtctgctcgcagtgcttcctggtcaagcatcgtagccagctcgcctacacggacgaggatgggcagccggtgtgtgaggagtgcgccgcctgatggcgttcgacgagacctacaacgagcccgaatccaccgaggtcctggtcaagagcctcgaccccgaacacccggccctgctccggtacgcgcatgcgggcgatgccggcgccgatctcatcaccaccgtcgacgtgaccctcaagcccttcgagcgggcattggtgcccaccggcgtggccatcgccctgcctgcgggttacgtggctttggtgcacccgcgttcggggctggcggccaagcagggcgtcaccgtgctcaacgcgcctggcaccgttgatgcaggctatcgtggcgagatcaaggtgccgctgatcaacctcgatccgaagcacaccgccgtcttccatccgggcgatcgcatcgctcaattggtgattcagcggtatgttgaggctcggttcatcccggccgagacactgcccggatccgatcgcgccgaacgcgggttcggttcgacgggagtggcgtcctgaccggattaggccggttgaatgaccaaggtgatgacggcaacaacggttgcggaaccaatgatggcgggcgggtgcgtgcgcatggcactggttcgcggttacaatgaacttcatgacgagggaggtgactggcatggcagagattgatggcgagcagtacgccgcccgtaaactgggttgcgagatcagcgccgatccgctcaatccgctggaaccaatcaagaaagtgtgcaagtcccaccatcccggtgaggatttgtccatcctcgaccgcgcgtaccggcgcgccgtcatccagcattgcgcgcaacggcgcaagtcgggcgaaccatacatcatccatccgttggccgtttcccagattctcgcggatctgggcatggggccgattgtggtggcggccggtctgctgcatgacacggtggaggacaccgactacacgttggatcaatgccgcgccgaattcggcgacaccgtggccggtctggtcgatggcgtcaccaagctcagccagcttgaagtgggcgactccgcccaagccgaaaccattcgcaaactcgtggtggccatgagccgcgacgtgcgcaccctggtggtcaagctcgccgaccgcgtacacaacgcccgcacctggcgttacgtgaaaaccacgtcggcgcagaggaaggcgcgcgaaaccctcgacgtatacgcccctttggccaatcgtctcggtatgaacgccatcaagacggagcttgaggaactgagcttcaaagtgctctatccgaagatctataacgagatcgttgtgctggtggcccgccgggccggtcagcgcgacgtgtatctggcgcagattctggcggagatcaacgaggatctcgatgagcagaacatcaaggcatacgtcaccggccgcccgaaggactacttctcgatttatcagaagatgatcgtgcgcgggcatgatttcgcgaacatctacgatctggtcggcgtgcgcatcatcgtcgacacgattcaggattgctatgcggcgctcggtgccgtgcatgcgcggtggaacccggttcccggccggttcaaggactacatcgccatgccgaagctcaacatgtaccagtcgctgcacaccacggtggtgggtccgggcggcaagccggtggaaatccagattcgcacctgggacatgcaccgccgcgccgagttcggcatcgccgcgcactggaaatacaaggaaaacggtcaggccgggcgtgccttgagctctccggacaagtccgaccgcaggcgtgacgagaagaaccaggagctttccgaagccgacaatctcaaatggattcagcagcttgccgattggaccagcgaaacccccgactccaatgagtttctggggtcgctcaaggaggatctcggctcgtccgaagtctacgtgttcacgccgaaaggcaagatcgtatccctgcccgctcatgccacgcccgtcgacttcgcatatgccgtgcacaccgaagtgggtcatcgcacgatgggcgcacgtgtcaacggacgtctggtgccgcttgacaccacgctcgacaatggggacaccgtcgagattctgacgtccaagtccgatacggccgggccttcgcgcgactggctgagtttcgtcaagagtccgaaggcgcgcaataagattcgtcaatggttctccaaggaacgccgcactgaggccatcgaggagggtcgcgacgagctgactcgggcgatgcgcaaacgcaacctgccggtcaacacgctgttgaccccggaagcgttggtgggtgtggccgacgatctcaacttcccgaacgcggacgccgtgttcgcggccatcggggacggtcaggtctccacgcagaacgtcatttcgcatctggtcaaggacgcgggtgccgacgaggtcgatgaagaggtcgagcaggaggttctgccgctcaagcccgtggagcgcaagacttccagcagctccaccggggtatccgtcaagggcgtgggcgatgtgtggatcaaactcgcccgttgttgcatgccggtgcccggtgatgacatcatcggattcatcacccgcaaccagggtgtgtccgtgcatcgcaccgattgtcagaatatgatcgacttgaagagcaagcagcccgagcgtgtggtcgaggtcgaatggaccagcaccaagggtctgttcatggtcaagattcaagtcgaggcattggatcgccgcaacctgctgtcggatgtgacgcgcgtgctttccgatcatggcgtgaatatcatctcgggtacgatcgccacgggttccgatcgagtggccaccagccagttcagcttcgagatggcggatccgcagcatctcaactcgctgttggctgccgtgcgcaagatcgacggtgtgttcgacgtataccgcatcaccggtgccaaggaatccgccgaaccccgtctgcgcaagatgaagtagggatgtgggtggcatacggcggggccccggtccgaatcgtcggatcggggccccgccttgtggcacttatggcatgaaggtatgggcggtttttaccgcttcacttcgatggagaggattcctgcgggctcggtcggacggtcggacgaatcggtgtccagtgcttcgagcttgtcgacgaccttcttggaggcgtcgtcggcgacttcgccgaagatggtgtgatggccgttgagccaaggggtcggcacggtggtgatgaagaactgcgagccgttggtcccgtggattttgccgtccatgccacggcggagcccggcattggccatggccaacaggtacggcttgtcgaattgcaggccggggtcgatctcatcgtcgaattcgtagccgggtccgccggtgccggtgcccagcgggcagccgccctggatcatgaaatccttgatgatgcggtggaaggtcagaccgttgtagaagggttcatgggaaggctggccggtgtacgggtcggcccattccttctcgccggtggcgaggcccaggaagttggccacggtgttcggtgccttgtcgtcgaacaggttgatggtgatgtcgccctcggaggtgcgcatgataatggtagtcatggctccaagtgtctcatgggcttgagaccggacagtgggtgcatgagctatgctccttgtgggacctgccctgttgtgaggactactctcgggagagacatgatgttcggagcggttatttccagttgaatgtgtagctttggtccggctgttcctcgccatgggtggtgacggtcgggatgttgccgtgccaggtgacggtgaagttgcccgagtctaatgatttgccgtcgttgtgcagatccgttttgatttccgtgacgttctcggaaccgataacaccgggatcggtgtcccaagagactttgaccgtgatgctgcttgggccgaagaatatgggcgagccgagttcgctgatggtcacttcgcaggtgccgtcagcggatttcgcgtttacgatgcgatgcgacatatccgtttgcatccatatgagagtgcagcctccagcccagatcagcgcgattgcgagaatgatatgctcaacgatgtgtgccgctttatgcgagtatccttcggtcataaatgtccccacgctcgtgtcatcatgccatagccttcaaccggagccttttcatcggtcgttgaaaagatggttggcgatatcgccccgaccgccgaagccggacggcacgtcacccaaagagttcttagcgaagtcgaacaatcccatggtcatgcctctttacctttgggaaaccaatatgactaccgtatcagttgtcggcgtcatcgccgaggcttgcgatttgcggaagtggcccatatccatgcatcgcgtcatgaaacgggacgccgtctcgcgcgtaattcgtgcctgtagaatctttaaagaccaagtttggagggagcgggatcatgccacgcaagctgatcatgtgcggggaccatccggtccttgcgttcgaatacgatcccgagtccggtcgcgcgtgctcctctggtgaggtccttgaccatgatcgtctgcctctggagttcaccacgcatggcaagagcgcgctgtatgccaggaggatcgacgaatggtggaggtcccgcgccatcccctccacccgcgacggcatccgccgtgtgctcgaatcgcttggcgcggcatcgaccggcgaactgctcgaccggacctacggtttgagcctgtcggaccagtactgggtcagacgcgaggacgatccggccgaatggaaggacgtcaacttcttcgacaattccttcgacgaggcgctgggcgagatcctgctcacctcgtactcgtcgtcccgtgacatcagcctcaacgtccccgacgtgtccactggcggcgatcttcccaaacgctggacgatcgacagggccaccggcaggagactgctcgtcaagtcgggccgtactggccaggagccgatgaacgaggtcatcgcctcgaggctctgcatgcgattgggcgttccggccgtccggtattccctggcacgcaacggcaaccgtctggtctgcccgtgcgaggacatgctctccaatcatgaggagctggtctccgcctggcaggtgctccaatccgtcaaggccgtcaacggcctcaactcgcatgaccagtggatccgcgccgccgtcggcttctgcgcagacgaacgggtggttcgtgacgccacggacgactggctcgtggtcgactacctcatgcgcaatacagataggcattacagcaacttcggtctgatccggaacatcgagacccttgcggtccgtccggccccgatctacgacactggcgcgagtctgtggagcggcgagctcgatgtggacggccgcgactggttcgccaagccgttctataccgcgaccggcaagccctcggctttgcggcagctcagactggtggaggattggggccggttcgacctggacgctctgtcggactggcccgacgaggcggcgcacgagttgtcgcgcatgcgcatgttcgcgcccgaacgcctcgacgccatccgggaccagctcacgaagcgcatcggaacgatccgcagaatcagggagggcaaggcccttcgcacgtccaatccgatccgcaacagggcggatctgctgggcaggttcggcgagacgttgcggaagaaccttggacaacgggacggggatgccagaagcgtcggaaccggaccggatgcgttgagccgtcatctgaaccactagcgcaacgaatcactactggaataatggactttgcaaccggaacacgaaaagaggagcatgatggccaatcccgagctgtcacggcacatccaggcccttcccgacgagctgaacgcccttgaagggggacgggagatttccgaacacctgcggagggtcgacgcgctgaaggaccgggcccgctcgctggagccgttggacggtgtcgaggacatggcgttggcggattacgaccgcgactggctggtgcgctacacctacaactcgaacgccattgagggatccacgctgaccctggaggacacgtcgctggtgttggagggcgagttcgtcccatcggactcgccggccagatacgtgttcgcagcgcgaggggtcgctgacggcatggcctacgtgcgcgaatatgccaaggaggggcggaagctgaacgaggagctgatccgtcgtctacacgaggtgaccgcattggatctccagccgttcgcccgcggcacgttccgtccttatggctatttggcgcggatcaccgccacccgagtcaagaccgcggacccgctggagatccgcgacgatctgcgatccttgatcgacgggttggatggctgcgcagcgcatccgctgctcagggccgccggtttccacgcgatgttcgagaacatccatccattcatggacggcaacgggcggaccggccgccagctgctcaacttcgtgctgctgcggaacggataccgtcccgtggccatcaaatacgatgcgggtcggtcatacgcgcgaggcctggaggcatggcaggtggacggcaagccggattcgttctgctccattttcctagactgcgtggaacaggaggaacagacgctcgtcgatctgatcgagcggcttcgccatctgagataggtcgcaggaacactcgcatgcttctttcgtgtgcgtcggtaagccgctgatatgcacagaagaatgagattattcttgggtgcctgtaggtgcctcgtggaaaacgagcgtaaccggcaggtctcccaaaaatcgaaaaccttggaataaagcaaaaaacagttggctaggattatcatgcgaggtgcgcatgataatggtagtcatggcttcaagtgtctcatgggcttgagaccggggaagagacgtgattgcgggaatggcgcggagagctgggaatgggcgtgggcaatagccgggacaacatgccgcagcgtgaagcgtcatacgagttgtctcgcgatggccaacgcgccggcaacgaccatgagcgctgagaagacacgcaaaagagtccttttggtcttcccggtttttggatccaatcacgacgtatatcaggactaatccgacggccagcggcaccaaggccagtagaagcagtggcttttccatggcgcctcctttctgaacgctgtgattcagagatatctttagctaatcatgggatatgggcggcttggcgccgattggtgatggggctcgatcctgatgttcgtcggtgccggaatatggtgcattccgtcaaatagaggtgggcacttggatacggtgtcgctttattggatttctttgtttctatggtttgattatgccacgagtccaacaaaacgttaccggccccgataaggggctgcggacgttttcttggagaccgaacggaaagattttcgtatgtccggtcttgaggaacgagagcgtgcggtggagttgtatttcaccacgccgatgacgacggcccaggtggtggagcacctgggttatccgaccaggcagtgtctggagcgttggccggcgatggattcccggtatgccggccatatggccaaacccatcatcccactggagaccaggcgaagggcagtcgaaccggtgccgggtagcgtgcagaagcaggccgccaaacagctcggcgcgggcgtcggcgcggtgcatggctgggtcagggcgtaccgcaagggcggcatggccgcgttgcagcccaaaaacaggaacgccgcgcagggcaataagcccgctgactcccgccgccggccgtccgcagccgatgatgatgacgcggaggcgtcgcgccgcagggtcgaggaaccggagctggagaacgcgttgatgcgggaggtggtggaggtcgcagaaaaagaccccggcgccgacctgcggcgcctgtcgaacagggagaagaccctgttgatcgaccggttgaggccggcgtattcgcccggctcgatggcatgcttgcccggcatcgcgccgagcggccacctactgccaccacgcccggctcggcgttgacaagtacgccggactcagggcagaggtggccggggcgttcgccgattccaagggcaggtacgggtaccgcaggatcaaggcggtgctcaagaccggcgtatcggagaagtcggtccgcaggatcatggccgaggaagggctcgtggcgcacgcgcccaaacggcgcgggtacggttcctgcgagggcgagaccacgcccgcacccggcaacctcgccgaccgcgacttcatggccgaacggccgaacgagaagtggctcacggacatcaccgagatcaaggccagggacgggaaggtgtacctctcgccgatgatcgactgcttcgatggcaagatcgtcgcatacaccgccggcttcagccccaacgcggagccggccaaccggatgctggagaaagcggcctcgacgctgccggggaacgcgcgtcccccggtgcattccgaccgtggatgccactgccggtggcccggatggctcggtctcatggaacgcttcgggctgacgcgctccatgagcgcgaagggctgttcgccggacaacgcggccgcggagggattcttcggcgggatgaagaccgaggcggtccaccccgagaagtgggaggaacacacccgcaacgaggtgctcgccttggtcgatgagtacatacgctggcacgaccacgagcgcatcaaacagtcgcttggttggatgagcccggtacaataccgtcaaagccaaggaatggctgcgtgattatctccaagaaaatgtccgcagccccctaccatggcccttccccggtctgttagatgtatagattgtttttaagaaaacatagaaagtatgggagatataggtaatcgtgacacctcttgtcggcgtgaaggtatggaaaagcgcaagtttccttctggcgggctttgagcggcgaacagagtggtacactc

SEQ ID NO: 2585 - DNA, 83713 bp, Unknown
  R222_15m  MAG No. k141_3827
caatgaattgggcacgctggatcccacgttcgagccgcagcagattggcccgggattcatgattctggtgggcgtcaccgatgaggacggcgacaagcagatcgcctggttggcccataagattctgaatctcagggtgttcgaggatgcgcagggcaagatgaaccgttcgattcaggacatcggcggcgagattctctccatctcgcagttcacgctgttcgccgacgtgcacaagggcaatcgcccgagcttcatcaaggccggcaagcccgagcatgccgatctcatgtggatcaagttcaacgaggcgttgcgctccgggggagtgccggtgaaggaaggtcgtttcggcgcgcatatgcgggtcggactggtcaatgacgggccggtgaccatcgtcatcgacaccgagcatgacatgcctgacggaacacgctgaattgcgatagtaatttgacatcatatcccgttccctccaatatgttactaaagcgctttagtcttctgcgggcgagggcgcatgtcgatatgtttcccatgaacgggcagcacaatgatgtggccgcacaagcggcagagataaggggagtgaacagcagatgttcctgaaacctgaacagcaactggagcggtgcaagcgcatagtgcgccagcgcgtggaccctcatatccacccatcgatcgcacagcttgcggtggagtcctttgacattcccggagagccgatgcccactgacgagttcttcgagaagctcaatcgaggtgacatcgacttcaagccgtttacgctcggcggtgaatggggcaccacatggggcacagtctggttccgcctgaccggtaccgtgccggccggctatccgaaaggcaagccgctggagctcatcctcgacctcggctggtacccgcactcctgcggcggccatatcgagggcctcgtctaccgtgccgacggcaccgccatcaaagccgtacacccgctcaactattgggtgccgttcatggatgctgagggcaacgcgcaagtgccggtcgccgaagacggcagcttcaccctgtacctcgaagccgccagcaacccgctgctgctcggcgtgcctccgttcattgagaccgaactgggcgaccatgccaccggcaagccggacgagccgtacgtattcaagtccgccgatctggccgaattcgatgaacgctacgagaactactccgtcgatctcgacgtggtgagctccctgatggaattcgccgacaaacagtcgccgcgctactggcaactcgccaaagcattgcagcgttcgctgaacgcctacgacgagcgcaaccccgaatccgtggaagccgcgcgcgcagcactcgccggcgtactggccaagccggccaatgcctcggccatgaacgtcagcgccatcggccacgcgcatatcgactccgcatggctgtggccggtgcgcgagacgcgccgcaaggtggcccgcaccgtatccaacgcattggcgctgatggacgccgaccccgacttcaaatacgcgatgagctccgcccagcagtacgcctggctggaagaggatcatccggacatcttcaagcgcatgaaacagcgcatcgaagaaggccggttcatcccggtcggcggcatgtgggtggaagccgatggcatgctgcccgccggcgaatcgctgatccgccagattgcatatggccgcaaatacttcaaagaacatctcggtgtggagcccaagggcgtatggctgccggacagcttcggctacaccggcgcatggccgcagatcgcccgccgtgccgggtacgaatggttcctcacgcagaagatctcgtggaacgacaccaccaagttcccgcaccactcattcatgtgggaaggcatcgacggctcgcgcatcttcacccacttcccaccggcggatacctatgctgcttggtgcaaggtccaggaactcgactacgccgagaagaacttccaggacaaagaccttgccgaccgctcgcttctgctcttcggtttcggcgatggcggcggcggccccacgcgcaacatgatggagcacctgcaccgctacgagaacctcgaaggcgtctccagggtaactattgagagcccgaacgatttcttcgacaaagcccgccgacagatcgaaaagaacgccggagaggaaatgcccgtctggaagggcgagctgtatctcgaactgcaccgtggcaccttgacctcgcaacaggacatgaaacgcggctgccgccaagaggaatcgctgttgcgcacggtcgaatacctgggcgcagccgccgtgttgtccgatccggagtacgtctacccgcgcgaggagctggaccgcatatggaagacgctgctgctgaaccagttccacgacatcctgcccggctcggccatcgcatgggtgcaccgcgaagcccgcgaggactatcgccgcgacctgaagcgtctcgctgaaatcgcccaagacatgtgcgccgtgctgcgcaaggccaacccgcaggccgacctgctcgccgaggcccgcatcagccagttccgcaatgacggcgcgtcttggcatgccaaccgcatcaacgaaccgaccgacgcgctttccgtactgacccagacattggacaacggccgtgtactgctggccaacggcgtactgtccgtcaccatcgaggccgacggtacaatctcgtcgctgcttgacgaggagcatggccgtgaactggttccggccggcacccgattgggccaatacgaactgttgagggacgaacccgccgtttgggatgcctgggagatcgaacgcgaatccctgctcatggcgaatgccatgaccggatcaatcgaatcggtcgatactgaaaacggtgcggcacgagtccgcgtgcgtaccgccgacgatgacaccgtcatcaccaccaccatcacgttgcgccccggttcgcacacgctcgatttccacgccgacattgactggcacgaacgtgaacgcttcctcaaagtcgatctgccgctgggtatcgtggccgaccaagcaacatacgactgccagtatggtctggtccgccgcccaatcgtcaaaaacaccgcatccgacgaagccaagtatgagagcagcacgaaccgtttcgccattatcggtgatgccggttacgccgcggccgtcatcaacggatcggtatacgggtccgatgcctcaccgatcgccgggaacgtcgccgaaggtcgtgactcgggcactatgttccgactgtcattgctctccgcgccgaccttccccgacccgcgcaccgatatcggttcgcacgagttcgactggtccgtggtggccgacgccacggtggaccgtgcgcttgacgccgccggtgtgctcaacgcaccggcactccatgatgtgcccgatatcacgccgctcgcctcgatcgagtccgtcaatggtaccgtggtgctggactggatgaagctggccgatgatggttccggcgacctgatcgtacgtgcctatgaggcggccggcggccaggccgatgccatgctgcacgtctgcccggcgctcgcaggcgcttcggtgcatgagaccaatgtgctggaaggcgacgatctggccgccgacctgccggtcgcgctgcaagacggtagacagaacgccgaaggtgccacgctgcactttggcccgttccagctcgccaccctgcgcatcacgcgctgaattcccatctgatgcttctgcctcctcgaaccatgaggaggcagaaacatgtcgtattacggttttccaaattaccaccacacccatcatttccatcattcccaccagacacagcaaaggagaactctccatgtttcttctgcccaatcagcagttggagcgctgcgaccgcgtcatgcagcagcgcgtcaaaccgcatatccacaccacgctcgccgcatgcaccttgcgttcgttccacaatcccggcgaaccggtgccctccagcgaatttctagccaaagtgcgcaacggccaagtgcccttcgaacctttccgcgttcccggcgtttggggcaccacatggggcaccacatggttcgaggtgaacggccacatcgacatggcggcggtcaaaggacgaaaagtcgaactcatggtagacctcggctggctcgatcaccgcggtcccggattccaatccgagggacttgtctatcgtgccgacggcaccgccatcaaatctgcgaacccacgcaaccactggattccactcgtctacgcggacggcagcagcactgtagaactcgatgaacatggcgacttcaccgtctatatcgaagccgccgccaacccattcgtcgaaggccccaccccgttctcacccaccgaactcggcgaagaggccaccggcgcctgtgacttcccatacacactgagtcgcatggatatcaccatcttcaacgaagacgtgtttgcctatgacatggacttggaaaccgtatcttccctgattcgcgaactcaaagacgacgacccgcgctactggcagctcgccaaagcgctgcaacgctccttgaacatctacgatgaacgcgacttggaaaccgtgccggcagcccgtgcggcgctcgccggcgtgctcgccgaaccggctgcatccagcgcaatcaaccacattgccatcggccacgcgcatatcgactccgcatggctatggccggtgcgcgagacacgccgcaaagtggcccgtaccgtatccaacgtgctggctttgatggacgaagacccagacttcacgtatgcgatgagttccgcccaacagtacgcatggctggaagaagaacatcccgacctgttcgcacgaatgaagcggcgcatcgaagaaggccggttcatcccggtcggcggcatgtgggtggaatctgacaacatgattccttccggcgaatcattggtgcggcagatcacgttcggccgccgatatttcaaggagcatctcggcgtcacgccgcgtggcatctggctaccggacagtttcggctacaccggctcctggccgcagatcgcccgccgtgcaggattcgactggttcctcacgcagaagatctcgtggaacgacaccaccaagttcccgcaccactccttcatgtgggagggcatcgatggtacgcgtatcctcacgcacttcccaccctctgacacctactgctcgtcgatgagcatgcgcgagctcatgtattcgcagcgcaatttcctggacaaggatctttcccgcaacgcaatcctgctctacggtttcggcgatggcggcggcggtcccacgcgtgagatgaccgcgcgcatccgccgcgaccatgatctcgccggtgcgccgaaaatcgatttcggtactcctgatcagctgttcgaccgcgtgcgcaaggatatcgtggacgatgcccgcggcgagacaccggtcttccatggcgagctgtatttggaactgcatcgaggcacactcaccgcacagcaggatatgaagcgtggttgccgccaagaggagtcaatgctgcgtgtcgtcgaatacctgtgcgccgcggcccgcatcaagaacccggactatgtctatccgcgcgaagagctggaccgtatttggaaaacgctgctcctgaaccagttccacgacattctgcccggttcggccatcgcatgggtacaccgtcaggcgcggaccgaatacgcgcgtgacatcgctcggctgaacgagatcgcccttgaagccgggcgcgcgatcgcagccgtggaacccgatgacgcaaccataaccgacgccgtaatcgccccatattcccgccaagcctgtgagacgtgggtggtacgcccggcttcgagccgagccgaagcgggaaccgcatccatggctcgggtcgccgttacccatgacggcgatacgattgtgctcgacaacggccaactgcacgtgcgcattgaagccgacggcaccgtttcgtcaatcgtcgatcagcgaaccaatcgtgaactggtgcccgccggcacccgactgggccgctacgaaatgctcaaagacgaacccttccactgggacgcctgggatattcaacgcgatgcgttcctcaccgccaacgcgctcagcgaggcatcgattgcaagcgtggacgaaaccgccaacggtggggccgtcgtgcatgctgtcactcgcgcgaagggcgttgaaattcgtacgggcattgccttaaggccgggctccgccacactggacttcaccgccgatgtggactggcatgccgtcgaacagttcctcaaagtggatatgccggtcaccgtgcaagcgctgaacgcgcaatacgaatgccaatacggtctggtcgaacgccccatcaacaagaacacgcgcagcgatgatgccaaattcgaaagctgcacgcaccgcttcgtgcggatcgccgacgccgactatgccgccgctgtggtcaacgcctccacctacggctccgacgtcagccccatccacgccgatgcggcacatggcaccggccgcggcaccatggtgcggctctcgctgctgtccgcaccgctgtaccccgacccacgcaccgaccaaggcgcacactccttcgcgtggtctctggtcgctgacgccgatatgaatgcggtgctggacgaagcggcgcgacttaacagccccgtaataggggagttgcctgatatggcgccgctggtctcgctcgccgacgccgccggcgtcatcgtattggactggatcaagctcgccgatgacggttccagcgatctgatcgtgcgcctgtacgaggccgccggcggcaatgccacggccacactgcgccttgacgccgctctctccgatgccaaggccagcgtgcaggaggtgaatctcatggaggagccggagctggatgccgaactgccgcgcgcgctcgccggtgacgaaccaatgcctgccgacggtgcgatcgtttcgttggcgccattccagctcgccacgctgcgtattcgccgataagggatattgggcctaggctcgatattttgggtcgcgcccaaccgtaacggaaccggaacagaccggctctgccatacggttgggcgcggcccattattgtatgagaagagggagagcgatcccgttgggcaaatatcaatgcgacacgcgacgatgaattcgttgcgtgcatgtttcgattgtgttatgtttttactaaaccgatttagttaacaggttcgcgactggccggaagctaaaacggtttagtctcagcgatgagaactgaataaaggttgtgataccacgtcaatcaccgcgacgggtgactgtgctggagcacaacgattaggtttctccgtccacagcagggcgggatgaaaaaggaatcaaaaggaaaggaaaacatcatgttttctatgaagaagatcctcgccatcgccggtgccggtgcgatgctcgtatcggtggctgcctgtggtagcggaactgcgggggatgacggcggcaagaaggagatctccttccagacctggaacctcaagaacgacaagtacaccccgtatttcgaggcgctgatcaaggcctatgagaaggaccacccggacgtcaccgtcaagtggcttgacgccccgtccgatggttacgaagacaagctgtccagccaggctgcggccggcgaactgccggacatcgtcgacggcggcaactccatcctgtacggtcttgccaaggccggcgcgctgctcgatgtctccaagcaggctccggatgcggaaaaggactactacgaaggcgcatggaagtccgtgaccatgcagggcaatggcatcgagaagggtgcctacggcctgccgtggtatgtcaacgatggcccgacctactggaacaccgagctgatgcagaagtgcggccttgatccgaacaagattccgaccacatgggatgagtacttcgccgccggcgacaccatcgtgcagaactgcaaggatgtctacctgggcaccacgatgggttacaacaccgaagatctgatgaccgcaggcgtcaagtccttcatgaacgatgaccacagcaagtacaccttcaatgatgaggccggtgtcaagcagatcagccgcttcgttgagctgtacaagaagggcggcatcccgccggaggccctcgactcctcctggagccaggccgccgatctcttccagcgcggcaacctagtctccatggccggctccgcctactccgctgacggcttcaagcagaacgctccggacctttacaagaacctcgcagtcggcccgcgtatcagcaacgacggcaagtccgcttccgtggcctacgagatgctcggcatcagcgccaactcgaagcaccccgacgttgccattgacttcgcccgattcgtgaccaacgagaagaaccagatcgagttcgacaagaaggcctccgtgttcccgtccgccaaggggggtctggatgacgactactacaagagcatcgacgaaagcacccttgagggcaaggctctgaagatcacgctcgaccaggtcaaggacggctacggctctcgtccgtccgagttcaccgacaacaacggctccaagaacttccagcagcagatcgccctcgccatgcagggcaagcagaccgccaaggaagcccttgacaagtccgtcgagttcgcaaacgagaagctcgcacagtgagcaacgcggcactcgccgctgacaggtcggaggcccgcacggcctccgaccggcctgaaccgatgaacctcaaccacggcaagaagcagaatcgtagcttcggcaccatcattgccccctacctgtttgttctgccagcgttcgcgattgtgtttgtattcatcgtccttgcggcactcaacactttcaggcttgctttcaccaactccacactgctccgtccgggaaccttcgtcggactcgaaaacttcatcaaactgttccatgacgagtacttcctcacggcactgctgaactccacactctacgtgatctgcgtagtgccgttcatggtgatcctcccgttgatcctggcctatctggtcaagggcaactcccgcatcatgggcttcttccgcaccgccttctacatgccggtggttatgtccgccgttgtggtgggtatgatctggaccaacctgctggattccgccggtctggtcaactccgtgctcaaggcattgaagatcatctccaagccggttccattcctcaccgatcgatggggcgtgctcttcagctcgatgttcgtgacaatctggctgggcctaggctactacatggtcatctacctgaccgccctcgccaacatcgatgaatccctttacgaagccgcctccctcgacggcgctggccctgtccgccagttcatctacgtgacaatgcccggcgtgcgctccacgatgatgctcatcatgatgctgtccaccatcgccgcattccgagtcttcaacgaaatctacgtgttgaccaacggctccgcaggccccggcggcatggatatgacgatgtcgatgcttatcaagcgcgaaggcaccggtatccaggcccgcactggttacgcgagcgccatctccatcgtcgtgctcgtcatcgtcggcgtcatgctcatcgtgcagcagatcgtacaaaaacgaggtgaggactgatgaataccaacacgcataaggtcaccgtcggcaaagtcgtccagtatctgattctgattctgatgttcctgctgctcgtcggcccgttcgtctgggaactgtccctgtcgttcaagggcaagggcgacaacgtctacgccgtgcctccctacctgatgccgaagaccccgacgctggacaactacatttccgtgttcaagcaggtcccggtattccactacatgctcaacacgctggtggtctgcctgatctccatcttcggcaacgtggtcttctccacgatggccggctatgcactgggacgcctgaagtggcgtggccgcggactggtgttcaccatgttcatgggcaccatggtcatcccgatcgaaggcgtgatgatctcccagttcctgatcattcgctccatccacctgcagaacacactgctggcagtcgcactgcctggcctgtgcggcgccatcaacatcctgctcatgaccaacgccttcaaatccattccaatggaactcgaagaggcggccatggtggacggtgccaacctatggcagcggttcttccacatctgtgtaccgcaggtcaaaggcacgatgaccgttgtcggcatcttcgcattcgtcggtgcctggaacgacttcctgtggccgttgatcgcgatctccgatgaaagcaagtacaccttgaccctcggcatgaaccgactcaagggcatgttcatccaagatccgcgactgatcgccgccggtgcgctcgtctcgcttatcccgatcatcgtcttcttctgctgcttccagcgctacttcttccgtggcctggaacagggtggactcaagggctgagcggactggaaaaaggaggtactccaatgaaattcggagtcaactacacgccgtcgcatggctggttccacgcatggctcgacccggactgggacggcatcgacaatgatctcaagcagatcagcgaactgggtatggaccatgtgcgcatcttcccgatctggccgtatctgcaacctaatcgcacctggatcaacaagaagggcgtggcggatgtgcgccgcatggtgcacatcgccggcgagcacggtttggatgcctatgtggacgtgttccaagggcatctgtccagcttcgacttcctgccttcatggctggtcacctggcatgcgggcaacatgttcaccgatgcggacgccgttgcggccgagcgtgaactggtcaagaccatgaccgatgagctgtccaaggaacccgcgttcaagggtctgaccttgggcaacgaggtcaatcagctgtctgacaggccgcatcccacgaagatgagcgccacggaccggcagatcgacgcatggctggacgcgctgcttccgaccgccgccggtgaagggcacaacgcgctgtacagcgtcaacgatggcacctggttcatcgatgggcacccgttcactccggtgcagtccgccaccaagggtgatatgacagtgattcactcctgggtgttcaacggcatcgcgcaaggatacggcgccaccagtgaggagtgctcgtcgtacgcactgtacctggccgagctggccaaggcgttcggcaaggattccgagcgcccggtgtggctccaggaagtcggtgcgccggagaatgtgctggaaaccgactacacgccggaattctgccgcaagaccgttgaacgtgccatggattgccggaacctgtggggtgtgacgtggtggtgctcgcacgatgtgcccgccagcatggaagacttcccgttcttcgagcactctctgggcttgttcgacgagcaaggccagctgaagccgatcggccgtacgttcggggaactcgccgcacagtaccgttccgcattgccggctcagccgaagaccgtcgccgtggtgattgatgtggatgaggccggaaacccggtgaaccgcagtgcgctcggcccgggaggctcggtgtgcgacctgtggatgaagctgcaggtggcgggccagcgcccgaccatcatcacctcgcaggtggcggccaatcaagaggcgctcgcgcagcgtggcattctggaattgcacgctgacgaacacccctatgccgcccgttactacactgcggtttcggacccatcgttcgaaacggctgattaaaccgatatccggttgtggaatcatctactccttgttccacagccggatattttcaattgcagtgcgcacaattgcagtgcgcagggcaaaacataagacccggtactcgccgaagagcgagaagaacgagaagacaatatacgagaagggggagcgctcaatgagcatcaattgccccgcagtggaccgactcattgattcgatgagcttcacgcagaaagttggccagttgaaccagcgtctgctcggttggaagtccgtggaacgcaatgctgcgggacggctggtggcctcggacgagctcaagcaggagattgaccgatggggtggactcggcaccctgtacggtctattgcgagccgacccatggtctggtcaacattggggtaacggcatacgccctgaggagcggactgaggcgattgccgtggtgcagcaaactgtgctggaacgtggcgcgcacggcatcggcgtattactcagcgaagaggcgcctcacgggcatcaggcgctgggcggcacggtgctgcccaccaatctgggtttgggcgctacgtttgacccgcagggggtgcaggaagcggaagccgcggttgccgcagaactggccgccagcggcattcatatcgcattggtatccggtttggacatcgcccgtgacccacgctggggccgttgcgaggaatgcttcggcgaggatccgctgatggctgcccgcatgtgcgaggccatcgttaccggcatgcagggtgagcatcgcagcaaggtcggccacgggggagtggccgtggtgctcaagcatctggcggcgcaaggcgaggccgtgggcggccgcaacggacagtccgccgtactgggcccgcacgatcttcatgaaattcatctgccgccggtggccgccggtgtgcgcgccggtgccttgggctttatggcagcctacaacgatatcgattctgtaccttgctgcgccaacccgtggctgctcaaggattatctgcgcgaccagctcggtttcgacggcatcgtgatggccgatggcctggccgtggatcggctcgaagacatggccggctccattcccgcggcagggcgtgccgcactgctcgccggcgtggacgtctccctgtgggatgaaggattcacccgcctcgaagaatatgcggatgacgaacaggtagtggccgctgtcgacacggccttgcgccgggtgctggaactcaaagccatgttcggtctcttgcccgaagacggtgccgataccgccgcaattgccatgccgagcgccgacgccatcgcgcaggccactgcggatgggcgtgagcaggccaagcgcatggcccgcgaggcgataacgctgatcaatgatggccagtctgccgccacgctcgacgatatccgcagcgtcatagctgatgctcaagccggccctgtgattgtcgccggcccgttcgccgacgatttcggctgcttcctgggcgattacaccgcccctctgcccgccgatgaacagtcaagcgtctaccggcaattggtggcacgtctcggggaggaccgggttctcttggccgccaagccgagcgatgcgccggccgatcaatgggcgcgtgcgtcgaccgtggtattcgtatgcggcagcaccagcgaacgcagctatgacagtgaattcgacgacaatggcgcggcgaaggccgtaaccgaatacggtgccacctgcggcgaaggcgtggacttgtctgacatccgtctgccttggcaccaggatgaaatgctggacgaagtcgtggcattgaccaccgctccagttgtttcggtggcggtgtgcggcagggcgcatgtgctgactcatgtaatgggtcaatccgctgtgacgatttgggccggatatgctggccagtatggtccgcaggccgtggctgatgtgctgattgacggtgccggtttgccgggctgccttcctgtaacgctgcctgcgcatcccgcagccattccggttcgatacaacgaccggcaaagtgccgcccatgtatacaaggatgcggcggaaccggtattgcgcgagtttggctacggagccggttctttggctggagtgacgtttagtgggatgcatgccgatgccgaatcccgcacgaatgaggtgttggtgcaggtgacagcatatgccggcgaccataagacggccggttcggtgaacctcttcgcacacgtcagtggcggtcgtcgtatcccacgtttggcagtgctggtcgattccgttgctctgacgcttgaggcgggcgaaagccacgcggtatcgttctcggtaccctttgaacggctgatggacgaagctgatgacaatgtgcgtgtgacgtttgccctgacagccgctttgaatagcgatgatacccgacatacagacgactgcgataccagcgtaagcatcgtgatacatcgctgacgatgtgcatgagacaagtcggagaggggtatgttccgtaagtctcatgacctactcattgcggccgatatggtcggcgggtgagagaaaaagagaatgtgggatatggcgttggtgagatatcgccgtatcccgtggctcaaaccgtcctaccggtttgagccaccgtctacgcaagccgcatagacggttgatttccggcgtgagtcggaggaaatcaaaggagattatagatgagattgtcatcaggcgatcccgctgggcgtgcttctgcttggactcaacacaggaaatggctgcggactggcttggccgcggtgctgtcgatggccacgctggcggcactggctgcaccggcaagcgctaccgacaccatgccgtggggaggccagtatgccgataccagtcatccggagcaggctgcgggagccaaccagccgtatcagcatggttacaccggtctagatattctgaactggaatccggcagtggataaggattcggagtacctgcgttcccgcgtgccgttgcagacccgcatcgccgccaacgccgcgacgcagaaggacccgaaccttccggccgatacggagatgttcaaccttgccggcgactatggcaacgcgttctttgagtcgttccatgacaacaatgtgttctcgcagtacctgttcaactactggcagtacacggattattacggcacctggcatggccagccgaccgcgaacgtgccgaagagcctctacgatgagaaggcccagtctgattggactcagaaatggtttgaattcggtacgctgaacttgccaaatgcagcgtacacgaacgccgcgcataagaatggcgcgaagtcgattgcgacgattttctactcgggcaacgaccgtggtgaacagacctataaggatttgcttcaaggcaagcgtgccgatggcacctatccggtggccgacaagttggtggaaattgccaagtactacggctttgatggttacttcgtcaatcaggaatccaatgtaaactccgatgatgttccagcctatcgggatttcatgaagcagatcgtcaatcagggcatttacatccagtggtatgactctgcaacatacccgggtggtaatatcggctaccagaacagatttaacgagaaaaactcaccgtgggtgcaagatggggccgagggcaaaatctccgattcgatcttcctgaactattggttcagcggaaacatgctgaaagattcggccgaccacgctaagagccttggcattgatccgaagtatgcggtgttcgcaggcatcgaggccggacagcagaaattcggcagtatcggtagcaacgcggattatatgaacgtcaaccttgatgctgacggtaaaccgtatgtgagccttgccgcgctcggcaccgacttcgtctcccatgagctgggtgacgacaagaaggtctatccgaagtatcaaaaccaggtgttcgaccgtgaacgtcgcttgtggactggttcatccaccggagagaagggcacgacggatatctctgatccgtatatcgatgatggtacgagcagcgacggctggaagggcttcgcctcacagatcgccgaacgctccgtcatcggtggcccggtcttctccacggcattcaacaccggtcacggtcttgaatggcgggacaatggcgaacagaccagcaaccagcagtggggcaacatcaacctgcaagacattctgccgacttggcagtggtggattgatgccgattccgacccgctgcaagccgacttcgactatggcaaggactatgagacggcaccgcgcttcaactacaccaaggtcggcggctacgaaggcggcgattcgctggtgctgagcggcaagctctccagcgacaacaccgtccgtctctacaagaccgacttgagcgtcactgccggctccaagatcgaattgacctacaacaagctcaacagtgacgattccaagctgcaactcggcctcatcttcgccgacgacaccaataccgtagtgccggtggacgtggcggatggcgcggcgagcaacggctggaagaccgcaaccgtagacctctcccagtacgcgggcaagaaaatcgctacgctgggcctgatcgtcaaggccggagcgaacccgatcgacaactaccaggtgaacatcggcaagattaccgtcaccgacggtgctgcctacacgccggccgccccgaccggcttcaaggtcgagcgcgcctacgcggattccgacgaattgaccgtcaagtgggatctcgccgactacgccaccaccaagaactacctgctgtacttggacaacaccttcctcggtggccgctacgacgacaccctgtacgtcaagcacctgcctgccaagaccggcacgctgaagttgtacgccgtgggcgcggacggttcgcgctcgatggctgccgaagcgccgctgaacgaagcggcggccgtgtccagcgtgaaggttgagcccggcaaggacggtaacgtcaaggtctcctggaccaacccgcaggtctccggcgagaaaaccgtaaccgttaagtccgacaccggttcgtggcgttacgccggtcagccatactcccagaccgtcaaggtcgctgccgacaagagcgacgtgacgattccgaatgcgccggttgacggttcccgttatgtggtgactgtcgacaacgcaggtggcgctaccaccacggcagcaggtgcattcgccgatgccaccatcgagccatacccggcttgctcagtgacgtggaatggcgacaatgtgtcgctgattcgccccgagactcaggattggcgttacctctacatgaccgagaagtggaccgacgagaacggtaaaaagcaggagaagcagctgggtgccaagtacacctattcgcagaacactccgccgattaccggcattattcgtggccgcaccactccggagtcgtacaccaagtccattcccgacggccatgaactgtgggtgcaggtcgaggactacagcggcaacaagaccgatccggtcaagattccgaccgccgacgaactggccaagtgcacggtcgccgaccccacccagccggatgccaagaagtccacgctgaccgcggtcgacggttcggccgtggccgacggcaaggccatccgcacggtgcaggcaacggtcaaggattcgttcggcaatccgctggccaatgccgaggtggcgtttgaactgcccgaaggcgtctcggccattggcggaaacaccaccgtcaagaccgatgccgccggcgtggcttcgctgaacgtcgtgtccacgaaggtcggcaagtacacggtgaaggccgtgctgaacggcaatgccatcggcaagggcgtcaccgtcgaattcaccaaggtcgcggtgacgccgaacaagcccggcgaccagaacaagcctggcgataccaagccgaacaagcccagccagaacgacaacaagaacaatgacaagaatggcgcttcgttgagtgccacgggttcgtcggtcattgcgattgtggcggccatggtggtgctgcttggcgcgggtgcggtggtacttcgcgctcgtagcaagacggagtagttcgtcgcaatacgggtgttgatactcgtgccataagcgggatttaggggttgcccaatgggtgccccctaaatcccgtttgttttgtcgcaagacatatgccgagaccagtgactaaaatgctttagttatttgactaaaattattgatatcataagagttagcgcacggttgatgcatatggcccaatgcgggggtgccgtcaaccgtatcgcaatagtcgcaatgcggtcgtaaaaaggagtgttcatgagatctgctcgcgaggcatcgtcatcgtctgacggcacgcagcgtgtgagcctgaaagacatcgcagatgaattaggcatctcgcagaccgcggtatccttcgccatcaatgatcggcccggcgtttccgcggaaaccaaacgtcgggtcaaagaggctgcagccaggctcggctggacgccggtctacgccgcacaagcactgggatcctcgaagaccatgaccataggctttgcccccgcacgatccacgcaggggctcacggatgaaagcttcatgctgcacttcatggcgggtgtgcacgcctcgctcagccccaaaggctatggtttgctgtaccgcccatgccgattcctgaacgaggagatgagcgtatacaaggattgggcgtcgcgcaagcgcgtggatggcgttatcctcgtcgatttgcgagccgatgatccacgcccggaattgttgaagaatctgggtgtgcgcgcagtgcttgccggaggacccgacccgaacaattatgtgccgtcactgtccatcgatgattcacgcacgatgggaaccgtgctcgaacatttgtcgtcattgggacaccgccgaatcgcctatctttccggcgatccgaacctggattattcacaggggcgtgtcgcggcgttccgcgcatttgccaaacggcgaaagctggaatccatcaacatcgaattcaccgattttgttgcggaacaggccgcgatgctcacgttggagatgctgcattcaccgaagccgcctaccgcgttcatctatgaaacggagatcctcgccgcggccagtcttcacgccatggccgaagattattccgctcggcagatggaggcgggggagggccatgcggaagtctatccgaatgggctgcccgccattgtcagttttgaagacagtttcatttgtgaggcggcgtatccgtcaattaccgccgcgcatcgtgatgccagcgaatacggtgccaaagtggccaaactgctgctcaaagtgcttgccggagagcaggtgagcggcaaccggcgaatcctcaccccgaaactggtgattcgggacagcaccgccaagcccatggataccatggcgtagaacggtcattgcatcggcttgcagacaatgacatgcgaccagtacgacgttggcccccgtattccacgggggccaacgccgttgagaaagaggaagaaaaaaggatatagaggcttagatgctgtcgattattcagcgttcttcacggccgtcgcaatggacacggccgggtccaagaacggaatcagcgtggactggaaggcgtggtacaggtcggacttgcccggccagaccgtgccgatcacgtggttgttcttgtcaagctgatggaaccaggaaccgccctcgtggtcgatgacatgctcatcgacatactgggcgaatgtggcgtaccagttggcgtacatctcctcgccggtggccgcatacagcgtggcggaagtgttcaacgattcggccagcgtccaatgcatgcgatcggtgaccacgggcttgccgttccagtcggtcgtgtaggcgagtcccacggtgccgtcggcgttccatgcgtcggccacggcacgcgcgaacagatgctcggcggcgtcgacgtacggctgtgcgccgtcaaggttggcgaaggagcttaacgcccactgcgtgatcaagcgggcccattcgatgccgtgacccggcgtggcgccgtacggcttgaactgatcatccttcttgtcgacgttgcattcgaggtccagcgaccaatcggacttgaaatgttcggggatgcgccactcgttgtgcttcgcccagccgatcacatgatcgatgatgcggccggcgcggacgcgataggtgttgttcccggtggcgtcggccacggccaagaatgcctcggtggtgtgcatgttggcgttgagaccacggtacgggtcgagctcggtgaattcggtattccaggtatcgacggccaaaccgatttcgtcatcccagaaatgcttgtcatacgtggcaagcgcctcgtcaagcagttccttggcacccggacgtccggccagcagggcggaggacgcggcgagtatcacgaaggcatgcgcatagcagaccttgcccggcgcatgggtgccgtccgcgaacacctgcggataccagccgccgtgctcgttgtcatgcagaatgccggtcaatcccttgagcgccgcatcggccagctccccggcgcccggatatccgagcatgtcgccaatcgaatacacatgggccatacggctggtgatccacgtttcgacgccgtgggatgggtcaagggtgccgtcggcgttcagccagccggaaccgccgttcggcgctgggaagcccttgccgaacttcagcagctcataggtttcggaagccatgaaaatgcggttggcttcggtgccgagcgtataccgtgggttattggtcataatgattgttcctttccttaacgagaacatgcggtgggtgcgcaatgagcattcagcgggcacgtcttagtgcttcacacgaatgtcgaaatagtccatgaccagttcacaaaacatcatattcgaccagctgaaccattcgcgcgtgtacttggtcggatcatccacgtcgatgccttcgtgcatgagatgtgtaccggcgtcggtggttacaagacggtcgaggatatgcgccttgaagtccttgctgtcgctggtcatcgcctcgatagacagggcgatgggccacacatagcgcggcggggtgtgcggtgagccgatgcccttgagatactcgccctcgtaatagtacgggttttcgtcgctgagcagcgtgcgtcgggtcgccagatacgtcggatcgtccggtgcgcagtaccccaagtaaggggccgccatcaaggagggcacattgctgtcgtccatgatattgacgtgacccaggccgtcggtctcgaacgcgtaaatcgtctcgccattgcggttcgtcgttttggcgtgggcttcgatgccttcggtgatggtgcggcgcagctcgccggcacgggcggcgatatcggcgtcatccagaatctcaccgccgaagatgcgttccagatagcccatcaccacggcggcgaacatgttcgagggcaccagatagtggtaggtgcaggcgtcgtcgctggggcggaagccggaccaggtcatgccggtgtacgccaccggcgaccccttgccgtcattgctcagcgattcggtggggatgtccgtgtcgcggatgaagaaatacggggagcgttcatgatgctgctcggtctcgaagacgtcaagaatcttcttgacgccggcaatgaattcggcatcgaagtgatcggcgttgccggtgttcgcatacagcatccaagccagttggatggggtagcacagcgaatccacctcgtacttgcgctcccaaagccaagggctggagaaatcggaccggtcgtccttgtcccaggaggcgccgttcggttcctcgttgaaggcattcgcatacgggtcgatgatgatgtagcggaactgttgccgtatcagaccggcgatcaggttcgcaatatcgctgtcttcggcggcaagggccagatacgggcgcaattgcgcggtcgaatcacgcagccacatggccgggatatcgccggtaagcaggaatgtggtgccgtcgtcatgccgtttgaccgtggtggtcagggtgtcggcaaagcaggcattgaagttctcggcccaggcggcgtgttcggtgccgcacaggtccgtgatgtgctgcatgaaatccgagaccgacttcggtatcgcggtggtcgtcataaattcaacttctttgtttgagggatatgcatatcaagggaacagcattattctaaaccgctttagttcatgacacgcgaaaggatgtgaagagcatgagtgtgagcgcaccatatgaaaaaccggtgagatttcctgttcggagaatctcaccggttgcgatcagtcgattcgtgaagtcgcacgaatggcggataaggggatgggtggattacttgccgatttcagccagatagtcgggcatctcggccgggtactcgggccaggcaccggcctgggtgcagacgtaggcggcggtgttgacggccttgcggtgggcttctgccagcgtgtcgcccagcaggatgcgggcggtgaaggtgccggagaaggagtcacccgcacccacggtgtcgttcacctcgacgtgcggagtgtccagcgtggagacctcgcccttgcgggagatgatggtggagtaggcggagccggcggtcagaatcacgtagtcaaggccgaattcctcgatgaaccagcgggaggcgtcttcgccggaggtgccgcggatgtcgaacatgtcgcgcagcagcaggagttcctcgtcgttgatcttgaagacggtggccgccttgaggagttcctcgatgaggtccttggagtagtggtcgccacgcaggttgatgtcgaagaacttcatcgcgcccggcttggtgtgcttgagcagctccgtgatggtggcgtgcgattcgggggagcgcagggccagggtgccgaagcagacggcgtcagccttggagaccacgtcgatgagctggcgggtgtagaggatgtggtcccaagccacgcccttgacgatggtgtactccgggatgccgttcttcagcgcgacctcgacggtggaggtcggccaggcgttgcgctggatgacggtgttgatgccggcctcgttggccttggcaatcagttcgtcgccgagctcatcctcgccgaccgcgctgatagcccagccttcggtgccgttcttcatcgcgtggtaggcgaagttgacgggggcgccgccggctcgcttgccgctcggcagcatatcccacagcagttcaccgaggctcagaacgatcggggtagtcatggttggtttcctttcctttgtttcttttaccgggtgtttcgtatggaacatcttgtgatgtcggcgcttggtttaggagacgtcgaagaacaccgaggggtgttcgaggaattgggtcaccgccactgctgcggcaccggagaccgccgcgtcggcggacagggtggataggctgatggaagtggaggcattgatttcggggatggcccgttcggccaccgtggcgcgcacctcatcgagcagtatcgggccggcttcggacacgatgtcgccgatgatgatgtgctcaggattgtatccattgaagatggtgacgcatccgtagccgacgtatcgggcgacttcgcggacaatggcgattgacgcttcgtcgccgtcgccggctttggcgaacagggcgcgggcggcttcggtgtgggtcatatcggccgcgccgggaaccacggtgccatcggcgataagcatgtcgtgaatggcgggggtggagcagtagcgttcaaggcagccgacgttgccgcaatcgcaggggcggccgttgacgtcgatggagatgtgtccgatttcggtggcggcaccgaggaagccgttgatgagacgaccgttgtcgatgacgccgaggcccacgccttcgccgaccagataataggcgaggttgccgtcggcgtgcaccgacgggtcgaagagataatgtgcgagggctccggcgcgggcgtcctgttcgatgaacacaggcacgcggaaagcggtggcgaattcgtcgatgaagttgattttgcgccagccctgcatgctggacaccacggcggtgcggcctacgttacgcaggtaggggccgggcaccgccatgccgatggccacaatggacgggtcgttgtcaagcagttgttcgacgcgctggtggatggtgacgatggtgccgttgatggtgttgtcgtacaccgtgggcaggttttcaaagctcagggtgttgccgcacaggtcgaacacgccgatctgcaccagcgagcgggcgaatttgatgccgatgatgcggaaccgcgtggtgtcgagtttgagaccgatggaacggcggttcttggaaccttccaaatcgccggtctcttcaatcatgccggcctcgataaggcgtgcggtgattttggtgatggccgcgggggtgagttccagtgccttggcgatttgcgcgcgggagctgatgccgttgtgatacaggtgcttgacgatgcgggagcggttggattcggagacactggcttgggaagtggcatgggtggtgtttgttgccatcggtcttaagtcctccttgtctgcaccgttgcgagttgttccgctcgtctttgaatctgaacttgattaagatattaacgctgttaattgattgacgcaatcaatatgtcattcggtgtgtcgtgcatgtgagtgtcgtcttgggggaatttgttaagatggttgtcaatagtcggatgcacactgatatcaagcgaaacgttcgatgaagaacaggggaggactgatgtctgagaacactatgaacaatctcaaaatcggtgttgacgtgggcggaacaaaaatcgaagctgtgctggtcgacgcaatgggcacggtattggattccgcccgtattcccgccaggcatggcaacgatgccgtgatcgaagacatcgtcgctgtggcacatcaggcagcgggtgagcgttttgacgaggtgagggccatcggtatcggtaccccgggcacggtggattcggccagcgggcatgtgggcaatatcgtgaatctcgacgtggtctcgctggatatggggccgttggtctcgcagcgttcgggcgtgccggcccatgtggaaaacgacgtcaatgccgccgccgtcggcgcggccaccgtattgggcggtgcggacggcatggccggtaccattgcgttcctgaacttcggcaccggactggctgcgggcatcgtcgaaaacggtgtgctgatgcatggctatagcggcgcggccggcgaaatcggccatatcccagtcgaacctcatcgcctcaagtgcccttgcgggcaatacggatgcttggaaacagtctgctcgggcgcatccgtggggcgtctgtggcccaacgccgacccgccgatgcccgacctgatccgtcgcgcgaaaaagcgggaggccaaggccgtcgatgtgctggacatggtagtgcgcgccatcggcgacaccatacaaatcctggctcagtccgttgatccgcgactcatcatcttgggcggtggcatggccaaaaccggcgaaccattggtcgaggtgatcacggctgagctgcgccggcgcgaatcgcaatgccgattcctcgaaacgctggacctgccggcccggctacgtctggcacctgtcggccaaccagtcggagccatcggtgccgccatggcggcgtagcctggcatagtgccggggcatgggagatgaggcctcagatttgtctccgaggccccatctcccgcgcagtcctatatcgctttatgtcgtgctgtgccgcgcttggtcttgcgcgtttcgttgccggggtgaccggcttttatttggccaagtgttggaagaccacggcgatggcctcgccctgtacggtgatgtcaggtccgcattcgcagcgccgaatcaccgtgtgtttgtggaaggacgaggatgtggcggcatccagatattgctgggccgcgccgatgaacgtcgcgttgatgatgttcggctggccatagacgcatacgtctgccatatccaaaaggcccacaggcatggccagggcttggccaagatagcggcccgcccgagcaaggataccctgatgctgctccacgtctgctgcgctgagttgcttcttcaatgcggttccggaaatcatcgtctccaagcaaccgtgcttgccgcaagggcacagcggcccgtcaagatcgatggaaatatggccgagctcgccagccgcgtgcagttcgccgattaccggcgtgtccgagagcagaatcgccgaaccgatgcctctttcgatgcgcacgaaaagcatattcggcccgccttggccaaagaaacgttcggtgagcatggctgcggtggcgtcgttgctgacgtttacttcaagtccgaaatgttcggcgattggcgtggacaggtcgagattgttccagccgcgcatcgtggaggagcggaccacgccgttgtctaccacgccgggggaggcgactccgatgccgatgacctcgccatcggacatgcccagcatcttctcaatgagctcgatgatcacatccacggaaacgaatgagccggtgttcagggtgacttcggcgtgacgcagcggctggccgagcagattggtgactgcgccgtgcagcaggtgctcctgcgtcaggtcgatgctgatgatgcgcagtcgatcgatatcgatgctcagcagtgtgcctcgtttgcctttgccgccgctgggtgcctgaccggtctcgcgcagcaatccttcctccagcatccgaccgaccacatcggaaacggccacgcggctcaatccggtgcgtcggccgagctcggcgcgcgaatactggttggtggggaacaacaacctgaagataagttggcggttcttgcggcgcacatcggcgggggaagccttggccgcatggtcgtcggtcgttgtgttgagaccgagatatgacatgtttcctcctacctgatggtgagcgagtggacggcgattgttgttccatacacagcttagacggtgaagcgcaatttcgtcgttgaaactgttatgaaacttcactaataaattccagtgtacctgtgtgaagcgtcaggaaacaccgtgagtgttcatgaggtccaaaattgttactatcattaacaaatagcgaatcaccaatcggcgctacgccgaacggtggttggaacgccgcgcgcacccggacgtgacaaggatgttgccattatccgcaagacgggcggcggtacagcgactcgcatcgggcgggccgcacggaactggaggaaaccgatgccggaaatcatcattgtcaagaacgaagccgaggccggcgagatctacggccgttgcgtggcggacctgatcaaagcaaagccggacgccgtgctgggcctggccactggctccagcccgctggccgcctatcaggcgctcgccaagatcgtcaaggacgaggccattgacgtttcgggcgtgcgtggtttcgcgcttgacgaatacatcgggctgccgctgacccatcccgagtcctatcatgcgaccatccatcgcaccgtggtcgaaccgcttggcctggacccggccaaggtccatgtgcccggcgacgtactcaacggcactccgctcgaagacggcgacaaagtcgcgctggccggcccggcctatgatcgtgccatcgaagccgctggcggcatcgacgtgcagatcctcggcatcggcaccgacggccacgtcggcttcaacgagcccggttcctcgttggcctccggcactcgcgtcaagaccttggccgaacagacccgcatcgacaacgcgcgcttcttcgacaacgacatcaaccaagtgcccacccactgcatcacgcagggtattggcacgatcatgaaggcccgtcacctcgtgctgctggcgttcggtgccggcaaggccgaagccatcgaggagacggtggaaggcggcttgtccgcgttctgcccggcttccgcgctgcagatgcacccgcacgccacgattatcgtggacgaggaggccgcctctcgtctgcgccacaaggactactatcgctacgcctacacccacaagccggcctggcagggcatctgagttatcgtgtgctggcttccctctttgtgtgaggggagctgtcgaatgtaatgagactgagggtggttatcggcggcggcatatgtgtattgcttcccgattggaccaccctcagtctcgtttcgcgagccagctcccgttggcgggagcgcatgagcggtaaggagaacaacatgtctgataggaacgagatagtctcgcgcgtgaccgcggcactggagggcaagccggctccggtggcgattcgcaacgcgcgcaaggtggatgcgtgcggcgaacggcgcggatattgggtcgtctccgatgccgccggcgtcatcgtggcggccggcacgggggaggaggccttcgagcactactgccgcacggtggggctcgacccggccgatcgcgacgcggtcatcgacgccgaaggccgtattctgacccccggctacgtggacatccacgcgcacggcgcatgggagaagagcttcgacgacgggtcggatggcatcgatgtggcgcgggccggccacgccgtgcacggcaccacgcgccaggtgctctcgctgatcaccaatcccgtggacgtgatctgccggaacatccgcaccgtccgcgccaagatggagtccggccgccccgacatcctaggctgtcatctggaaggtccgttcctggctctggcccgcaagggcgcacatgacccggaatgtctcaaggatccggtacccgacatcgtcgacgacatgcttgaggcttcaggcgcggcgaacggcaagattggctgcatccgccagatcaccatcgcccccgaactaccccacggcatctccgccatccgccagttcgccgctgccggcgtggtgccggccgtgggccactgcgacgccgactacgagaccgccaaagccggcttcgacgcgggcgcgggcatcatgacccacatgttcaacgcgatgaacggcttgcatcaccgtgagcccggtccgattccggccgctgtggaggatccgcgcgtcaccatcgagctcatcaacgacggcttccacgtgcagaacccgatggtcaggctctccttccatttcgcgcctcatcgtacggcctttgtgaccgatgcgatggccgcaaccgactgcccggacggcgcctacaagttgggcgcgctggatgtgaacgtggtcgacgggcatgcgcgcctggtctccaacggcgccatcgccggctccaccctgctactggaagtcgccgtgcgtcgcgcggtgtgcgaactgggcctgagcccggtggacgcggtcgaggccgccacgttgactccggccaaggcgttcggcttcgaccggccgaacccggtcaccggggtgcctatcggcctcatcgcccccggcttcgccgccgatttcaaccttgccgatccgaccgattggacggtcgaacaggtgtggtgcgcgggccgcaagctcaagtagcagtaggccgaccggttgacgaatggaaagcattcgtctacaagcatgttcaaatggtgacatgatagcatgttcatctcaccatttgaacgttattcacgtcgtaatacaagaatccgtaatactgctcgataccgcataaaaccggccatggtcgccacaagcgaaacataagtcgatggctgtggaaacgcaggagtaacacatcctcaccatagtcaggcggtaatccacgcccgcagtgatggcgtggaaacaagttatgagagaggattcctgttgaattccaagaagattctggccgccgccgtctccgtggccgccatcgcatccctgaccgcctgcggcggtgtgaaggatgacaccaccgcaggcgccgattccggcaacgccatcaccatcggcaccaccgataagatcaccagcctggaccccgccggctcctacgacaacggctcctacgccgtgcagatccaggtgttcccgttcctgtatgcccaggactacaacacctccgagctgagcccggacatcgccgccgatgacggtacctggaacgatgacggcaccgaattcaccgtcaagctcaaggacggcctgaagtttgccaacggcaacgacctgaccgcttccgacgtcaagttctcctacgaccgcatcaagaagatcaacgacccgaacggcccgagctccctgctcgccaacgtcgaatccgtgaccgctaaggacgacaccaccgtggtgttcaaggattccgtgcctttcgacgtgactttgaagcaggtcatgtccagtcccgccggcccgatcgtcgatgaggataccttcgacgccgacaagctcaccgacgccgacaccatcgtctccaagaaggccttcgccggcccgtacacgctgaccgccttcaagatcaacgagtccgccgcctacgctaagaacgactcctacaagggcctgaccccggccaagaactccgccgtgcaggtcaagtacttcgccgacgcctccaacctgaagatggccgtccagcagggccaggtcgacgtggcctaccgctccctgagcccgaccgacatcgaggacctctccaaggactccaaggtcaaggtcgtcaagggcccgggcggtgaggagcgcttcatcgccttcaacttcaagattcagccctacggtgaatcccagcccgacgccgacgctaacaaggccaaggccgtgcgccaggccgtcgccaacctcatcgaccgcgaagagctctccaccaaggtctacaagggcacctacaccccgatgtactccttcatcccggacggcctggccggtcacgatgacacgctgaagtccgcctacggcgacggcaacggcaagccgagcaccgagaaggccaagaaggtcctcgccgatgccggcgtcaccaccccggtcgacctcaagctccagtacaacagcgaccactatggctccgcctccgccgacgagtacgcggccttgaagtcccagcttgaggaaggcggcctgttcaaggtcgacctgcagtccaccgaatggacccagtactccaaggaccgcgtggtcaccgacgattccgacggtgtgtacccggtctaccagctcggctggttcccggactactccgacccggacaactacctgtccccgttcttccgcgacggcaacttcgtgaacaacggctactccaacaaggaagtcaacgacctgatcgtcaagcaggccggcgagaaggatgcctccgcccgtgaggacatcctcaagcaggtccagaaactcgagaccgaagacctctccaccatcccgctgctgcagggtgcccaggtcgccgtcaccggcacctccgtgaagggtgtcaccctcgacgcttccttccgcttccgctacgcctccgtcaccaagggctgatccagcatgagctcccctctttgaggggggagctgtctggcgacggcagactgaggggagcccaactcgtatgactcccctcagtcggcttcgccgccagctcccctcggagaggggagcctttattgctttatataccgattaccaacaccaaggagcatcgcgtgtcagacagcgccacagcgacctccagcaccactccggcgaaagccaagacgaagaagaaccgactgtcaggtagtttcttccgcttcgtgctgacgaggttcctcctcattatccccaccgttttcattctggtcaccatcgtgttcttcgtgatgcgcgccaccggcgacccgatttccgccgccctgggcggccgcctgacacccgccgaactccagcagcgcatccacgcggccggctatgaccgcccgctgatcgtgcaatacgtcgactatcttggcggcctgctgcacggcgacctcggcacgacgctgaccgataaccagccggtgatcagcatccttacgcactacggtgccgccacattcgaactggccttcctcgccctgatcgtggcgctgatcgtcggcatcggcctgggccgactcgccgcccgcaaacgcgaccgtgccgccgacgccggcatccgcatcttcgccatcctgtgctacgccaccccggtgttcttcctcggcctcgtgctgaagctcatcttcgccgtctggctcaacatcctgccagcctccggccgctccgacctgaactccgaaatgcagttcacccgtctggtatcgccgaccggcttctacatcatcgacgccatccagctcggcgacatgaacgtgctcgtcgacgtgctgcgccacgccgtgctgccggccgtcgccctaggcctgctgaccgccggcgtgttcatccgtctggtgcgcaccaacgtcatctccacctacaattccggctacgtcgaggccgcccgctcgcgcggcgtctccgaaaagcgcctgctcaacaagcacgcctggcggccggccctgatcccgatcatcaccgtcatgggcatgcagatcgccctgatgctcgccggtgcggtcctgaccgaaaccaccttcgaatggaagggcctgggcttcatgctgtcccagtacctgaaggcccgtgacttcgtggccgtgcagggcatcgtgatccttatcgccatcatcgtggccgtcgtcaacttcctcgtcgacgtcatcgccgcgcttatcgacccgagagtgaggtactgagatgaccaccgcatcctccgacaagatcaccgtccccggtgacgaccgcctcaccaagctcaacgtcagcaccaagacgccgttctggaccaagattccaatcatcaaggaactgcgcgtggcggtcggctggcagaagggcatgctgatcaccggtctcgcgatcaccgcgttcttcctgctcgtggccctcttcgccccgctgatcgccccctacggccacgcccagatcaaggccgccgacggcacgtccttcccggcgcaggccgcgccctccgccgaacacatatggggcaccaccgccgccggattcgatgtgttctcccgtgtggtgtggggtgcccgcaccgccgtcatcgccatcgtcgtggccgtgctgctctccatcttcgccggcgtgctgcttggtctggtgtccggctactacggtggctgggtggaccgcatcctggtgatgatcgccgacgccgtctactccttcccctcgctgctgctcgccattctgatggccatcatgatctcccacggccagtccggcctgtggagcggcatcctggcctccggcatctccatcaccgtggtgtacatcccgcagtatttccgcacaattcgcgccgaagtgatccgcatcaaggaatccgcgtatgtcgagtccgcgcgcgtggtcggcgcctccacctggcgcatcatgaccaagcacctgttcaagaactccacccgcacgctgccggtgatcctgacgctgaactcgtccgaagccatcctgaccctcgccggcctgggcttcctcggcttcggcatcgagccgaccgccgccgccgaatggggctacgacctgaaccgttcggtttccgacgtgaccgccggcatctggtggaccgccgtgttcccgggcatcgccatcgtgcttatcgtgctcggcatcacgctcgtgggcgaatcgctcaacgatctggccgacccgcgtctgcgcgcccgcaagtccgccggcgaagtggtcggatcgatcgaagacacgtccgtcgacccaaacgagaagccgtccgcacgcaacgaggtgatcgccgaactcgacgcgaacgtcgacccgccggccaccgtcaccgaccatgacccgaccatcgtcgcctccgaatggaccggcgaaggcaagccggaaagcaaggagtgagagatgagcgaagacaacaagaatctcgccgatatcaaggacctgtccgtctccttcatgaccgacgccggttccatcaaggccgtcgaggacgtgaacttcaccattccgcgcaagaccgtggtcggcgtggtcggcgaatccggttccggcaagtccgtgaccgcgcgctccatcatcaagctgctgccggagacggccaccacctccggtgccgtctacctgtccaagcgcgatggctccgattcgctggacgtgctctccctgagcggcgaacagctgcgcgaagtgcgtggttccgaggccgcgatggtgttccaggagcccaattcggtgctgaacccggtgtacaccatcggctggcagattgaagagggcctgtgcgcccacggcatgaaggacaagaaggaactgcgcgccaaggccatcgacatcctgaagaaggtcggcatcccggatgccgaaacccgcgtggactactacccgcaccagttctccggcggccagaagcagcgcatcgtcatcgccatggcgttggtgctgaaccccggcctgattctggccgacgagcccaccaccgccctcgacgtgaccgtgcaggccgaaattctcgacctgctgcgcctcgcccgtgacgagttcgacgcctccgtgctcatcatcacccacaacatgggcgtgatcgcggacatcgccgaccaggtggtcgtcatgtaccgcggccacgtggtcgagcagggcgacgtggagcagatcttctaccatccgaaggacgactacaccaagcgactgctgggtgccgtgccgcgcatcggtcagaagctggtcgtgcgcgaccgcgagggcaagccgatcgagcgcaaggccgattggcgcgaacagccgatcgccgttgaggccaagaacctgaccatcacgtacccgggccatctcatgcagcccgacttcaaggccgtggacggcgcgaacttcaccatccaccgctccgaagtgctgggcctggtgggcgagtccggttccggcaagtccaccaccggccgtgccatcgccggcctgcagaaggtgtccggcggctccctgaacgtgcttggcatcgagatgaacggcgtcaaggagcgtgacttcaagcccaagcgcgcggacattggtttcgtgttccaggatccgggctcctcgttcaacccgctgatgaccatcgcagagaatgtggccgagccgctgctcgtgcaccacaagtacggttccgtggccgaggccaagaactatgtgggcgacctgctggagatggtccagctgccgcgcgcctacatgaaccgtttcccgcatgagctgtccggcggccagcgccagagggcgtctttggcgcgtggtttggcgttgaagccgtcgctgctgatcgccgatgagccgacttctgcattggacgtgtcggtgcaggccaaggtgttggagctgttcaagcgactgcaggcggaaatcggcttcgcgtgcctgttcatcacccatgatttggcggtggtcgatatgctcgccgaccgcatcatggtgatgcataagggccagatcgtggagcacggcgatgccgaccagattatgcagcacccggagaacccgtacaccaagaagctgctggcctccctgcccgtgcccgacccgcgcgaacagcagcagcaccgcgcccacctccacgagctcctagcccaagaggcgtaatcgcatagcattggagctccctcgtcagagggagctaactttatatccgctagtactgctgcccatcgaactggaacagggcgtgggcgtcgccgtgctttttgttctcgatgtaagtatggaacagctccagccgctcgctcgtgctggccgccaggggagtgggcaggtcatccagatcgaaccagccgacgctgaggctttcctcgtcgcccacgaacggctcggcattgccgccgggcttcagggcgcacaggaacgaatgatccatgtacatggtgttgtcgccattggcgtaggtcagcaccttgtttgacgaggtgacggccaccaaatcggtgacgatggcatcgatgcccgtctcctccttgatttcgcgcaccaccgtgtccgccggctgttcgcccggctcgttgatgccgtagaccatcgcccattcgcccgtgtccgaacgacggcccaacagcagttgaccatgttcgttcagtacacaaccggtcacgccattgagccatagcagatcatggccgatcttcttacgcaattccaacacaaattccggagtaggcacattgcctccttagtagaaaaaaggagctccctctgatgagggagcttaagggttacttggcttgggcagcctgcttaatatggtgcgcttcgcgcatgatttcattttcctcgcgcttgtcagcgttcggcgtcgcctacaatcagtccaccggactgattgctttacggctccgcatccacgcttcgacgtcgtcgatctgcttcgggatgccggcggaaatccattcggggccgttctcggtcatgagcacgtcgtcctcgatacggatgccgatgccgcggtattccggcggaatcagcagatcatcctcgcggaagtacagaccgggctcgatggtgaagatcatgccgggcgtgatcttcgcgccctgataggactcatagcgggcctgcgcgcaatcatgcacatcaagacctaggtggtgggccacgccgcaggcgagccaacggcggtgctgctggccttgcggggacagtgactcctcgacgctcaccggcagcagaccccaatcgtgcagacgctcggcgatcacacgcatgcaggcgtggtggatgtcggaataggtggcacccggcttggcggcttcgaaaccggcctgctgcgagtccagcacggcctggtacagacgcttctggaagtcggtgaacttgccgttggtcgggaaggtgcgggtgatgtcggccgtgtacagggaatcgacctcaacgccggcatccaccagcagcatgtcgccggtcttcaccacaccggtattgcgcatccagtgcagaatcggggcgtgggggccggaggccacgatggagtcgtaaccgatggcgttgcccagctcacgggacacggcgttgaacgcgccttcgaggatacgctcggaacgcggcttgtcgagcgcggccggcagtgcggagagcagacggtcgaagccgtgcttggtggcgtccacggccttgcgcatctcgttgatttcgtagccgtctttgaccatgcgtgcctcggcggcgaactcgtgcagcttgtcgtcggatgcggagttcttgtccggatcggcgaaaccgttggcctcgcggatggactcgaccatcgaggtgatttcgggatcggtctcgctgaccacgcgcacacgcacggcgccggcctcggcacccacgtccttggacagggcgtcggccagctgggcgatgtcgtgggtctcgatgccggtcatcgcctgcatctcctggaggccagcacgcgggccaacccagtattcgccgtagtgggcggacatgaagaagtcctcggtggagttgtcggcgcgaggtgccacgaacagttccggagtgtgcgtcttgccggcggcggcttcgggggagtcggggtcgaccgggttcaggaccagcacggcgccggcctcgtaatcggaacccagaccggtgtagtaggcgaacgtggtgtccgggcggaacatgtaatcgcaatcattgttgcgcaccttcggctggccggccggaatgaccagacgctcgcccgggaaggctttgcccagcgcctcaaggcgggctggcgtgaacttggaggattcgagaggcttgatctccggatcatcgtcggcccagccggacttcataaactccttgaatgcagccgactgcgggcgcagcgagcggttgttcacacggtcgctcatcgactggttcgcgcccggcgccgtagcgcgctcctcggcctcatattccttgtccttggcggtgatcacttcacccattgccactctcctgtatgtagttgttgtcgaatcatcgattcccacctcatactagtcggctttatgcgatgtgccacgattgacggctgacggtaaaaccaagtacggaatttggacggtcttccggacatgcccatatggcgagtgcatcgggctggaatgcgggcccgtttattgttctcggtagggaaggaggggcatgggctggagcttgccgattgatattggcatattttgcgggctgaatccatgtgaacccatgcgatgaaggttcatcgcatcacgggacccgctgctctgcggatgcctccatctggggcactctggctttgagcagttttacccgcagcggagtgcgttcgatgacgtcggcgtatgtgaaatggacgatttcggtggcaccggctcgtttcagtccctcgtcgcgtgctcgttccttggccaccacctcctgaatgctgcggttatcggtcatggctgggtccacgtatttttgtgtgccgtcgtattcggccactatcacgcgcccgtcatcgagcttccatacgaaatcaacgcggtgctcggtattcgtctgcgggtcggtcaccgttacctgaatacgcggcgtgaggaagcgatcctcgatgatggtgcctcgcgcgagggattctccaccattctcgctcctttcgtttgcatagcgcagcaggcggaatactcgggcataatcgattctccattgaacgcagtcggcggctatctcttccttggttattcccttggcaagggccgagtcaaagatcggcaacgcaaaccgaaaatcaaggtctatagcggcctcgaccaaggttctagccggtgatatcagggataggccggaggcctcgtaatgtgtcttcggattgttcatatcgggcatatagacatgtcgtaagcgctgatggcattgacgagatccatgatcggaagtcacgatggttatgcagccatcatgcaaatgccattgatgttcgaatccataagcacttactgccaccaagccgccaaaaacccactgaggatgctcttgcgcaagagcgcgggccatatgcaacgttcgctccggcggcgtcaaaccatcccagtatgcggtatttgcataaagactgggaatgccgtcatacactttcaacaactcgccactctgggcacggcggcgtagagcggtctgttccgcttcatttcttgaatagacgcatctcagctcattctgcgcggctgatatgagcgaggccactgctttgtgtgtcttcatgacgtcgagcgtagccggaacgaagcagcgtaagtatgaatttcagccattgtggttctagcctcggagcttggctgtcttggagtgagatattcccgataatttcaaggtattaggccgctaattcggaatagtggataacatacaaaacttatccaccatcagtaatgtcattcgaacaacgtgctttggggattcgaacaagatatcatcggcgaagacggatgtagctggtagagggcggcgaattgacggttaacggtgcttatgctttgtacgccgtcggtgctggttcagatattggctggcttctgtctgagtgtggaatctagcgtcggcgtgagtccaatggttgtatcgtggccgacgatttgctgcaatttattggcggcatagatccagggcttggacggctgccgacggtgagagcagtcataacagtgaatgagcctctgcgagttcaaaagatgatgtagcggacgtttgtgagagtcgtttccggggcaagacatggtcgattgacgacgttgaaatttctcaacgacggcagaatggcatgccttggcgaggagacgacactgagaggcgatggagtcgggattaatccaggttttggccagctaccgactcgcaagagcatcatagcgtcggtgtaccgccagaagctggcactgtaccgacgctgaatagcatcagcgtcgccggacatacaagttttggattgcagccgactaagaatgggatgccgacggcaagagccgcattgcaactatatgagatggcttcactgtgcgcgctgcaggaaaaggccgcccgcgcggcggcgacatatgagacggtttcactgtgcgcgcacgataaaccaccccggcggctaggatagagggaattgagggagtgcggctccacgcgtgaaggcaagaatcccgaaccatgcagggcaaacctgtgcgaggggagcttcctgcgcatgcggaagcggaatatatgcgggcatgcgtagacatgacgagaatggcacgaacacgtaagtggcatacgcactccgaacggttcaacagcaacacgagcagaggtcagaagaggatatgtcattcgagcatccgaatcggaacaacgagagcatgcgggacgtcgaactggacatcatgagccgcccgccggagcataacaccaccaatctggatctcgaccggatgaacctgatgctcgacatcctgggccacccggagcagtcgttccgcgtgattcatatcaccggtaccaacggcaaaggctccaccgcacgcatggccgaggccatctgccgcgcctacggcatgcgcaccggcctgtacacgtcgccgcatctggagaagatcaacgagcgtatcgccatcgacggccagcagctgtccgacgacgatttcatcgacatctgggaccagaccaaggatctcgtggccctggtggacgccaagatggaggagcaaggcaagccgaagatgagcttcttcgaggtgctcaccgccatggccatctggaagttcgccgacacgcccgtggacgtggccatcgtcgaggtcggcatgggaggcctgtgggacgccaccaacgtgctcaacgcggatgcggccatcatcggtccggtggacatggaccacatgcagtggctgggcgacaccgtcgaacagatcgccaccgagaaggccggcatcatcaagccgaactgcaccgccatcatcggcccgcagccgcatgaggaagccgtcatgccgattctcaccgaagccgccgaacgcaaccacgccatgctcgtgcgcgacggctacgaaatgaccgtgtccgaccgcatggccgcagtcggcggccaggtcgccaccctgaccacgcccaacggcacttacgagggcgtgccgattgccaagttcggcgagcatcaggcccataacgcacttgccgcgctcgtcgccgccgaagtggtgattccggtcaatggcccgctggacggcgacttggtgggcgaggcgttgagctcggtcaagattcccggacgcatcgaacagatccgcacctcaccgaccatcattctggatggcggacacaacgtgaatgccgccgaagccctacgcaaggccatagaggaaagctacgacttcaagcaactggtcggcgtggtcgccatgatgcgcgacaagcaggtcgaggaatatctgggtgttctggagccgatcctgagctccgtggtggtcaccgagaactcgtggcgcgagcgtgtgatgccggccgatgagctcgagaagattgccgtggacgtgttcggccgtgaccgtgtgatcaaggaagcgaacctgcccgacgcgattcagactgccgtcaacatggtcgatgccgaggacgagctgggcgtgggctacggccacggcgtgcttatctgcggcagcttcgtcaccgccggcgacgcacgcctgatgcttgaggagcatgccagccccacgatgaggcaggccatggccgtccatcagccggcggtcgacccggacgattcggatcggccggcagacaaggccgaggatgaggccgccgacaacctcgaggattcggtgagcccggacgacttcgacgtgttcgacgtcctcggcctcggcaaggaacaggccagtgacgccggtaacgccggcaccggcacggccagtgccgacacaggcaccgacgattccgccgacgtccggtaacccgcatccaaggcacatcggatacccggacgcccgacatacggaaaacagtctcacgccatgtatctcaaggaactcaccctccgcggattcaaatccttcgcctccgccaccacgctgcgcttcgagcccggcatcacggcggtcgtcggccccaacggttcgggcaagtcgaacatcgtcgacgccctgacctgggtgatgggtgagcaaggtgccaaaaaccttcgcggcacttcgatggaggacgtgattttcgcaggcacgtcctcccgcccgccattgggccgtgcacaggtgagcctgaccatcgataattccgatcacacgctcgatatcgattacacggaagtcaccatatcccgcaccatcttccgcaacggaggctccgaatacgcgatcaacggctcgcaatgccgtctgctcgacattcaggaactcctctccgataccggtcttggccagcagatgcacgtgattgtgggtcagggacgattggatgcgattctgaaggccgacccgtccggtcaccgtgcgttcatcgaagaggccgccggcatcctgaagcaccgcaagcgcaaggaacgcgcgttgcgcaagttggccaataccgaaacgaacctgagtcgacttgacgatttgctgggggagattcaccgccagctcggccccctcggacgccaggcacgcatctcccggcgcgccgacgcgattcagatatccgtacgcgacgcccaagcacgcctgtatgccgaagacgcccaacgctcgatgaaccgccgcgacacggtacgtcaagagcttggcgatgtgcgcaaccagctggccgtcgcccagcgtgaactcgcccaagtcaaagtacgcatcgaacaggtcgaggcgttgagctctgaatccagtccggccatcgccaaggccaaccaatactggcatgaattctcacagacccgtgaacgactgaacgcgctcgcccagttggccgaagagcgcagccggtcactcaccggccagatcgtcaccaacttcggtgaggatcccggcatgctcgtcaaacgagccgaggaactggagtctcaggccgcggcacaaaccaaggccgtggccgatgcacgcatcgcactcgacaaggccaccgaggaacgcgccgacgacgagaagaagcttgcctcagtccgccagacattgactgaactgcgcaaaaccgcacaggagcgcgatgcgcagatcgcccgactgcgcgaactcatcgcccgcgaggaatccgccgtgcaactggcgaccagccgcgccaaggattatgcctcccaacgcgacttgctgacttcccagcgcgacgatgcccagcaacagctggacgcattgcgcagcgaagcagactccattgccgacgatgatggtgccgcattggacgccgcgcgtgcaacgctcgccgaatgccgcgaacgactgaacgaactcgccgataagcagcgcgagatacagtccaagatcatctcgctcaaatccaaggccgatgcgcttgccgacacgctaggcagccgcaatgcctccggatcattggaacgcgacacggacgtggcctcgcttggccgactcaccgacttcatccatgtggccgaaggctgggaagaagccgtggcccacgcgctcgaccagtatgccagcgccatcgtggtacccgaggcaggcaacatgttgcacgccctcgaacgcgctcgggaagataagctcggcaaagccgtggtgctgaccgcgagcattgccggcgatcccgccacagagccaggcacggagtcggaggagagtagcgccgagaacacggcggccgccccgcaatcgggcaacgcgctggcagcactcgtcaccgcgaacccggatgcaaagaacccggcacaggccgaagctgtcgtgcacaccgtgcgtctcctgctggctgatgtagccatggccggcaccgccgacgaagcacagcacatcgtggcatccggcgaagccatgcgggccgtcaccaagaacggcgagaccttcacacacggcgtggcggcggtcggcggctcttccatctctcaatcggacctgtctctggccgcccgtcgagacaaagcattggcacaggtcaaacagttggccgcccaagacggcggaatggctgagcaagtggccgaggccaaagccaaacgcgatgaagcggcccgactcgtcgaccaggaatccgccaaacgcaccgaagcccggctcaaagcccaacaggcggagaaatctctgaaatccgccacggatcgcatcgcatcgttcacccgtcagcttgagcagctggataggaaaatcaccgagacccaagagaatcgcaacgagcatcagcgcaagctcgacgatctcaatcgcgctttggcatcggcccggcaatccacagcggaacatgccgatttcgacgaacttgatgaacgtgaacgcacgctggagcgcggactgaacctgactcgcgagcatgaggtcgccgcgaaaatcgcgtggaccgaagcaagccgcaaaggggagtcactgagccgacaggccgggctgctgcgggacaacgccagagaagccgccgaacgccgcgcccgcatcgaggcgttgaacgatcgcagacgcgagcaggccgcacacctgcaaggcgtggccgatgacgcgcgagcagtggccgccatggtggaacatacgctgcatgacgtggccgccaaacgagacgagctgcaggccgccgcctccagccatgacgaggaactcaaggccctgcgcgcgcagcgcaaccagatcgagcccaaggtcaccgatctgaccgggcgcgaacatgccttggatgtaaaccgcgaacggttggccgccgaatccgggcagctcatgcaaaaagtgtccgacgaactcggtctcactttggaggaattggttagtggttacggccccgaacagccggtgcccgtgctggatgatgagggcaaccctgtgccgttggatgagacggaagctgaggctgggaccgaagagggagaaaccgggggagagaccggcaccaacggcgattccgccctctttaagaccgtgccgtataaccgtcaggagcagaagaagcgtctcgataaggctcgccgcgatctggccgcactcggtaagatcaaccctttggccaccgaggaattcgaagcgcttgaggagcggaacaagtatctcaatgatcagcgcaacgatgtggtcaaatcacgtgacgatttgatgcagctcatcaaggatctcgattccacgatggtccaggtgttcaaatccgcgttcgacgataccgccgaggcattcgagcagatgttcgccacgctgttcccaggcggcaccggacgactgcgcctggaaaacccggaagacatgctcaccaccggcgtactggtcgaggccagcccggccggcaagcgcgtcaaacagctgagcctcctgtccggcggcgaacgttcgctgaccgcgctggcgctgctgttcgcgattttcaccgcccgccccagcccgttctatgtgatggacgaggtcgaggccgcgttggacgacgtgaacctgacccgtttgattaatgcgttcaatgagctacgcgcccatgcgcagctcatcatcattacgcaccagcaacgcaccatgtcgattgccgacgcgctttacggcgtaaccatgagagccgatggcgtaacagccgtggtgagtcaaaaactcgaacgataaacgaatggttcccgctgacaggaactggtaccacaggtgacagagggcggtccatatcgaaagaccgccctctgtctcgcttcgttcgacagctcccaccagcgggagcggggagaggtattagcgcaatgccttgcgcacgccttggatggtttgcagcgtcttgtagaagaccttcttgatgggtacgtcgcgggcgggggccaccggggtgatttcctcggtgaacttgcacttgaactcgttaaggcccttgagagacggcgcgaagtcggagccaatgcccatgagatcgtattcagtaataccctgcgatcctaggatgcagcattcggaatacagcagcttgtcggtcacatgcagacgcataacctcgttgcgcatgccggcatagtagcgcaccgcatgcgtgccgttcacggtgacaatcgaccatgccaccacacggtcttcaatacgtgcggcgaacacacggcaatgatcggcacccaacgcgccgatcatatcggaatagtcgctcatcggagcaggcgtgaatccatcgcgctggccggtctcgaccatcacatcgtaatattcggagaaatcggccagcgccttatccgtctcatcggcaacctcggccgggcattcacgtagagacttgcgcacgtcacggcgtccacgacgcttcatccgagccagaatctcatcatcgccaccagtgacgtcgatgaccacggtctggtcgtacggcactgtggacagcaccttctccgtaccatcggcgaaccaggtgtcgatacgcaggaacgcgatgctcttgtcggccttcttgacggtgtccacgatggcgtcgacgacctcgcgctcctcagcctcggtgggcttggcgacccacgccggcccatgcatcgagcgcagataatgataaccgtgcgtctcaaaatcgataaaggagatcacggcgaccaattcaccatcacgcttgatcagataatcgccccatggcgtgcgtccgtcgatatccgcctgaaaaccagaccaaaccttggtctgttcgataggcaacgtgatgccggccttctcggcttcggcttccagtgtggctccgtcaactttctccaacgtgatcattacgattcagctatcctttttcgtttgtatccgtatgtcgtgtttctggtttggtcgtattgcgcgtgatctgatgtgggctaatcgggatccgatcaggatttgattggccggaatcccgtcacaagccaaacatgcgttcgacgacgtgatcgtcgccgtcgaacggcacatgcttgcgatggtccttgatccaacgctcgttgcccttgccgatgatcagcaggatgttgaatcggtcggcgtgcgcacgggcatcgtaaatggcgttggtgatggccgtcagacggtcggaaatcaccgtggagaccacatccttgttcgtgatgtagccttgcatttccatgcagatgtcgatgatcggctcggtgtccgtatcttcggcggtgaaaatgaagttcgcgatacggttctcggcagcctcgacgatttccttacgacgatcgtaggccttgttgccggccgatccggtcaccagcgtgatacgcgggttttcctcgccccaacgctcgtagacgaagtcaagcagcgcggtgacggatgcgtagttgtgcgcataatcgacgatggcgagcgtgtttgactgcgggtcgcggaactgttccatacggccggcgatacgtacggattcgatggcgtgcagtgcgtcggcgtcatcgagcgatacgccaaccgcatgggcgatggcgatggctgccgccgcattgaggtagttgaagtcgccatcgatggacagatggtagtcgccaagggcctgatctccgtcggcgatgtggaaggaggcgtgcgccgtgtcggcgggccaggcgacgacgtccgcactggtgccggcattatccgcgtcatgcagggcgaaggtggtcacgccgatgccggctgcctccgcgtcctcccgcaacagatcggcgtgcagactgtccgcgccgagtaccagcgacttcgcgttggcgatgatctggcgcttgcaatacaggtaatcctcgaacgtggggtgttcgatcgggctgatgtggtcgggggagatgttgaggaacgcggccacatcgaaagtcaggccatagacgcggtccaccttgtacgcctgggaggaaacctccatcaccagatactccatgccgttatcggccgcctcgcgcatcatgcggaaggcgtccatcgattcgggcgtggtcagatcggactcgacgtaggtgtggccgtcaaggcaattatcgaccgaggagaacaatgcggccttgccgccggagacggcgttgataagcgcctgcgtgaagtacgaggtggtcgtcttgcccttggtgccggtgacgccgatgaccgtgagctcgttctgcggatatccgtagaacgcggcggacagcaggctcatcgccttgcgtgcgtcgctgacgatcaggccgggggcggcggttgcggctgagtactcggtttcggccacgtatgcggccaggccggcttcgtcgatgccgttcagatactcggccttgaatcggcccttgcagcacagcagggcacccggcgtgaccttgcgggtatcgtaggtgatgccggcgaacggttcatccgccgaagcgatacgggccgggtcgtcggtccagacatccccttggatgatttcacgcagcagatggtgttccttgagcaggtcagcggccgaagccaaagtcaaagccataattgttactccctattatctagccgatacgccattctacaggtggggtgcagcgtgttgtgactcacacgtcatcgaccacgatatgggcacatgatttgattagaatggtgaaccgtgacgacaagcgaagcaactacgcaatccgggcagtcagccggatcgggcgagtccatggcagccaagcgcgccagattcgagcagctcgccatgcccgccgtcaatgcactgtaccggcaggcgatgaggctgaccaacaatcccgatgacgcgcaggatctggtccaggacaccttcgaacgcgggttcaaggccttcgactcatttcagccgggctccaacttcgaggcgtggatgaccaccatcgagcgcaatgcctacttcaaccagtatgccaaggccaagcggcgcccgcagcgtgccaacgactccactggcgaatacgacgattgggacatttacgatgccgccgaacatacgtcggacgggctcaagtccgctgaagaggaatatttggacgccttcgcgcccgaggaaatcatggccgcgctcgccaaactctcgccggaacgccggcaggtgttcatcgacgccgccatcgacggcaagtcctaccagcaggtggccgatgagcagggcgtgaaaatcggcacggtgatgagccgcctgaatcgcgcccgcacgcaactcaagcgtgagctcgcttcgtatgcgaaagagcgcgggtacgtgactggttcgtcggctggttcaccatccgcgaagttgggcgaaaacgttggtcgaatcgccgattccggccataatggaagtagtgaacaaactgttggtagcaatggcgacacgcaagccgtagtgagacatagtcatgcgactggcgcccacacgccacaacagtcaagcaagctttcgggaaaggagatctgatgaacgatcagccggtagagcgtactcgccatatctccataacccgtacgggggccgatggcatggtcagccagaccgaagtgcatatcacggcggtgcatcatcgttcagtggataccggctcggcctctgcgtcggtccaggcggacgtgcatatcgttacggagggcgactgttttgaccctcgtacctgctgcgacgagcgtgaacaggcgttgattgccgcgttgcgtgcctacttgcgcccggatgtggcacccgaatgtctgatggcccggctcaaggccacgcttgatcactgctgcggcgaagataagtaacgacatatacaacaaggcccgtctgatgtatcatcagacgggccttgagcgttctataagaaacgcgaagaatcaggcgttaggacgcttgccgtggttggcggccttcttacgacgatccttgcgcttacgtccgcgcatgcccatgatggactcctttgctgcagtaaaaaaataagccttcggaattatgccacataagtacgacgtgatgcaacacgggtgtccatgtggcgatgatcgtcaggcttggttattcggtttttcagatttgttcggcgtggaaggtgaccacggtggtgtagtcatcgcccggctcgagcacaaccagatccttgccggtgcggaaggcgtcggcgtaggcggtcatcggttcgacggccacgccggcctgacgagccttcccgccgatttcgttgccggtgcacacctgccaggagttgatggtcttgtcgccggtcagcgtgaccttgatgccgtcggggcgggtgaacacggcggaagtgctgccgtcttcgccgcggttggtgatatcggtccaggcatcgtcgaagccacgtccctccagcgtggggttatcgcgcaggtcgaagatgccggaaaccggctcttcaccggtgggcagcaggtgttcgtctacggtcacgtgggtatcgcagtgcagctcaagacggcaggactcgttgtcggcggtaatggcctgaccggtggcgtgcttgccgtttgccagccacgggtggatgccaaatgcccatggggccttcacgctgtcgttgttgtgcacggtgaaggtttccgtgagaccgttctcgtcaagtgcataagtggcggtgatggtgatatcaaacgggtagccggcgatgtcgggggaacgccaggagagcgtcacatgtgattcctgcaaatcaacgagctcccacatgtagcggtaggcgtagccgtgcagggaggattggcggtcgaactcgtcgattggcatctggtagtcttcgccatcgaaagaatactgaccattggtcacgcggttcgggtacggtgccagcacccagccgttgcagcaggggatgaccttgttcgggtcgaaggggacgatgaggtcttcgccgcgccacttcagctcgcgcaggctggcacccagttcggtgacgacggcactccattcgccggacgagatgacatattggttaccagtgcgaggcttcaaagccatagtgcacactcctttgtgaaacagattgttaccgctcacaatcgtatcgcataagtcccaagacgcggcggcacataaggataaaaaattggctcccctctggaggggagccagcgtaacggaactacttctggactacttcgtagcggaccacagtggtgtagtcgccattgggggcgagcgtcaccaagtggtcaccagtgcggaaggcattggccggggcggtcatcggttcgacggcgataccatacggatgctcggcgaacggcgcgccagtggcggtgtagcactgccaagcattgatcgtctcatcgccaatgagcttcacttcaataccgtccgggcgggtgaatgtggtggtggtcgtaccatcggcggcacgctccacgtcgacccaggcatcatcaaaggcgcggccttcgagcgtcgggccatcgttcaggtcgtagatgccggtaaccggttcggtgccggtgggaatcagcgcctcgttcaccgtcacatgactggcggccttgatctgcaggtggcaggcggcggagtcggcgtcacgctcggcggaagtcgcgccctgcttgccgttggccagccacggatgcaggccgagagcccacggtgccggctcgtcgccatcattgcgggcattgacggtcacggtcatgccgttgttgccgagttcgtatgtgacggtcacggtcacatcgaacgggtatccgtccaggttggggaagcgcagtgaaagcgtcacggcgctatcggtcaacgattcaagcttccacatgtagtggtaggcgtatccgtggttcgcgttgttgcgcggtgcgggatgatattcgttgaccggcgcgcagtaatgcttgccattgaaatcgtattcgccgttttcgatgcggtttggccacggggccagcacataaccgttacaggtgggggtcaggtcgttgactccgaacgggcagaaaatttccttgccttgataatcgaatcggcgaatcttggcgccgagttcgcagatgacggcggaataatcgccatagtgaatcgaatactgatttccggtgcgtggtgttttactcgtcatggaatcactcccgtagtgaggttggtgggccggtagctcctgctatcgctggccccagtctagcgcgtctcctctatcgaggcggggattggcgatagccggcatataataaacaattcgtacagacacggtagcaatacgtggagtgacgagtctcacaccatcatgcgagaagcacgtggattccttggaaaccggtgattcgtgggagacgcggaaaagttgtgacggcagattcctgtaatccctgccttacactggaaaacactattgacgttcaggaggttccgatgaccaaaagcgttgtgctcgctgatccgcgaggcttctgcgcgggtgtggaccgtgcgattcttaccgtacagaccattctcaaagccgcggaggcttccggaaagcgaacgcgcgaggatgggctgcccccggtatatgtgcgccggcagatcgtgcacaacaagcatgtggtcgaggatttggccgggcaaggcgcggtgttcgtccaggaattggcggagattccggatgctgctgcccaagcgggtattccggtggtgttttccgcccatggcgtatctccggtagtgaaggcggaagccgaacgtcgtggcatgcatgtggtggatgccacctgccctctggtgggtaaggtgcaccgtgaggtgctgcgtttcgtgcgcgaggggtatgaaatcgtctatatcgggcacaagggccacgatgaagcagtcggcgtggtgggggagaaccccgaacatgtgcacttgatcgagcatgaatcggatgtcgattcgttggattttgcgcccgacaccaagctggtgctgctctcgcagaccacgttgagcgtggatgagaccgccggcaccattgccgcgctgaaggccaagttcccgtggattcaagagccgccgagttcggatatctgctatgccacatcgaatcgtcaggctgcggtcaaactggtggcccagcagtccgattgcgtggtgattgtcggatcggccaactcctcgaattccgtgcgactgatggaggtggcgcaggagggcttggggaagcgcggcaaagcgtatcgcgtggatgatgccagcgagcttgatccggcgtggttcgtcggactggagtccgtgggggtctcctcaggtgcctccgtgccggacgaactggtgtccggtgtgattgacgctctgcaaaacttgggtttcaccggtatgaagtccgtcgaaaccatcaaggaaaacatgcacttcgtgctgccgtcggagttgcgcaggaagaagtagtcatccttggctcccctcaccgagggaagccaagaacggtcaccacgtgccgattggtgcggcaacggcgttcaagaccttgagcaggtcctgcgggttcacgcctacggacagtccgcgtttgccgccggagaccagaatctggtcgaattgcagggcgctttcatccaacacagtcttatgacgtgtcttctggcccaacggcgagatgccacctaccacatagccggattcacgcattgccaccttgggatcggccatagaggccttcttggcacctacagccgcagccagggccttcaaatccatatgtccgctgaccggtaccacgcccaccacacgctccgaaccggtgtccgccatcaacgtcttgaacacctgatgctcgtcgaagccgagcttggtggccgcctccacgccgtagccgtcatccatatggtcgttggagtgctcgtattcgtatacgtggaattccacgcccgccttctccagttggactgtcgccggggtggaacccgcgcccttatcatgcttgcttttctttgccatgattaccgttctactacgaagagacccccgcacaaggcgggggtctcacagcttagttctcaaacgaaccgtagcggcctagaccgcagtggttcactcggagatctcagcgaagtacagcagggtacgaatcatgttggaggtgaagccgtactcgttgtcgtagaaggacacggtgcgagccagggtcacgccgtcaatggtgttgacgtcggtctgggtcgggtcgaacacgccaccgtgggtgtcgccgaggatgtcggaggagacgatgccctcatcgttgtagccgtagtaatcggtgtcggagaaggcagccttgaaggcttcgttgatctcgtcggcggtggtctcggtgttcagaacggtggtcagctcggtgacggagccgtccggaacctggacgcgctgggcatggccctgcagcttgccgttcacggacggaacgaccttgccgatggccttggcagcgccggtggagtgggcgatggtgttgatggcggcggcgcgcaggttgcggccggtcttggtgccacgcgggccatcgagcagcatctgggtgccggtgtaggcgtggatggtggtcatgaagccggccttgatgccgaacttctcgtccagcagcttgaccatggcggccatggagttggtggtgcaggaaccggcggagacgatcacgtcggaagccttgaggatgtcgtggttcacgccgaacacaacggtcggggtggtgtcatccttggccggggcggagatcaggaccttcttggcgccagcgttgatgtgagcctgggacttctcggcggaggtgtagaagccggtgcactcgagcacgtactcgacaccgtcgttcttgacccacggaatgttgttggcgtccttctcggcgtagaccttgtattccttgccgtcgacgatgatggagtcttcggtggccttgacgtcaaccggagtgccatcgtcatgacggaaggtgccgtgggtgctgtcgtacttcagcaggtaagccagggtagccggggtggtcagatcgttgatggcggcaacttcaatgtcaccagcctggccgccgcgagcctgcagctcgaagatgcgacggaaggcgagacgaccaatgcgaccgaagccgttgataccaatcttaactgtcatgtaattctcccttgtagggtgcccgtggtgcgctctggcacaccgggccattgtttaccaacagttgctactgtaatgccgactctgtacacatggcaacgtttcagcgtgcgttttgggtaaaaatgccgtattttttgtgagcgctcacaatttggattgcccgcaaccgacatgtgattttcctctcctttggaggaatgtctcgaatcatcacgagcaagcgcgcggcatgcaagtcagcgaaccagcagcttggacacttcggtgtccagctcgccgatatcgccgccgaattcatggaatctgctcacctgtggcaacgccacttcgatggggaaggtgacgatcagtgtgccgcgtttcacgctgatggccgcgtccacgccgtcgcggaactcgttgctgaccccctgcaccaccgtattggtcagcgtgccgttcttgagctcatatttcagccccggttcgttcacgccaagcgaaacatcggagtgggagaacgccgacaccatgcggccgtcctcgggcaccggatgcgcggggaacgaaagcctaccatcggtgatggccgtgacgatgagcccgtcgccatacagatacccgcttgccccgtgtcgggccagcagcgccatcagttgaatgccggaaatcgtatggtcaatacggccgccaagcccgccgtacacgtgaaactcgcggcaacccgccgaccagccgaccttcagcgcggaaagcatgtccgggtcgtccttcaacgcgggcagcgcgatggtgcgcacatcggtgcggggcggccggccctccagcgaatcgaagtcgcccaccaccacatcgggcacgatgcccaactcgcgcgtatggtcgagtccgccatcggccgcaatcacatacgcaccggtgggaaccacgggcgtgcccgcatagtattcgcccgcaccaaaaatcacgcatacctgagtcattatgcctactgtagccggtatccacccatcgacacacggtccgcgaatgtccgggcatgtggtaagattcctatttggcttgagaaatcaagaaagcggggcaaccccacctggaagcctttcaaggcctcgggttcaaggcaaacagcctagcgattgcgatatacaacgcgcaatcaggaatgacgcaaagaactgatatgcgtctgcagaagctgagcgcatattggcgctggttttggcttgccatgaacccaaagcattgaacaggactccagcaaaggccccgccacggaattgaagtagaggattggagtcatcatcagcgacgaaccacgtattaacgacgagattcgcgtcccgcaggtacgcctgatcggcccgaagggcgagcaggtgggcgtcatcgcgacttccgtcgcgctgaacctggccaaggaggcaaacctcgatctcgtcgaggtggccccgaacgcgaagcctccggtcgccaagctcattgattacggcaagttcaagtacaacgagaagatcaaggctcgtgaagctcgccgcaaccagagcaccgcggaaatcaaggagattcgtttccgcctgaagatcgacgaccacgatttcgacgtgaagaagggccatgtgacccgcttccttaacggaggcgacaaggtcaaggtcaccatcatgttgcgcggtcgtgagatctcccgcccgattggtggcgtggaactgctgcagcgtctggccgacgatgtcgaggaatacggcaccgtcgagtccaagccgaagcaggagggccgcaacatcatcatgacccttgcgccgaagggcaagaaggtccacacccagtccgagcagcgtcgtcgtggcgccgagtcccgcgccgagcgtcaggctcgccaggcggctcgtctcgcggccaagcaggagtctcaggctcaggccgcggccgacgcgcagtccgcgatttctcagaagacttccgacaagaagcaaaccagcaaggagggcagcaatgccgaagatgaaaactaattccgccgcttccaagcgcgccaagatcaccggcaccggcaaggtgaagcatgtcggttccgccatgcgtcacaacctcgagcacaagtccgctcgcaagcgtcgtgaactgtccgccgacgatgtgctgcgcggcggccaggccaagaagctgcaccagcttctgcagaagtgagcatagggcttacccggaaataataagactttagaaagctgaggaatagattatggcacgtgtcaagcgcgcagtgaacgcccacaagaagcgtcgcgttgttctcgagagggcttccggctaccgtggccagcgctcccgcctgtaccgcaaggccaaggaacagctgctgcactcctttaactacaacttccgcgaccgcaaggctcgcaagggtgatttccgtaagctgtggatccagcgcatcaacgctgccgtccgcgctgagggcatcacctacaaccgcttcatccagggcctgcgtctcgccggcatcgagctggatcgtcgcgctctggctgagatcgccgtctccgacccgaacaccttcaagaccatcgtggacgccgccaaggccgccctgcctgaggacgtcaacgctccggttgaggcctgattgcttgaagtcgtgacttcacactagaaaccccgcttccgagcggggtttcctattattagcccccctctgacgaggggggctcccgcgcagcgggtggggaagagaacaaacacatgaccaacggattcaccaaactcacagagcagttcctcgtccacatcggcgtggagcgaggactcgccacggccaccgtcaccgcctacgaatccgatatcgccaaatacattgattggctcgaaacccgcggcatccccgaaccggacgtcataaccaaacaagacgtcgaagactacatcgccgcccttgaccaggcgggggagtccgcccgctccaaagcccgaagactggcctcgatccatgaattccatcgcttcgcgctcggccagcacgcggtgactgccgacgtttctgccgcagtcaaggcacccaaaggtgccagcaccctgcctgacgtactcaccgtggacgaggtaacccgtctgctcgacgcggcggcagccggcggctcaaccgatccggtggtattgcgggacaaggccctgctcgaattcatgtacgccaccggctgccgcgtctcggaagccaccggtgtgaatctggacgacatcgacctggacgagcacatcacgcgactcatgggcaagggctccaagcagcggcttgtgccattgggcagctacgcatgccgggccatcaccgcatacctcaatgcggggcgtggcgagctggaacggcgctccagcgccaagattcccgagagacgcgcactgtttctcaacaaacgcggcaagcgcatctcgcggcaatcggtatgggaaatcgtcaaagcaaccggggagcgggccggcatcaccaaaccactccatccgcacaccttgcgccattccttcgccacgcacctgatccaaggcggcgcggacgtgcgcaccgtgcaggaactgcttgggcacgccagcgtgaccaccacgcagatctacacgcacgtaagccccgaaaccctgatcgaaacgtatctgacctcacaccccagagcgcggtgagacacaccattttgcgacgcgtccgcccatagcggaatcgcggcggggggggagcaccaaagtcggccggaaattcaaggcgtgacaatacagtacataacagcgaaccgtcagccaggaagaggtattcatgctgcagatcaaatcgatctcgaagcgctataaaaccggtgatttcgttcaacaggcgcttgacaaagtcagcctgaacctacgcgacagcgaattcgtcgcgattctgggtccctcgggttccggcaagaccaccttgctcaacatcatcggcggcctcgaccggtatgacgacggcgatttggtgatcaacggcatctcgacgcgccaatacaaggatcgcgattgggattcgtaccgcaaccacaccatcggcttcgtgttccagagctacaatctgattcctcatcagacgattctgtcgaacgtcgaactcgcgctgacgatttccggcatcggcaaggccgaccgtcgcgaacgtgcgcgcaaggcgctggagaaggtcggactcggcgaacacatcaataaaaagccgaaccagctgtccggcggccagatgcagcgcgtggcgatcgcccgcgcactggtcaacgacccggacatcgtcctggccgacgagccgaccggcgcgctcgattcggacacatccgtgcagatcatgaacctgctcaaggacgtggccaaggaccgcctcgtggtcatggtcacccacaaccccgaacttgcggaacaatatgccacgcgcatcgtcaacctgcgcgacggcgtgatccgctccgactccgacccgtttgtcgtggatgagacggccgaacagccggccgtgcacaagacgatgggccgcgcgtcgatgtcgttcgtcacgtcgctggcgttgagcttcaacaatctgaaaaccaagaaggcgcgtaccctgctgacctcgttcgccggctcaatcggcatcatcggcattgcgctgattctatcggtgtcgactggcgtgaacgcatacatcagcgacatccagcgtgacacgatgaccgcctacccgatcaccatcgactcccagaccttcgacctgagcagcatgatgggcggccagatgggcggcgatgacggatacggcggcaagacgcacagaaccgacggcatctacccggacgaccgcagcgtcaagcaggcatccagcctgaccagttcgattaccgaaaacaacctgacccgcttcaagaaatacctggataattccaagagcgagattcaccagtatgtgggttccgccggtatccagtacacgtatgacgtgaaattctccgtgttcgaccacgaccccgatggcacgctggtcaatgcggacggcgtgacgatcggtgccagcgactccacttcaatggcctcgcagatggcgtccacaagctcgtccggcatgtccggcacctcgtcgatcacctcgcagcagatgtcgatgctgaccggcaaaaccgatgagaacgccgcgcccgactcgttcaatgagatcatgcctggagcggacgacagcaagctcgtaggcaaggtcatcaccgacaactaccaagtggtcaacggttcatggccgaagtccaaggacgaggtggtgctggtgctcgacgacaacaacagcgtgccgctgaccacgctgtacgagctcggcctgctgcccgcctccgactaccacgagatgatgtccaagctcaacgccggcgacaaggtcagcactccacaagacaagatcgactatgctaaggcgctcgaccagacgctgtacatgattccggcatccgaccagtacgtcaagggcgatgacggccactaccgattcatcggcaacgacaaggatgtaatcgaacagcgcctcgaaacggccaccaaactcaaggtggtgggcgtcgtcaaggcgaagaaggatgcttcggccacaccgttggccgctggcgtgggatacacgcgcgctctgaccaatgatctgatcgaccgtgcggcctccagcgccatcgtcaccgatcagaaggccaacccgaacacgaacgtgctcaacggcatgacgttctcgccctcggacgacgccaccaaggcggccgacgcgcgcacctacgtggtttcgctgggcgtgacgcagaaggcgaacatggccaagtcgatgatgagtgccgggcagcggtccggtacgggcgcatcggatgccgctggtgctggtgctggtgctggcgcggcgggtgccggcgatcaggccgacgcgatggccgcgatgagcgaacagcagctcgccgacagtttcgactcgtatatcgccacggcttcgaacgacgtgcttgtcgcgatctacgaccagtacgtgtcgaccggcacctacgacgacaacctcgccgcattcggtgtggtgagtcgtgacgcgcccagctcgatcaacgtctacgccgacagcttcgaagacaaggaccacatcgccgacgcgattaccgactacaacaacaccgtctcgaagaaagacaagatcacctacacggattatgtggggctcatgatgagctcggtgaccaccatcgtcaacgtgatttcctacgtgcttatcgcgttcgtgtccgtctcgttgattgtttcctcgatcatgatcggcatcatcacctacatttcggtgctggagcgtaccaaggaaatcggcatcctacgcgcaatgggtgcctcgaagcacaacgtgtcccaggtgttcaatgcggagaccggcatcatcggcctatgctccggcctgttgggcgtgggcttgaccgtgctgctcgatattccgatcaacgccgtgttgcatcacttcatcggcaatgcggacgtcaatgccgccctgccggtgaccggcggcgtggtgctggtgatcctaagcgtggtgctcacgctgatcggcggcctgattccctcgcgcaaggcagccaagcaagacccggccaccgcactgcgcaccgagtaagcgcatcgacatagtacgagacgagatccataaacctcggaacactggaatgcccgctgcaaaacggtgttccgaggcgagcccggcgagtacattaggataggcgagcaggtattcccggcaaagggggcgagggcaacgatggacgactggcgagacatccgcgataaagacagcgcattccgtcaaggaacgctgcctatggcgggaacgtatgtcgttgcacccccagcgaacccggatgttgataaggtagacagtatgcctaccgatttgcttggacgtgaatacgaaaccttccccgcacccgaaccgctgcaacagcacggtccggcgcgtgtcattgccatgtgcaaccagaagggcggcgtaggtaagaccaccagctccatcaatatcgccggtgcgttggcccagtatggccgccgcgtgcttatcgtcgatttcgatccgcagggcgccgccactgtgggactgggcgtcaacgcgaataccgtggagaacacgatttacaccgcgctgttcgatatttccgtggacccacatgatgtggtgcagcacaccgcattcgagaacatcgatgtgattccggcgaacatcgatttgtccgccgccgaggtccaactggtcacagaagtgggccgggagcagatcctgaacagtgtgctgcgcaagctcaagtcggaatacgatctcatcatcgtcgactgccagccatcgctcggcctgctcaccgtgaacgcgcttgccgcagctgatggcgtgatcattcccgtggccgccgaattcttcgccttgcgtggcgtggccctacttatgcagtccatcgaaaaagtgcagtcccgcatcaatcccgcattggaagtggatggcgtgctcatcaccatgtacaccaagacactgcactgcgaagaggtctgccagcgcatttacgaggcgttcagcgaaaaggtgttccacacgttcatctcccgctccatcaaactgcccgattccacggttgccgccgcgcccgtggtggtctatgcacctgagcacaagacatcaaaggaataccgtgaggtggcacgtgagctcattgctcgcggcatcgtggcgtaacgattgtttcgataaacgatgaatgagacttccctttctcggctcccctctctgagggaagctggctcgcgtagcgagactgaggggagctccgcggaagccgaaatcagcacggaggaatccgccacttccggcttccgggtcaacctcgaggtctattccggtccgttcgatgccttgctcggcatgatcgccaacaacaaactcgagctgaccgaagtttccctctcctcgatcaccgaggaattcctgacatacgtgcgcgggctcgacttcacgaaaaacatggatgaggccagcgcctttctcgacatcgcctctattttggtcgaggccaaaagcgtggcgattctgcccggcggcgaagacaaccagtacgacgagcaaagtctcgaggcgctgcgcgaacgcgatttgctgttcgcccgactcctccaataccgcgcctacaagcaggccgccggtgatttccgggcgcgtatcgccgccaatgccggccgattcccgcatccggcggccatggacgagggcattgccgccatgttgcctgagctggtatggacgctgaccccgctcgaactcgcccaactggccgcccaggtcatcgccaacgcgcccgcctccgaagtatcgatccaccagctgcacgtgccgctggtcgatctgcgggcccaatcgctggtggtgcgcgaccggctgattgcagcactggaatccaagggcgaccagtcgatgtcgttcagcgaattgacccgggactgcacttctcgtattgaggtggtggctcggttcatggccgtgctcgtgttcttcaaacaaggtgtgctgcagtatcagcaagatggtccgtttgccgaactgcacctgaggtgggtatccggcgtagacgaaacgatgaacgacgtgaacatttccgaaggcgattttgcgtaaggacggcgactggtgactgaacggattgacgcaacgaatgcaaccgagcacatggcggatgccgaatcgacggctgaatccgcaaaagccgaggtgaggggagtggaggagacgcgccccgaatacgtggatttcacggtagacgattttcccggcgggctgcccgcatgtctggaagcgattctgatggtcgccgaccagccgcagaccgccaccgagctggcccgcattttggcattggaccgcaacacagtcgaagaggcattgcaagccctgcacgatgactatgagggcgatgaatcccgtggcatccgcccgcgcggcttcgaactacgccgcaccgctcgtggctggcagttcgccagtcgcgccgcgttcgagccggtcgtctcatcattcgtcaccgacggccagactgcgagactcagtcaggccgcactggaggcgcttgccatcgtggcctatcgccagcccgtcacccgagcccaagtggccgcgatccgcggtgtcaactccgatggcgtgattcgctcgctcacggtacgcggccttatcaaggaagacggcgtggaccccgaatcccgcgcggcccttttggtcacctccgaatccttcctcgaccaaatgggcctgaagagtctcgacgaactaccctccctagcgccgttcctcccgcccgtcgccgaaatgacacagtcgaaatcggaagacacggacgtgatttcgtagcgattggggcccgctacctgaccaatattcgtgcgctagaccatccaatatgtgatttatggtcattgtgactataagtagtgctatgctctcaatgcggggagaacaaccggtatggaaagaggcatggcatgggattcggcaatgtgtccgagcgccgcagcgcaccgccacaggtcggcgtgtcagtggtgattctggcactcggcccgaaaggcgataccggcaacagtgccgccgattccggcaacgccgcgaactcggcccattcccgtctctggctgcccctggtcaagcgcgtccgtcagccgttcctgggctgctgggcattgcccggcggcgacctgcgctccgatcggtcgttggaacagtccgcctacgcggccctcgaatcgaccacagacctgcacccgcgatacctcgaacagctgtacacctttggaggcccgacccggtcccatggcggattgcccatggtatccgtcgtgtactgggcgctcgtcggccagaccgaggccgcgggcttcgaggatggtgacaacgtacgatggttccccgaagacgaactgcccgagctggcgttcgaccatcgccagatcatcgactacgcgctgctccgcctgcgctccaaaatcgaatactccgacgtggccacccgactgctcggccccacgttcaccctgcgccaactgcacggcgtctatgaggcgattggcggcgaaaccctcgacttggcgaacttccgccgcaaaatgcttgcctcgggagatcttgaagacaccggggagaaggtgcgcgaaggccgccaacgaccggccaccgtctaccgctacatccccaaacgacttgtcgagaacggtacgccccacgaatccgatggcgacgacatcgtggaactgtccagacaaggcgagcgtgaagacgctctcgacgcgctgattccatccgcgcgcatctgatttttcccgccgacccgcttcgggccggcatcacagacgtatataggaaaggaaccgctatgaccgcactatccactgcgccgtccgttgacgagatcatcgccaagctgggcgcgcaaagcacctgcgatgcaggactgacccaggacccatggcacttcgacaccaccacacccagctacggtccaggtgcctcgatgctcgaccgtctgcccgccaacgcgccgcgccagcaggtgctgccggacgaataccgcaaggcctccgacgaggagctgcagcagcgcatcaccgacgccaagcagcgtctcggctccaaactgttgattctgggccacttctaccagcgtgacgagatcatcaagcacgccgatttcgtgggcgactccttccagctggccaagaacgccaccgaacgcccggacgccgaccacatcgtgttctgcggcgtgcacttcatggccgaaaccgccgacatcctctccacgcccgaacagagcgtgaccctgcccaacctgtccgccggctgctcgatggccgatatggccaacatcgaccaggtccaggaatgctgggaccagctcggcgagatctgcggcacccagcccgacgccgatggcttgcagcagatcatcccggtcacctacatgaactcatccgccgcgctgaaggcgttctgcggacgcaacggcggcatcgtatgcacctcgtccaatgcgcacgccgtgctggaatgggcgttcgcccgcggcaagcgcgtgctgttcttcccggaccagcatctgggccgcaataccgcccgcgcgatgggcattccgctgaacgagatgccgctgtgggatccgttcaaggcacagggcggcgccgccgatccggccgactacgcccgcgccaagatgattctgtggaagggcttctgctccgtgcaccagcgcttcaccgtcgaacaggtcgaacgcgcccgcaaggcatacccgggcgtcaaggtgatcgtgcaccccgagtgctcgatgcaggtggtcgacgccgccgacggcactggctccaccgcgtacatcgtcaaggagatcgccaacgcacccgctggatccgccatcgccgtgggcaccgaaatcaacctggtgaaccgtctggccgcgcagtacccggacaagaccgtgttctgcctggaccctgtggtctgcccctgctccacgatgtaccgcatccacccggcttacctggcttgggctttggagaaccttgaagccggcaacgtggtcaatcgcatcaccgtggacgaagacaccgcccgcgaagccaaggtggcactggagcgcatgctgcgcgttcacccgtgacatgcttctagctcccctccctgaggggagctgtcaccgtaggtgactgagggggggcagatgacgcaaaaacagaggaaagcaacacaatgagcaacactgaaatcgtcgtcgtgggcgcaggcgtcgccggactgtccgcggcactggccgtgaccggcaccggacacgacgtgaccttggtaaccaaggccgaactggtggaatcgaacacctatcatgcgcagggcggcatcgctgcggccatcttctccgacgacgacccgaagctgcacgccgccgacaccatggccgcgggccacggcctgtgcgacccgaaggccgtggacatcctcacccgtgagggtgcggagcgcgtccgcgagttcgccgcggccggcgtccacttcgaccgcgacgcgcagggacacatgctgcgcggcctggaagcggctcattcgcgcgcccgcgtggtgcatgccgggggagacgccaccggcaaagtgctcgaactggacgtctccgccatggtgtgcaagaacccgcgcatccacatcatcgagaacgcattcctcaaagatctcatcgtgcgggacggccacatcgccggcgtccgcctgctgatcgacgggcaggacaaggatctggccgccggtcgggtgatcttggccaccggtggcgcgggtcgtatgtacccgtacaccaccaatccgccggtcgccaccgcggacggtctcgccgccgcatggcgtgcgggagcccaggtcgccgatctggagttctaccagttccatcccaccgccatggccgtgggcgagcacttcctcgtctccgaagccgtgcgcggcgaaggcgcggtgctgctggacgaacacggccaccggtatatgaaggacatcgatccgcgcgccgaactcgcaccgcgcgacgtcgtggcccgcgagaacttccgcgtgatgcaggcgcaaggtggcaagcccgtgatgctcgacgtctcgccgatgacccgcgagaaccccgacctggccagcttcctggcccaccgattcccgaccatcgatgcctatacgcgttcgcttggcttcgactggagcaaggagccgatcccggtggcgcccgccgcgcactactacatgggaggcattcgcaccgatctggacgcccggacctccatccccggcctgtacgcggccggcgaatgcgctcgtaccggtgtcatgggctccaaccgccttgcctccaactcgctgctcgaaggacttgtctacggacgccgcgccggtcttgccgccgtcgcggacggtgacgacgcggtctgggcacccgaaccgttcctgaactccgccaccggtgccgtgttcgaccatgcgccgatcgcgctggccgctcctgccactacggctgctgctgacgataccgccgccgacaaggtctgggaccgtacccgcatccagaacaccatgtggcatggcgtcggcgtactgcgcgacgaggccggactgaaaaccgccatcgccgaactcggccaaggcctcgccgccgcaaacgcccaggctgatataaacgccgatggcgctgcaagcagcgttgaggctttggagaaccgcaacatgctcaccgtaggctatgtggccgccaccgccgcgctcgcccgcaccgagtcgagaggcgcccacgcccgcaccgactacagcgagccagtcgacaactgggcccactccgtcgcctacatcaaggactgacccatgctcacatcacacatcatccgcaccgccgtcgaagcggcgctcgccgaagacgcgccctacggcgacatcacctgcgagaccaccatccccgcggacgaaaccggctcggcccacctcaccgcgcgcgaaaacggtgtgatgagcggcatcgacgtgttcgccgcagccttcgccgcacagaacccggccgtcaccgtcaccgtcaccgtcaaggacggtgagcgattccagcgcggccagatactcgccaccgtggaaggcccggtacgcgacctgctcaccgccgagcgcatcgccctcaacttcacccagcgcatgagcggcatcgccaccatgaccgccgccttcgtggacgcggtgaacgccatctacggcgacgactatgacggacccgtcacccggccacgccgctacgagcgcacccgcatcgtcgatacgcgcaaaaccacgcccggcctgcgcccgttcgagaaatatggcgtggtctgtggcggtggccacaaccatcgctacggactgtccgacgcggtcatgatgaaggacaaccatctggcggcgctcgccgcgcgcggcatcgacctggccggcgcgatccgccacgtgcgcgaacaggtgggccacaccacgcatatcgaagtggaagtcgaccgccttgaccagattcccgccgtgctcgccggcggagcggacaccatcatgctggacaatttctcgctcgacgacacccgtcgcggcgtggagctcatcgacggcaaggccatcgtggaagccagcggcaacatgagcctggagcgagtgccagccgtggccgccaccggcgtggacgtgatctccgtgggcgcgctcacccactcggtgcgcagcatcgaccttggattggattggaactagtcatggccgatacccccaacgcatccggtgaacccggtgaactgtacctggacgccgccgccaccgaaccagtgagcccggcagtcatcgaggccatgaccccgttcctgactgaggcctacgccaatccggccagtgtgcaccagcccggtaaaaccgcggcccgcgcgctggacgcggcccgcgcatcattcgccgcggcgttgggcgcccggccggatgacgtgatcttcacctcaggcggcaccgaatcggacaatctggccatcaaaggcatcgccatggcgcgcatgcgcaaactgggcctgcggccggtctacggactcgacgaaaccgatggcaaacaactggcaagcagccgcccgcgcattatcatttccgctatcgagcacccggccgtggcccaatcggcggcatggctgcacgaatggttcggcttcgaagtcgtgcgcattcccgtggatgcgcaggcgcatctcgatcttgacgcgctcgaacgcgagcttgacggcgaggccggcgaacgtaccacgctggtctccaccatgctggccaacaacgaggtcggcaccgtggaacccgtggaggaactggtccgcatcgcccacgcgcacggcgtgcccatccatgtggacgccgtacaggccgccggccagattccgattcgttttcgtgactgggatgtggacgccctgtccgtatccggacacaaattcggcacgcccaaaggactgggcgcactgctggtacgcggccgcacacccatcgaaccggtgctgtccggcggagggcaggaacgcggcctgcgctccggcacacagaacgtggccggcgccgtggcgcttgccatcggactcaacgaatcgaatgcgcgcatgcaggtgcagtgccgtgagttggtcgcgtcccgagacacgctcatcgacgcggttcgccgggtcgcgcctcgcgccgacctgaccggcgaccccgaacgccgtctgcccggtcacgcctccttcatcttccccggcgtcaccggggaagcgctgctcgtcgacctggacgcgcgtggcatcgctgcctcatccggctcggcctgcgccatcgggcgccacgagattcctgccacgttgctggcgatgggcctcgaaccgtccatcgccaaatcggcattacgcatgaccttccgcaagccgctgacccgcgaacaagtcgaacgcatcagcttggccatcgaagagtcctacaccgacctgacccgacactaaatctgacgccacttaccagaaaggaaacgccgtgagcaccaccactccagcgcaacccgcgcagctcacccgcaacgagcgcctcgaccggctgcccttcaacaaggcgcaccgtaaactcctcgtcgcctccggcatcggctgggcattcgacgccatggacgtcggcctcgtttccttcgtggtcgccgccatcgcagccgacccgcacttcaacctcaccccgaccgaaaagtcgtgggtgctgtccatcggcttcgtcggcatggccatcggcgcggcggtgggcggcttcatcgccgaccgcgtgggccgcaaaaccgtgttcaccgccacgctgatcatcttcggcatcgccaacggcgccatggcgctgtcctggtcgctcggcatgctgctcggcgcccgactgatcatcggactgggcttgggcgcggaactaccggtcgcctccacgctggtctccgagttttcgccgaccaaacagcgcggccgcatgaccgtgctgctggaatcgttctgggccgtcggctggatcatcgccgccataatcggctacttcgtgatcccgaacaccggtgactggggctggcgctgggcgctggccatcggcgcgctgccactgctctacgcgatcgtcacccgtgtgcacatcccagaatccgtgcgattcctcgaagccaagggtcgcgaagacgaagccgaaaaggccgtgcgctacttcgaggaagccgggggagtggccccggtaacctctcccaagggcaagccgctgccgaagatcaagacgcgcgagctgttcggctccaagtacctggcccgcaccatcgccatctgggccacgtggttcttcgtgaacttctcctactacggcgcgttcacatggatgccgtcgctgctcgccgaccagttcggctccctgaccaagtcattcggctacacgctcgccatctccatcgcccagctgcccggttacttcctggccgcctggctggtggaggtctggggccgccgcaagacgctgagcatcttcctggccgtctccgccgtggccgccttcgcgttctcgcaggccggatcagcggccctcgtgctcgtgttcggcatgctgctgtccgcctccaacctcggtgcgtggggcgtgttgtacgccgtgaccccggaaatctacccgacccgcctgcgtggcgtggccgccggtgccgccgccgcggtgggccgcatcgccgccatcatcgcgccgctcctcatgccgtggttcctgaccctgtccggcggcaacaaggccgtggccttcatcatcttcgccgccgccttcatcctcgcctgcatagcagccctctgcttgcccgagcgcaaaggcctcaatctcgaagactgattacacttcagccttcgctactaaagtggcccacaccaatgtgtgggccactttttgtcttatagctcccgaatgacacggcaagggttgccgtatgtcactgatcaatcgagggaacgacgggtgagattgcgcggtggttttgtgaccagccacgccaccagcagtccggttaccactacgccgaatgccagcgccgcctgcaatccccagatcggcacggtttccagccaatgaccgtccacaccgatcctgcggttccatgccacatgcagccatcccaacgccacgccggataccacgcccactggcgcgccggccagcagaatcaccgcagcctgcgtcaggccgtaacgtctgaggaatcggggtggcgcgcccacggcgaccatcgtggccatgtcgcgctgggcctgcgtgcgggccagcagcagtgaaacgagcgtggccatcagtgccagcaatgccaacaggccaatgggcaccaatgccatattgtcaccccacggcaggcgattcccgtcagtgctcgtggatgccagcggcagattttcgattgcataagctgaggccttctttacggtaacgggggagttgccaccggcgaagtctagatactcacccagatactgcaattgtttgatgccgagcgcctgtgctgttgccgggctcatcaccagcgggtacgcgccgcgcacgtagatggccttgcgcttctcgatatgtgtggcctgagattcgtttgcaattgccggattcggcgaaatggccacacgcaccatacctcccgcgtcgattgtgccggcatcgccgaccaccacaccgcccgcatcaagcacctgtgccgcctcatccgcgttcgggaagccggacaaacgcatcgcattgccatccataatgagattcacgccgcggaaactcggcagtatattcgaatacgttggctgatgggatcggtctatcggcacacaacgtatcggaacgtttgggtacagggccgaagcggcatcctggcccacccatgtggacgtgtccggttgctcttggatcgttgggttatcacaagtgtgaccggccgggagcaatgcagcggcatacatgtagccgtgttcggcgttcaacttgtcggaatcgacttcggtcgtatcattgagctttgaccatcgcttgacatcctcggtgtacaccgggtaatgagcgcgtatcggcgtctctttgccaagccggtgtatcgcatccgacaccacagcacggtcgaactcattgctgacatgcacgtcggccccaatggccatccccgacggtccatacgtcatcgtcatcgtggaatttcgctggtccgccaccatggagccggtgattaccagtgtgtacgaggcgatgcacatggtaatcagcaccgcgcatgccgccggaacgaaccgtcgatgatgctcggctgcatccctgagtgccaggcgtgcgccgatgttcagttgggaacccgctttgccgcaccaccgtgcaaaagtgcgaatcgacaacgcaagccctatgacagccaacaaaatcgtggcaacaagcagagccatatgcgtttcggttccggccggaaccgcgcccggattgtgatcggccagcgtgggcaatggcaatgtcagactgagcgcggcgcatacgatggagaccaagaccagaatcggaccaaccgcaacacggagcagtctcaaaggattacggcgaagcttcgtatccacgccattcgcggattcaccgtagccgatttcctctcttgtcgggcaatccttcaacgcatcgactggatgcatacgcgccacatgccgagccggcgcaatcgtcgcggcaaatccaatgatgattgccgtggcaatacccatcggcagcgagccccacgagaatccgtgcaggatctccagcggcgtggatccacgcaatgcgcctatcgcagggccggccgccaaggtaagcgcgaatcccaatgccgagcccagcacgccaccgatggcgccgataacgagaccttgcgaggaaatgattcgactgaggtcacgtggtgcagcaccggatgcggccgcgagcccaagcacacgacgtgactgatctgccgacaccgtaaacgcgggcgtgaccagaaacagtaccagcaacatacccaccagcatggtgatgaccacagtgaccatgtggttcaacatggtagccgcatcgatctgcatcgggtagagctgcgatgcgggcggatagccgtcagtcagtacatggcgggaaatgacgatggcctgcaacaggttcatgctgcgggtgtgcgcccacgtgaccggctctggaccgaccaccaaataatggccatccacaccgacgccatcagattccaatatggctgacatccagccttccaagccccatgccgcggcttcggattcatcggtcagcccgctgactgtccaagcacgctgagtgtcggccaccgcctcgccgatgcgcccgtccaggctcatccagccatcgaacggcggagcgacgaacgtcaccgtgctaccgagagaagcgccgagattatccgccaatgtgcggctgatgacaatctgcgtattattctgcggcgccgaacccttgaccagcttcggcaacattcgttgcaatgcctcaggtgaagcctcggtcatggtcgcggtggaggccgcgttcagatcaatgtcgttcccgcttttcacgtcgatcccagccttggtctgttcgccgggttgcaacgcggtgccggtgatggcgatgagttcgggcgactgccaatacgggagcagccgatcctgttgcggcagaatcttcgcaagctcggcggccgaggccggctgctgggagggatcgtcctgccacgtgccgccgctttcgggtgactgccggaacggttggccggtgcggggcctggcggtggcggtgatgaccgcctgcgtatcagccgggattgtcgccagcgcacgcgatctggtgggcggtatggtggtggtcataccgatggaggccaccattgcggcgattggcagcattaccagcagcaaggacagtagggtgcgggccttgtgccgtagtgcgtcgcgccagccgagtcgcagcgcggcccgataccggttgcaacgtgcgccaaggcttggcctagcggcatggggaatttgggcagagcgaccgacggtggcattggcaagattattgagggctgcgcgtgccatcatgctcccctttcctcaaggttgagcaaatcatccatattgctggagccggtttcatcgatgatacggccgtccttcaaaaacaccgtgcggtcggcccaggcggcgaagcgaggctcatgagtgaccagcagtacggccgcgccgcgatctgcgcgggtgcgcaacacttcgagaatcgtcatgccggcattggaatccagagctccggtcggctcgtcggccagtagtagacggcgtgggccgaccagtgcgcgggcaatcgccacacgttgcgcctggccgccggacatatcttcaggtcggcgatcagccatatcggctacccccacttcattgagggattgcatcgcggcctcacgtgccttgcgaggattccagccatccaattccaaggggaacgacacgttctcggttgcgctcagggaaggcagcagattgaaatcctgaaacacgtaacctatcgatttgcggcggatggccgcgcgttcggccactgacagtgtggccagatcgcggccttcgaccagcacgtgcccctgcgtgggcacatcgagcccgcccgcaagattgagcaaagtggatttgccggaaccactggggcccatgatggccacgaattcacccgggcgaagcgtgagattggcgtgactgagcgcggtgacacgacgtgcatctttgccgtgaacgcgagtgacgtcgtgtaattccagcgcgcatggggaggattgcgggagagaagaaagaacgggagaagtcatgatgtgctcctatgcactattgaatggtggcggtgagtgcggctgagcttgccgtgagaggtgccgaaacggggtgctgcgccagttgtgctcgcagctgggtctcatccacggtatcgagccagcgcaattccgcttcagtgatgaaaatatggtggtcgagtactagacgtgtggcgagttcggtgggcggtgtttgccggcgcagtcgggtgatgtcgtgcagcagttgctgcaaagcgtggcgttggtgttggatgagttcggaaacatcgaggccgggtatttccacggcgacggccagcttcatcaccagttcgtcgcgtccgcgttgttccggggtaataggggagcgccaccatcggtcaagctcttgggcgccggaattggtcaatcgccataatggtgcggccgctgcggtgccgacatcattggatccgctagtagtcggcgcggtctcttcaatcagtccgtcgcggttcaaccgctgcagtgtagtggaaacttgccccatattgagcggccaagtcagaccgatggtgcggtcgaagtccttcttaagctgataggcgctggccgggcctcgctccaacagtgctaatagcgcttctctgattgccataccgcatcccctttgcatagacggtttgccttgggcgaaggttactgagtaactatcgttggatatcaggttactcagtaactacccatgacggtgctgtactcagggatgattcaggggagattcaggggatacacttggcgcccctcagttgcccacggcgacagctcccctcagggaggggagtcgagagtgtggaatacaaaaagtctcgcaagccagatgacatgtgactaattctcagaaagccgggcccgttgtgtgtcaaggtgtgccagtaacatcgtgacggtttgtgtgtaggtacaggttgatatccaagagcaagtactcgagaacgcaagtaccgaacgattacgcaagaaaatcagtattaagagaggtttcgatggcggttcgtggagatatccgtaatgtggcgattgtggctcacgtcgatcacggcaagaccaccctggtcaatgccatgcttcagcagtcgcacgtgttttccgagcgtgaggaagtgccggatcgtgtgatggattccaacgatctggaacgcgagaagggtatcaccatcctcgccaagaacacggccgtggaatacaccggtccgctggccgccaagtacggccacccggagggcatcaccctcaacatcatcgatacccccggccacgccgacttcggcggcgaggtcgagcgcggcatctccatggtcgacggcgtcgtgctgctcgtggacgcctccgaaggcccgctgccgcagacccgattcgtgctgcgcaaggccctcgaagccaagctgccggtcatcctgtgcgtgaacaaggtcgaccgccccgacgcccgtatcgaagaggtcgtcggcgaaacctccgacctgctgctcggcctggccgacgacgtgcagcacgagggcatcgacctgaacctcgaccagctgctggagatgccggtcatctactgcgccgccaaggccggctacgcctccgtgaaccagcccgccgacggtggcctgccggacaacgacaacctcgagccgctgttcgaggccatcatctccaccatcccggcccccgaatacgaggaaggcgccccgctgcaggctcacgtggccaacatcgactcctccgacttcctcggccgactcggtttggtccgtatctacaacggcacccttgagaagggcaagacctacggcctgtcccgtgtggacggctccctcgagaacttccgcgtctccgaactgctgcgcacgcagggcctcgagcgcaccccggtcgagtccgcgggccccggcgacatcgtggccgtcgccggcgtcaacgacatcatgatcggcgagaccatcgtcgaccccaacgacccgaagccgctgccgctcatccacgtggacgatccggccatctccatgaccttcggcaccaacgactccccgctggccggcaccgagggcaaggaccacaagctcaccgcccgcatgatcaaggaccgtctggatcgcgagctcatcggcaacgtctccatcaaggtgttgcccaccgaccgccccgacgcctgggaggtccagggccgtggcgagctggcgctggccgtgctcgccgagcagatgcgccgcgaaggctacgagctgaccgtcggccgcccgcaggtggtcaccaagaagatcgacggtgtggtcaacgagccgatggaaaacaccaccatcgacgtgccggaagagtacatgggtaccgtcacccagctcatggccgaccgtaagggccgtatggacggcatgaccaaccacggctccggttgggtccgcctgcagttcaccgtgccgtcccgtggtctgatcggcttccgcacggctctgctgtccgccactcgcggcaccggcatttcctcctccatctccgctggctatgctccgtgggctggtgccatcaccattcgtcagaacggttccatggtttccgatcgtcagggtgtggccactccgtatgccatgcagcgtctgcaggcccgtggcaacttcttcgtcgaaccgcagtccccggtgtacgagggtcaggtcgtgggcgtgaacaacaagcccgacgagctggatgtgaacatcacgctggccaagcacatgaccaacatgcgttcctccaccgctgacgtgctcgaaaccctgaccccgccgatcaagatgagccttgaggagtccctggacttcgccaacgaggacgagtgcgtggaagtcaccccggagtccatccgcgtgcgcaagatcatcctcggccgtgaggactggtacaagtggcgcgccaagcagcgccgccagaacgccgcccagcagggtaagtgatctggtgcgactgtagccgaccattctctctggctcccctctctgaggggagccaagtttattcctcgccaagtcatatccccacctatactgaaacgcatgactgtgaagagcactactgaactgcgtccgtggtcgtatcgccagaacgcgctggtcaaatcgttgatcacgattgcggcgggcgtggcttccgcctttgtgggcacgttcgcccaccgtatgggtgcagaactgagtattccgtatggtctggtgctggcatttctgctgatcggcctatcgacatggtgcgcccgttcgcgcatgggcgcggtcggactggccctgcacctcatcgcctcctcgctgaccgcatggggcatggcactgaccaccacatccggcaaggcggtcatcgtcgccggattccaaggcgacatgccgttcttctcccagcatgccggctacatctggctgtacggcctgatactggtccaagtcgtcctgctcattcttcccgcccgctggttcgttattcccactcattctgaatcgcgcgcgtaactatatatggcggcacatttccgcgaatgcgtcgcgtatcggcgggcgtaggggattacggccgctaccatagaaccttatggcacgcatgaaactgttttacttgggcccggaaggcaccttcacccatcaggcggcaatgacggccgccgaccagttcgccacactcggcgacttcgacctcaccgccctgcccgacgtgcccgcgatcatgcaggccgtacagtcgcgccaaggctggggcgtcatcgcatgggaaaacaacgtcgaaggctatgtggtcccgaatctcgacgcgctgatcgacgcccccgacgcggccggcttcgcccggatcagtgtggacgtggccttcaacgccttcaccgtgcgcggccacagcatctgcgactgcaccggcaaccccgtcagcgcccacccgcacggcctggcccaatgcacccggttcatcgccgaacaccatttgcagcccgaacccgcatcctccaacgccgccgcctgccgcgacctgaagcccggccgcgtggcgctcggccccagcatctgcggcgaactctacgatctcgacaccctcgccgaacatgtgcaggatttcgatggcgcgcacaccgaattccttgtcatcgccccgcgtgatgtggtccaggaattcaacgcccgcgcccaccgcaatgacgccggcgacttcgaaaccatcatcaccttcatcccgctggtcaccggccccggcgtgctcgccgacctgctggacgtcctgcgtgatgcggggctgaacatgaccagcttcatctcgcgcccgatcaaaggccacgacggaacctacagcttcatcgccacccttgacgccgccccctgggagccaagattccgcaccgcactggaagagatcgccggacacggcgactgggcaaaaaccctggccgtctacccacgccgcgaacgcccgaacccgccggtcgacgcctggatgctgcccgagggcggcgtccacatcaccaatcgcgcgtcggaaggctggcagtacgccgagggagcaaggaaggaactgctgtggtagacacagtcggaatcgtcggactcggattgattggcggctcgctcgcacgccgcctgaccgagcgcggcgtacgcgtcatcgcgtggaaccatcgctcgcacccctacgcccaggccgaagccgatggcattttctgcaagagcacgctctccgaactcatggatgccgagccggatgtggtcgtgctgtgcaatccgctcaaggcgatgccctcaatcctcgccgccctagccccgcttatgggcgaccatccgaacaccacgctcaccgacgtgggctcagtcaagggcatggtccgcgatcaggtcaaggctgccgcgctggggaagtgctacgtcggcgcccatccgatggccggcaacgaactgtccggctggcaggccgccgacccgcatctgtacgacggtgccctatgggccatcaccgtggacgagtccacggactaccgccgcttcctcgacgtcgccgcgatgatcaccaaggacgtcggcaaccgcgtcatcgtcgtggacgacgaaacgcatgacaaggccgcggcgatgatctcccacatgccgcatgtggtgtccaccgcgctgatcaacgaactggtcgccaacccggaccgcaacatcgccgccgcgctggccgccggctgctggagggacatgacccgcgtgtccctgaccgacccggaccgcacgcgcgcgatggtcgaggaagactcgctgaacgtcgaagcgctgctgcgccgcatggcggcacgtctgaccgatatggccgaccaactgcacgctggtgccgccggcgagcaggatgtgatgggattcttcgccgaaggcgaccccttccgccggtacaaggccgccgtgacacatgccggcatcaccgctgcacaagacggtacggccaccgctgcgccgcaagccggcacaactgccgccggattcccggaacgcgagctcgccgtccccgaagccggctggcagcagaccctgctgttctccgcacgccgaggagaagccatcaccggcttcgtccatccacgtcaggccatcatccaactgcgccccgccatgtaactgcgtaccgccatgtaggcccgtgcgcaggttcccctcgccgcctgtcacgaagaaggccgcgcgagggggatgaagttcccgcttgttttcgtgagaagaccgtgtggctccgctgttcgaaaggctcaaaggagtaaggtagtctgtaccgtttttcgggaaacgcatcgaagttgatgcggcgaatggttaagggggatgatgacgtatgacgttaccaaggcagattccggccggtgcccgcgtggtggtgcgcatcaccgacggcattgacccggtcgaccaccgtatgaagttccgcgactatgtgggtcacgtggtttcctgggacggatacacgttggagatggtgcgtgacgccgccgccaatggttcgcgcccggcccagaacgtgaccatccatcaggaacagattgccacattgaaacccgtgccggagcggcgcaacacgccaccccggccgtaacccaaggccataaagaattcggaggagaacgagagtgtcatctacgcagttcgacggcgatatcgactccttcgtctcctatctgaagtccaaccgcggcctgtcagcgaatacgctcaaagcgtatcgcgcggatctcacggcatgtctgcacctgttcgagctgcgcggcgtgaccgatctgaacgagatcacgctggatgatctgcgtagctggatggcggtggaatcgcgcgatcacgcccgcagcagcatggcccgcaaaaccgtggccgtgcgcgggttcttcgcgtgggcctatgagcatggggtgaccaacaccgacccggccgccacactgatgactccctcgattcccagcacgctgcccgcggtgctcaccgaatctcaagctgagcagttattggatgtcgccgaacaggccgttgcaacaaaccagtacaagggcgatgggggagcggcagccgcgtccggcagtggcagcggcaaggcagtcggcaagacagctgataagtcagccgacaccgtaaaccgcaacgaggcacccgcccgtgcagacaagcgcgacagcgcccgagtcgtcgccgaatcgcagcgcaacgccgcgattctcgaactactgtatgccaccggcatccgtgtcgccgaactggtgtcgatggatatcgttgacgtcgacttctccaatcgcaccatcaaagtcaccggcaaaggcaacaagcaacgcgtggtgccgttcggactgcccgcccagcgtgcgctggagacttggctggaacaggggcggccggtactggcccgtacggcaacggatgcagtcaagtcccgtgctgccaacgccctgttcctcggcgcacgaggcggccgtatcgaccaacgcatagcccgtgacatcgtgcacagagcggcccgagaggccggagtgccggatatcagtccccacgccttgcggcattccgcggccacgcacatgctggatggcggcgtcgatttgagggaggtgcaggagatgctcgggcattcctccttgaaaactacacaacgctatacgcacgtctccatcgagcagctcaagaaccgttacggacaggcctttccgcgggcatgaccactatgtggacattggttaacaaactcagcaaagactgaacctagccggcaagaacccctgaattttacatgggtgtaacaaaaaatacactgcttgtctcccaagtgcgcaaaaatgacaggtaatcagcaacggggttggattgttcgagacatcgtgagatgcaagtctcacggtgacggggaatccagccccgttcgcatgaggcggggctgagacgtcctgcaacctaatgaataggagaaaacatatgaagaagaaagctcttgctttcgctgccatggcttgctccgtggccatgctgctgagcgcctgcggcggctccaacagcaacgctgcctccggtgacaccgctggctccaacatcatcactgcgtacaactccgaaccgcagaacccgctgatcccgggcaacaccaacgaaaccggcggcggcaagccggtcgacctgctgttctcccgtctggtctccttcgacaaggacggcaaggcttccaacgaagtggccgagtccatcaccccgaacgatgacgccacccagtacaccatcaagatcaagtctggctggaagttcaccgacggcactccggtgaccgctgagtccttcaccaaggcctggtcctacgtggccaacgccaagaacgcccagaagtgctcctccttcttctccgccatcgccggctatgacgatctgcagaaggatggcctcaagggtgacgagcagctctccggcctcaaggtcgtggacgacaccaccttcaccgtcgacctgaaccagtccgactccgtgttcccgattaaggtcggctactcggccttcgccccgctgcccgagtccttctacaaggacccgaaggccttcggc

SEQ ID NO: 2586 - DNA, 13585 bp, Unknown
  R222_15m  MAG No. k141_3887
aagtcgcacacgacgcatgtcaagcgcgcgcgtaagaaggggaagacgtcatgaccacaggctccatccgtatcgcgatgaccagtgacgtgggtcttaggcgcaagaacaaccaagacaccggattcgcccaacagggcgtgttcatggtctgcgacggcatgggcggcggcaaaggcggcgagcaagcaagccagttggctgcccagcatttcgcgcagctggcttccatgccctcgcgcacccgccatgacatcgacgacaccctggcacaggctcagcacgacattctcgatttgggtgaccgtctcggcggcgtggccggtacgacctgctccggcctggttttgccccagccttacgcagatgccatcaatgcccacagcgcagctccgtttgacgacgccgactccccggatttctcggaccagacctatgtggtcaatgtcggcgattcccgaacctaccatctcagcccgctgccggatgccgatgcccccgccacggatatcatccccgtgtgggacgcctcctcgctgacccgcatcacgcgggatcattcccaacgccaggaggctatcgattccggtcagatgctgccggaagaggcggaggcgaccattccacgcaacatcatcacccaatgcctgggcgatccggacggcatagtgcccgacgtatatgttgccgatctgaccggccgtttcatcatctgttcggatggattgcacggtgaagtgtcagacgaacagattgcggccatcgccgcagcgcattccagtccgcaggaagccgtggacgccttggtggcggccgcgctcgatgcgggcggaaccgacaatatcactgtgattgtggccgatatgccactgaccgaacccgaacatcacgcgttcagcgcttttaaactggacgagggcgaggacattggcgccattgaagacgcaacactacaaacactacggaccatacgttcggcataaccgagcgaacataaggaggtaatcccatggttgattatgatgctgcggtcgctgccgtacaggatccgaacgcggacccgattctgttggcaaaaatcgcctacgagaatccggaattcggcgcaaacgtcgccgtaaatccgcgttgctaccccggcttgaagcgttggatcgccgagttcggcgatgagcgcgcccgcgagaccctggcgcaatacgggttcaccgccgaggcattcggcggcccggtccaggatcaggaagccccgtcacaggcggccctgcaggctgccgagcagcagcctgcagacgcttacgccgccgaccagtacgccgcagctcagcccgctgccgaccagtacgcagcccagcagcccgcaactgaccagtatgctgccgctgcccagcccgctgccgaccagtacgcagcccagcagcccgcggctcaggcggcattcgaggagcctgtggccaccaatccttatggcttcaccgccgaacaggccctgaccaccaccgaccagatgcaaatcgcccagattgcccaatacgcgcctgaactacgcgcctgcatcgcacgtaaccccaacacctatccggcactgatcgaatggctgggccagctcggcgacccggcgatcaacgccgctctggcttcccgtcagtgaaaggacggcatcatcatggccaaacttccctaccctccagcacctgaactgggttggtattctgacgatccggtggaaggtgccccggattccgcagttggcacagccgaaccgcagaatgactacgggcagcccagcaccgcggaagcggcaaccaatgccgcttttaccgcagagcccgccgccactgccgccgctgagcccactgccgctccggtagacaccacaccgcacgccgccgaaaacgacatcgaggattgggacagcaccgtgctctcctcctcgttcacgtccaaggcaccgaagaagacgtacctgctgcataacgatgtcaccggccagaccattgtgatcgacaagagcacgttgctgggccgcaagccttccatggatgtgccgcagggtgccaaggcggagcgtatcgaagacccgacccgcaccacgtcccgcaaccatgccgccatcagcatcgacaccgatggcgcgctgtggatcgaggactacggctcgttgaacggtacctacatcatcaccaatggccaggagacacaagtcaccaagggcacaccgctcaagctcagcgcgcctgccacggtgcgtatcggagaccagttcttccagttctccgaacagcagtgaccgctggactgtacaggccagcgaatactccagatatcaataaaccgcaggtaacgtaccaagcaagctgtgagaacaacttgtacccgtacggtacctgcggtttattgttgccgttggcgggcggtcagtgacggttgctcggctatgcctataccgggctgggcggtcactgaccgctgagcgcagtagttacttgttcgagtccgacttgttatcgctggatgagctcgacgaacttgacgagtccgactccgagtccgacgaatccgaatcactctcgctttgcgacgaactgttgctcagatccggtgcggggtcgcccggggcctgaccgatggtcacaatcacgtctccgctggattccgggctccacgccatccattccataacggaatggtcgcataccatggaatcatcatccaatggcaattgcgtgtacttgcccacggacttgccttgcgcatcaacgatgatctgctcatccgtggtcttcacgtatatggtcttggtcagatagttgatgcccttgaaactgccgtcggtcagcaacagacgaccccactgcggcccatccaacacttccgtgggcttcagatcggacgacagcaggaacacgcgtttgctttcgttgccgttaccatccgtctgcacgtagagggtgccgtcggagaattggtcaacggctctgacgtcttcatccttgctcagtcccagcacgtctttcaacgattgccgtttgccggtcgtgctatcgatgacaaacttgccgctatacgaatcatcggtcacatacatgttcttgccgagataccgcattcggctcaaatcacaacttgagtagtccgtatcgcagtaattcaacgggaaactcatgatttccttgttgtcttcgaccgaatacaggtggtacgaattgtctctcaccatatatgcgtcgtacaagctcacaccgctcgcggaggcattgacctgtttcgcatactggtacccgccagaatcagtggtaagcacgattttgtcttggaaggtctgcaataccttggcggtatcactgtcatgagttacgcccatcacctgcgtgtggttgatggtcgctgagcgctcgtccttgttagcggtgtatttttcatcgctatgccacgttttcttgatggccaccatgttgcgggactcggcgagcaacgagtattcgtaaccctgctcatagtcgataaggttgtcttcctcggttcgcaggtcgatgcggtcagacagttcgccggtatcgagatcgacctcgtgagcgaacagatgcacgctttccggcgtggtgcccactgccttggttttcaccgcatagaacacgaataccgccggattatcgccgtacgtggcggcgacctggggctcggaatactccttctcccccgattcgagcatggatacgtggatttccttcgattcatccagcgccggcgtccagacgccgaaggcatactcgccgctgccgtccagggaatcacttgaggatttggacgacgaatccgaatcgaccgaggaatccccatcccagcagtggatgacgttcgagaccatcgcgccgccagtccacttccagtcactggcggagttgccgtcgcatgagaaatcggtcatcgtcacttcggtggctgccggcttggcgggctcggacttggtcttctgctggtctttggttgttgtcttagtctttgtcttaggtttcgatttggtggtgctggaggtagttgttggcttggcctcggccttctgatgcgcgttacgccagaatataaagcccgtgatgccgccggctatcagcgccactaccacaataatcgctatgatgattggcacgattttacggggctttttgccgttgttgccggcaccattgccgttgttgggcacgcctgcaccagttggcatgccattgttcgaggtcgggattcctgccggaggaacggcaccggcggcaccggcatacgctccgggtaccgggctgcccggcacctggccgccgggcattggaccgttcggactggaaatgcccggttgcggaatattcgtttgaggcgcattcggccgaggtacgctcggctgcggctgcggcacacccggctgcggaatcccgcgcgatgccactaccgtggcatcctctggcaccggggctccgcaccgcgtgcagaacatcatattgtcaggaaccgcattgccgcattgtgcacatcgtttcatggttcttctcccccgctatcagcgtcatcgcttcggttcttctctgccttctattgtaggagagatcacgaatgtgtcgtcggccagcgtgaaatcgccgccagatgccgcatattcgcatccgccgcttgccagttcgcggccacctaccgcagtgccgttggccgaatgattgtcggtgatgcaaaaacgtccgtcatccagcatgtcaatcaccgcatggatacggctgacgttggtattgccgcccatgtgaatgtccgcggttttcgatcgcccgatggtggctcgtgtggcgtgcactgttattgctttaccgtcgcgcaatcgtgtgacggtaaagcctctggacttgtccgtgtagaggcgcagcatcgtctcgccttcgctgtcgttctcatcggcgcgcagtgctgtgctgacggcgctgacagggaggatagggcgaacgacgttgctagtggcgggaacgcgagcagcatcaacgttgttgacggtgtgagcaacgtgagcggcggcagcagcgttacccgtgttagtctcggccacggcagcagtagcggtatcacccgcggcagcggcagccgccacattggatgccccaccgcgggcggaatcttcacggatatattgttcgcgaacgagattctcacgagcgggctgcgtttcctgcttgcggggaagatttacggcaatcggcattgcaggagccggctgtgtcacgggcgaggccgacgttacaggagtcggctgtgccggtgccgcgtgtgctgccggcattgcaggagccgccggcgttgcatgcgttgacggtgccgcggaagtcgtcggcattgcggcctgttgcggcgtcgtctgaagtttaggcttggagctcaatactgtggcgccaaatcgcgtggcaccgaccatggtgccgtcagacactacggtcgcgccgaattgcgtctccgaaccattatcttcatgagtcgactgcgctgactgcgcttgacgcggctgaacagtgccgggcagcaaatacgccataaaatcatgcagagcatctgcattaaccagtgaattgcgccccaggaactcggcgagcgcacgctgatagccttgcacaacggcatcctcaagccgggtccggcgtgcatcggccaatgtctgcagcaaagtggtggcggtgttgcgatcgggttccagtcccagcgccggcaccaccacgaacagcggatacccctgtgcggagatatacacgcttttggggtcccactgcacgtacgacagcggcacgcgatgctcctcgcattgctccataacggacaataccgccacaagtatgcccacatattggccgccaggcactaccgacctcaacacgccatgcatggtctcgcaatgagtcacgtcgtaatagaagaggatttccgcgccattactttcaaaccggaacggcagcatataccaatggccttcagcaagccattgtgcctgcccaagatccaacgactcgcctcgcgtggtatgtatggtcagcgtctgagcccccgtacgccgatccttaacagtcttcgctctcatagcacttaagtctagtcctgtaccaaggccaatgctttgcggagacgcaaaactcgtcaacacagtaacacaactccggctaagtaactttaccaaaaaactaaaaattggtaagataaggttaccagttttcctcaatattggtaaggtagcattaccgttttcttgaaaggcacattatggcgaatccgatcatcgccgaaaagctgcgcgattttagaatcgaagatttccacccgattgtgccgcgcgacttggatctaggtaagccactgaccccgagagtaggcaatctggtgaaggtcatcgtaggcatgcgccgcagcgggaaaagctaccgcctattccaagagatagaggccctacatacatccggtgtcagctggaaccaaatctgctatatcaattttgaagatgacaggctcggcgacatcactccaagtgtgggcgatgaagtaatcgaaaccttttgctccatgcatcccgaaagcctagacaccggcttgtacctgttttttgacgaattacaggaaatgcagaactggggcgcttggctacgtcgcatcgtagacaccacaaaagcaacgatctatgtcaccggctcttcctcgaaaatgctctcaaaagaaatttccaccgaatttcgaggccgagcattggacttcgagcttttgcctttctcattccgtgagtttgtccgcgcgcgcggtatcgccgaatcagaattgctcagccggaacgaagcagctggatattccaccaaagaacgattaatgctgtcggccgcattgatctcctacctggaagagggcggattcccagcaatcgagggactgccaacgcctcaacgtgtgaccctgctccagtcatatgtgcagcgtgtcgtatcccgcgatgtagtggaacgttatgacatcgcgcgtccaagagttgcctccgcattggcacgacgcttgcttggcagcaacggcaagccattgtctattcgcaagatagaaaacgaattgcgttcagccggactagccaccagccgtgtgctactgggagatttattggaatattttgaagacgcctatctggtgtttcgaatgaaagacttctctatgtcgctcaaagagagcaccacttccacatcaaaaatatacgccatagatcccgggctggccgcagcctcaagcatggcaagcgccagagatgatggccaacgattggaaaacgccgtttatctcgaactacgccgccgaaccgcaggttatcgtcgcgacggcatatcgtcatgccataccaaggaacatggctatgaagttgattttgtgatgggcgatgcactcgaacatgaacaatatgagctatatcaggtcacggcacgcatggatgataatcggaccatcgagagagaaacccgcgcgctctgggaactcatggccgaacaaaagctccatgaaggaaccatcatcgtcggcgatggaatcgagcgcgaataccgcaacagcaattatgtcatcaaacaagtgcccgcttggaaatggttcgttgcgcatgagccccggtaagcttcaccggccatgtcagattcctgagatggcaaccatgatggcaaggaatatgaacagagtctcgacccagatgagttcggcggaataccacatccagaacggttcgacccgcttgctggcgcattgacgggcaatcgccacttcgcttggcagcaccgcccaagccataaacagggcgaccaacaacagcacaaaagaaatgggcacccaaccgcattccaccagcactatgccgaacaagccgatgcttgccgcgattccaatgccaatcatgggctttgccgcaccctgcctttgtctgcgaggaatcacggcgaacacgaaagcaatcacggcaaacacaatgccccctaccactgcgggccacatcccaactaccgtgtccgattccttcaacgggccaggcacgccgcttcccgcgaaatgatcgatcacgccgtcacgtacgccacgcatatagaggatcgttcggcccaaaccggcacccagcatgcgcgaagtgccttcccagaagcacagcatcatgatgtgaaacaacgtgcgttcacgtggccagatgaacgcgggcaagaccaacagtatgccaaccaccggcaatacggcacacacgccggccatgaatcccaggaaatcgaacgagctaccatcgatgcccagcacgcccagccaccacggatcaaacccgatgctcaggctcatgttcacccaccatgcctgtgccaacatatccgccacagacaaagcggcaagcacgccgatccgccaatacacgccgcccatcgcatacactggaccggcaccgtccggcaccacacgcatgtcgtcatcgacataccgcagcacaccaagataacgccccctgcccgaacacgtcatagccacgcgccacaaccccatgagccgcacgactcgacggcaacaagccaaccacaacaggcaaaccagccaacgcatccctcaaaccacggacacacccgacaaaaccctcaccgtcaacaaccacagcaacaccctccataccaacatccgaacagcaaacacgccgcacccacatcacacacccgtggcggccgcgtaggcaagcagcatcaacatgacgaaatcaagcaccaggaaaccagcagccacaggctgccacgaggcatcacgcccctccaagacacaacgccggatcgcacgaagctcaccgggaatccagaacaacaccatgccgaccgccatcacggaattcacccagaacaactgattcgcatcggccgggccgacccacaacatgcccattaatcccaaaccggcaaccacattgccacccacacgcacacgcggggaaacacccaccccacgcaacaccacaagcaccacggcaaccaccacggcaaccccagccacaaccaaaccaggcaccaccacagcaggagaactgtcgtaatacagtctgtccggacgtccagtcgtggagtcaatcaaactttcgacatggggaccatacatcgcatacataacggtctttccaatctccgcgcccacggcaccggcgacacactgaacaatcagaacgtccccggcaacagcaatccacggcttgcgcataacatgagcagccagccacagcaatagtcccggaacaacacccacgtcgaaaaagaccgccacaggccaccaatcgctcgacaacgagataccggccatctgcaggaaccacacaccacctctagcggaatcacgttcgaagaacgcataccgggcttgcaaacctacctgcgcaaggaacagcacaaaccacatgatagtccacaaggcaacccccaaacgagtgaacacacgcctgccacccacaggaatgcacatgtcgatgaactcgcccaacgcgccattcgccagaacacgattctcaccgccgacatcagaaccgccagcctcggcatcaccgcccacaccagcggctccacgctcccacggtggccgaccaccacttctcaccatatcaatcacctctccaccataaaggaacgaatcgcggaacccgcataaacaaatccttcaccggcattgttcaccgcatccgccgcatcattcaactgggcaagccccggaatgaacattttcgccacatcccatggacccgatgtctgccgcccgtacttgacctgatcaagtacgaaatcatgcgcatggccagccagattggcccccttctgcaacaaatgctcacgaccggcgtaatacaataccgttctcagtgtccgaccgctgcctccccatcgtcccacctgagaagcgataacacgcacactatccgaaaccctcttcacatcaccaagaaacgtcatcccttccgacaccttcgtgtaagtagggagaaccttggaatactgggtgagtataccgaaactcgccacgctgtgacactccccgagattagttgcgatattccccgacgccagtttgaaggatctcaaatcatctgccaaaccggtcgacttcgccacactagccgttttgaatccttgcaatccggcggaaagacaacgtaccgatccaataatcgaaagaatcaggaaagcaccttctgcaatcacttcgttaaaagatgcatccctataaagataatctacatacttgtctgctaacagtaaggctcccagcgccacgactgccagcgcgattccccatccagaaacaaacaggctcactatggcgagcacggcggaagcggccttcgcgaacgatacgatgcactgccatccatccgaataatggaacttctcgaaaccgttcacggcaggtgcatgctcctgtgccttggcaatctcacccgcacgtttatgcgcttcactctcataggccaagcggatatcacgtacacgacgtttcgcatctgcccactcatcgcccgcggtctcgacatggtcgctgtacccgtccagcatctgctgtgcggcttccttcgcctcacgcgcattcctgcgctgcacatccgtggcggcatcgggcaactcgtcaaacaccgcccccgcctgcgtcaatgccgagcgcgccccacaagacagccgctcataccgctccttctcgtcgcgtgcggcgatggcacgttccaactgggttttggcatccgactggaacccgtccaaagactgcatccagccacgcagctgacaggacacctcaccaaagctgtcagcaaatcggccgaaatccctaggaagatcctgcagcttctcctcgaacttgacaacccactcgccctgcatgccggcctttgtgtccagattcttcaatgcggacgccatttcggagaaatcccgcgacaaacacttgtacttccatgccatacgcgcgattccctcggtatcacccgacaccggattgtccggctggcccactacggcccagtccaaataatcgagattcttcataattccccaactcccctattgatccgattcgtccgattcggtttccaccgagactcgcaatgtcgccgtaattctggtaaacagctcgaacaacgtgtcagacaattccacctgaggcgtaatgccggtagcaagaattacctttcccgcacaggggatgaacgtacgcaacatcgccaacctacctacgggcttaccttgttggccatgaacggtttctacagaagatgcctgtaccgcaggaccgagtttattgaatgacgttttgctcatgtgcagttcatcaccttcgggcaggccttcccgctccgtgagcagcgactccacgatggcatccaattcctcatccgctgtaccatacggcacagcggatggaagcactgagaccatgaatgtagccattaccaatatggggctggcatcatcaagttccgtggttatggcgtatcgtacaccagctttccatgattgctcgtaagagttcgccagatatttgcgtaatgccggataaacttctcgccagtcggcgatgacgtgtttcatcggttcaagagcctgccgaatctgccgttcccggtcagcaggatccaacaggatttctctccatccctgtggaggtatcaatgaaatatgtaagaattcggtcaacggattctccccatcgccggtcgataatgctcatagcaggcagtcaagattggtgcacggcatcggaaatggccttggcaatcgcctcatcggcctcatcggacccggttttcacgttttccaagaagtcacgaagattctccgttttcttcttgtacttgttcttcgtatcgctgacctgatggttgaatgcgaaaaccgcatcgaccagctcggaacagccgacattgtcagaactcggctcggtaatctgctcatccagctttagccgatcacgaatactgttgaacccctgcatcagcgtgcttactgattcttccacaatcgtcaggttttcggccacccagcaacctccttgttgttcgtgcaatccttcatacagttttctcggcaacaccaatcaaaccgattctattggcatccaacccgatacggcaagaccttccgaagcgaatgctcacgactcggctagctcgcgaacgtgccgcgcatacgactccatatcggcgttcaacaaatccaccgccaacttgcggctccaggaaggatcagggatgcgcgcgagcagcatggccgccatgctcgagcacaggtcacgcgaggactccaggtaccgcatacgttggtcgagatccgcatcgggccgcagcccgtccgaatcccgcaacgtgcgcgcggcgatgatgggcaacgccagtatgccgtcatcataaacgatgtcccggtatatggcgagcagattcaacgcagcctcgagccggtctccatcaccctgctccaacgcggtggagaccaacggctccacgattcccgctcccgccaaggtcagcagcttgtcctgcacgaaatccggcctgcgccagggattgccatcatcaagctcgccatcaccatccgcatcgccatcggcatggtcgaggaaatagcgatatgcctcgatgacgtggtccgcatcgaacaggtacagtacatcggattgcgggaacggacggccatcatccgcgacgtcaagcccctccccgtcgtcagacgcggtagaatcctcgcctgacgaataatgaggaccgtcttccgccttatgcagcttcgtctccatcgcggcggtctcgccacgccgcatcgccgcggctatggcgcgatcgcgcaaatccgacaccaccaattcggtttcgttcgcgttcaacgacacattggagtacggaagaatgcaattgagcgcctcatcgtactgttcgatgaggaacaacctcgcgatatacgcgctggaagcgtccccttcgccccagccaagaagaatatgggccgccaaccgacatgccgaagtcaggaaatcaaaagtggcgtccagattctccacatccgcatcggctatctgctggcgaagctgcaactccttgccccaaatcatgcggaacagccagccgaacacgtcctcatcatcaatcatggagactgaatcagatataaatccctcgccctgggcaaccaaatcctcatcacgggtgcggacggccaaagcgatgatatcggcgggactcgtctgcccgaacacacgataggacctccacgccagatcgtcctcgaagccatccggcaacggaaccagcggattcttccacatccggaaatccgcaaccagccgcttcaactcctcggcataccgtcgctcatccaaccgaatggacatccccactcaccctcctttgcactaccatcccagcacacaaccagccgtcacgccatgggcagcgccgtacacacgccaatgacgaacaacgcctcggcggtgagccagaacgcggccggccactcgccacacgactcacgacgattatccacacaaaaacaggcagccgccaaatccaacggga

SEQ ID NO: 2587 - DNA, 98781 bp, Unknown
  R222_15m  MAG No. k141_3978
aaaataaatgactgaagcaactcagcgtacgtccgacaacggcgtttccatctggctggacgacctgtcccgctcccgcattgagtccggctccctgcaggacctcatcgccaacaagaacgtggtcggcgttaccaccaacccgtccatcttccagaaggccctgagccaggtcggcccgtacgacgctcagctcaaggagctcggcaaggttgacgttgagaccgctgtccgcgagctcaccaccaccgacgtgcgcaacgccaccgacatcttccgcgagatcgctgaggctacggacttcgtcgacggccgcgtctccatcgaggtcgacccgcgtctggcccacgacaccgagaacaccgccaagcaggctgtggaactctgggagaaggtcaaccgtccgaacgccatgatcaagattccggcaaccctcgaaggcctgccggccatcaccgccaccctggccaagggtatctccgtcaacgtcaccctgatcttctcgctcgagcgctacgagcaggtcatcgacgccttcatcgagggcatcgcccaggctgacgccaacggccacgacctgaagcacatcggctccgtcgcttccttcttcgtctcccgcgtggacaccgctgtcgacaagctgctggaagccaacggctccgacgaggccaaggctctggagggcaaggccgctgtggccaacgctcgcctggcttacgagctcttcgagaagaagtttgccgaggatccgcgttgggccgacctggctgccaagggtgccaaggtccagcgtccgctgtgggcctccaccggtaccaagaacgccgcctactccgactgcaagtacgttgacgagctcgttgccaagcacatcgtcaacaccatgccggagaagaccctgaacgctctggccgaccacggcaacggcgctccgtccatcgagggcacctacgaggagtcccacgccgtcatcaacaagctggctgagctgggtatcaacctcaaggacgtcactgacaagctggaggccgacggtgtcgccgccttcatcaagtcctgggattccgtgctggctgacgtccagtccggcatcgaccgcgtgaacgcctgagattattagctgatgcgcatttcgcgcattaactgattagctcacagaagctccgaccccaaccggtcggggcttcttacgtttgttgctacagtagtacgagcacatgagagaaaggccgaaccgtaatgaacaaacttgtcgcacgccagcggttggtgatgacctttaccttcttttcgatgttcttcggagcgggcaacctgatcttcccgccgtttgtcggagctcaggccggttccgcgaccataccggcggccatcggcttcatcgtctccgcggtcggcctgccgattctcggcgtgctggcggtcaccttcgccggtggcttcgacaaactcgccggccgggtctcccccaaattcgccttgttcctcggcttggcgatcatgctcaccatcggcccctgctttgcgattccgcgtacggcgaccacctcgttcgaaatgatggtggcgcctttcgtgccgtcctcctacggctggctggcccaactcatctactcgctcgtgttcttcacactggcgttcctgttcgcccagcatcccgaaaaactctccaaagtgctcggccgattcatgggaccgttgctgctggtgctgattgccgtcctgttcatcgcctgcctaatccacggtatcggtaccccggccaaaccgatgggcgactactccacaaaccagattgcacgtggcttcctcgacggctaccagaccatggatctgctcgccgcgctctatttcggcatcgtgatttccgcgaatatccgcacccagcaggtcgatgacgaatcgcaagtgcagaaggagaccgcgtatgccggactcggcaccggtgtgctgctgatcgtgatctacggcgcactgagctacgtgggcgtggtgtccggtgccatcgccaccatcgatcccgccaaagacacgggcgcgaccgtgctcaccaatctcacctcgtccttgttcggcgcgttcggtaccgcgttcctcggtatcgtcttcgtcatcgcctgcctcaacgtatgcaccggactgatcggtacctgcgccacctacttccacactcggttccagaccgttgcagggagaacgttgagctaccgcacctggcaggtcatcttcaccgtgttcagtttcatcgtgtccaacgccgggctaagcgcgatcatcaaggtttccgtgccggtgttgtccgcactgtatccgatcgccatcgtgctggtgctgctggcgctgacccacaagtcgctcggcgcgcgattcccgcatgtctacttctggaccgtgctgctggtgggcatcgactccttcgccacctgcatctccagcctgatcaccgtcttcggcggctccatcggctggctggacacgacgctggccatgctgcccttgcagcaataccagctcggctgggtggtcccggctatcctcggtgttgccattggtatcgccgatgctccgcgacggtagttcttcccggtctgtgccggagtctggcggtcggtcggtgatggcggttgttgcgacgctcagcggtgccggtgtatcgttcgcaccactatatgagcgcatttggggcggcatgatgctgcatccgaactgtccggcgattggcagaatgacctactatctctcgggccaagcaactgacgattatggagtctgcgtcacctcaccactgtggtttatgacggtgactgcgctgagtgttgtcgcgattctctgtctgaccgttgcgggagtacagggcttttcgcgccatcggctctgttcccgttgccctgttctggtcaggtctcacgttctttacctacagctacaacactggtagacacaccgatttctgcccagcgctatcggcaactgacaatgcaggtcttgtcgcttattgcatcggccgtgaagctttgggactgctgaccgtcgtgttgtgcgtgctgccattgttctccctgctttcggcgattatggccatcacgttggctgcgtacgacgcgacaccaccggcataaaatctccttcatatcacgaaacaacgggcacccgttttgcgaggcattctatccgtcccgtgtttcgcaacgcatgagacggcacatccattgaatcaggagtctagaccatatctcgccgaatcttgcggtaggtggcatagaacaggaagccggccacgatgccggaggtggcgtcggagatgggttcggcgatgaagatgccgttgacgccgatccagtgcggcagcagcagcgcgagcggcacgagcaggatgatcttgcggaagatggccaagaacaccgactgtttggcctggcccatgccgacgagtgcgcattgcgcgcccatctggatgccgaagataccccagccacagacgaaaatcggcatcatgcgggtcacgatgtcgatgaccgtctgttccgaggtgaaccatgaggcgaagaagccggggaatgtggcgagcacgttcgcggcggccgctcccctgacgccccatccgaacacgaaaatgaacacggggtcaagaaggatggatatgccggtgccgatgagtacggagaccatggccacagtggtttcgccaactgcagcagcacggtgagggtcagggctatggcgatgaggaacgcggcgctggtgccgaggatgcgttcggctttcttgaagttgccgcgcccaagttcaatggaggcgcgcggcgcgccgcctgcgccgatcagcgaggtgaaggcggtgacggccagcagaatcgggaagcagatgcccacgccggtcatcgccgcgttgcccacttcggggatgtgcccgatgaacagtcggtcgatgatcgtgtacgaggcgttcgccgcctgcgccacgatggtggggaccgacatggtcagggccagacggggcaccggtttggtgcccagcccggcatcgatcgtgttcgcctgtaccaaggatcagctctgccagtagtagctgaagaagtcggcgagctcccccatggtttcgtgcagcatgcccatgcgcggcaggtacaccacgcggaagtggtcggggcgatgccagttgaacgcgccgccgtggctgatgaggatgtgcttgtcatgcagcaggtcgagcgcgaactgctcgtccgagtggatgttgaagcgtttgacgtcgatcttcgggaagatgtagaacgcggccttcggcttgacggcggtgatgccgggaatctggttgagcatgtcgtaaacgaggtcacgctggtcgtgcacgcggccgcccggcacgatgtagtcgttgacgctctggtggccgccgagcgcggtctgcaccacggactgggcgggcacgttcgagcacatgcgcatgttggcgagcatgttgaggccctcgatgtagtccttggcgatacgcttgttgccggacaggatcatccagccgatgcggtagccggcgatcatgtgcgatttcgacaggccggagaaggtcacgcagaacaggtccggggccatcgaggcgatggagatgtgctgcaggccgtccatgacgaggcgatcgtagatttcgtcggagaagatgatgagctggtgttcacgcgcgatgtcgacgatctgctggagcacttcctttgggtaaagtgcgccggtggggttgttcgggttgatgatgacaatcgccttggtgttgctggtgatcttggagcggatgtcatcgatgtccggataccattcggactgttcgtcgcacaggtagtgcacggcggtgccgccggccaggttcacgcaggcggtccacagcgggtagtccggggagggcacgagcacttcgtcgccggtgtcgagcagcgcggacatggacaggttgatgagctcgctgacgccgttgccggtgtagatgtcgtcgatggtgacgttcgggatgttcttcagctgcgcgtactgcatgatggccttgcgcgcggagaacaggcccttggacggcgagtagccttcggtgtcggtgagctggtgggccatgtcatagacgacttcgtccggcgtgcggaagccgaagggtgctggattgccgatgttcaatttcaggatgtgggtgccgttggcctccatgcgcatcgcctcgtcggcgaccgggccgcgcacgtcgtagagcacgttgtcgagcttgtgcgatttgccgaaggtacggcggcggcccacgggaatctcgctgtccgtcaggggcttggcggtgcccgtggcaagcggcgtggcggcgtgttcgccgtccgtgacgctgttggaagcgtccgagttcaattgcggggtggattcctcgccgcgcagccagttcgcgtcgacgtccagttcgctggccaggaattcgagcacgtcttcgcggggcatggtcttgccggccacgtattggctgatatggctcttgcccatctttacgccacgatgttcggcggcgtgcaccaaatcgacctgcttcaatcccctactgttcatcgcattgcgcagacgttccgcaaacaccgatacgctcatatccttatgcctccaaccgggagttcaatttatcttttgaacaacagttcaaagcatactcccggttcaacacaagttcaattttggcgtgttctcgagtctcggccggctcagcccaactgcgcttcaatccattgggcgacgccgtcctcgttgttgggcgggcagatctcgtcggcgatagacaacaccttggggttcgcgttggccacggccacaccccggccggattcgctcatcatgttgatatcgatgaggtcgtcgccgaaggcggcggtctgttcgagcggcacgtccagtcgttcgcacagcaggtgcagcgcgtgctccttgttggcctgcgggttcatgagcatccacatcacgccttcgctaatggagatgtcgaagtccggcggaatcagcgcacgcagctcgttccactgttcaggctcggggaagatggtgatcttatccgccacgccttcgggcacgtcgtggaagttcgtgtattggaaggcctgtgttttccaatacacgcgcacatcgaagttggtgtagcgcacgtcgttcatcacgatgccgagcttcaggccgggcatgcgatcgagcaggaacagacagacttcgcaggcacgccgtgaggagaagccaatcttgatcaaatggttctcatcggccggcgtggcacctgaggtgagcaggtcgaagtcggagtgggccgggtcgaaatcgatgagggcaccgttcagatagattacggcgtccaccggcagtttttcggcgaactggaggccggtactcaccggccgcgcggtggcgatggcgaatttcagtccggcatcgtgcgcgcggttgatggtgtcgatgctgctctgggtgatgaaccggtcctcgaatacctcggcgtcgtgcagcaacgtaccgtcgaggtcggcgaccagcagtcggggttgtttcggtgtgatggcgtcgagaatcacagcagcccctcgcagtgttcacgcacgagttcggcggaatggtgcaatttggcctgctcgtcctcgctcagatcgagttcgacgatctcgttggcaccattggcgcgcagttcagtggggacgccgaggaacacgtcatgttcgccgtattcgccgttcagcagggtggagacgggtacgatgcggcgttcgtcccacaggatggtctgcacgatgccggccacggtggaggcgatgccgaagttggtaccgcccttggccgcgacgatctcatcgccacgggtgcgggtcttctcttcgatttcggtggtggacacggaggcgaaacggtcttggttgtcggccaggaagcgggcgaatggcttgccgccgagcgagacggtggaccatgcggtgaactgggagtcgccgtgctcgcccatcacgaagccgcccacgttacgcgggtcgaggccggtctcttcgccgatgatggtcttgagacgcgaggtgtcgagcgcggtgccggtgcccagcacctgggtgcgcggcaggccggaacgtttccaggcataccaggccatcacatcgaccgggttggagaccatgacgatcacgccgtcgaagccggaggccatgacgttgtcgaccacttcgcccacaaggcccacggtgaagccgagttcggccatgcggttggagttggccggcggcttgcggcccacggtgatgacgacgatgtccgcgtccttgcagtcggcgtagtcgccggcgcgcaccttgacgtggcggtcctggaattcgctgccgtcatcgaggtcgcgggcctcccccagggctttggcggcggagcggtcgatgagcacgagctcattgcacaggccgtgcgtgacgatgccgaaggcggcggtggcaccgacctggccagtgccgacgataacgactttgttgcggttcatagtgaccatggtgatgtcctttcgtaatactcgatagaacgcatacgacccatgaccgacggtaacggtcatgggtcgcgagcgacaagtctatatggcgtgcaagccgatcagccgaggttgaacttggtcatcatgtcgaggccgatgatcaatgccacccacacgagagcgatgataacggtccaacggttcaggttcttttcggcgacaccggaagtaccggcgttctgggtcagaccgccgccgaacatgtcggacaaaccgccgcccttgcccttgtgcataaggatgagcagggtcagcacgaagctgagcagcacgacgatgacttgcagcgtgatcttaagagcggtcacagggtacctccggattgattggactgttgaccagcatagcgcacacacgggaaaaccgtggtattagttccgtgatttcgtggatttcagtgccagtcgagcgattttggcgagttcctcaacatccagggccgcccctccgatcaggaagccgtcgacgtcgggttgggaaatgagttccgccgcgtttttcgaggtgaccgatccgccgtacaggatacgtacgctatcggataccttcgtgccaaaagtggtcttcaaatcgttgcggatggcgtttgcggcatcctgggcggattgcggagtggccaccatgccggtgccaatggcccagacaggttcgtaggccacgatgagttcggcggcttgttcttcgttgagatcgcgggtgacgtctcgtacctggcccacggcgaaatcgagttcaatgccttgacgtcgttcctcgaagctttcgccgacgcacaaaatcggctgcatgccggcggcgagcacggcacgtacctgatcgacgatattggcgtcatcttcaggatggtatttgcggcgttcggagtggccgacgatgacgtacgagcagccgagatgggcgatcatgtccgcggacacatcgccggtgaaggcaccttgggtggtcacggaaacggattgtgcgccgtaggcgacatggagcttgtcggcttcgaccagcacctgtacgctgcgcaatgacgtgaacgaggggaaaagcgcgacttcgcagcgtttgaagtcaaagcgagcgtcacgcaacagccataccagcttctgcacgaagtaagtggcttcaagatggtcgaaattcatcttccagttgccggccaccaacggaatgcgtttggacgccatatgtttcccctctaaaaaatacgtagctcccctcaaggaggggagctagaaaatggattactcaagcaccttcagaccagggagctccttgccttcgaggaactcgagggaagcgccgccaccggtggagatgtgggagaagccgtcctccgggaagccgaggttacgcacggcggaggcggagtcgccgccaccgacgatggtgaacgcaccggctgcggtggcgtcgaccagaccctgggccacggccttggtgccggaggcgaactcaggaacctcgaacacgcccatcgggccgttccacacgacggtcttggagtcgacgatcttgtcgtggaagagcttctgggactccgggccaatgtccagacccatcttgtcggccgggatggcgtcggcggcaacgacttccggagcaaccggggtgtcaccggccgggaagccggcgttcacggcgacgtcggtcggcagcacgagctcaacgccgttcttctcggcggtctcgatgtagcccttgaccttctcaagctggtcctcttcaagcagggaggtgccgacctcgtagcccttggccttgaggaaggtgaacaccatgccgccgccgatgaccagacggttggccttgtcgagcaggttctcgatgacgccgagcttgtcggagaccttggaaccgccgagcaccacggtgaacggacgctccgggttctcggtggccttggacagggccttgacttccttctcgaccagcaggcctgcggcggccggcagatcggcggcaacgtcgtagttggagccctgggcgcggtggaccacgccgaagccatcggaaacgaaggcctcgccgagggcggcgatcttcttggcgtaagcggcgcgttcgtcggcgtccttagaggtctcctccgggttgaagcgaacgttctcaagcagcacaacatcgccatcgttcatggcggcgaccttggcctgagcgtcctcgccgtaggtgtccttggccagcggcacgttggtgccgagcagctcgccgaggcgggcggcaaccggggccaggctcagctcaggaacgaccttgcccttcgggcggccaaggtgggccatgaggatgaccttggcgccttcttcgcgcagggtcttgatggtcggcagagcagccttgattcgaccgtcatcggtgatggtggtgccgtccagcggaacattgaaatcagcgcgaaccaaaacgcgcttgcccttgagatctccaaggtccttgagtgtcttcatgaatatcctttccttgacgaatcgcacgtcaaagtggccaattttgccactttgcatattacaggcattccggaacaaaacaccgcattcgcctactgactgaatgcggtgtttcgttacgtcgttgtcgggttacttgccttcggctgcgcgagccttctccgttttctcggcaagctgaagcagtcggcgaattcggccggcaatcgcatccttggtgatttgcggttcggcgatcttgccaagctcctcgaggctcttgtccacgtgatcgatgcgcagctggccggcctgacggaggttgtccggaatgttatcgccgagcacttcgaaggcatgctgcactttttcgctggcttcggcggcagccttggcggaacggcgcatattggcgtcatcgaagttggccagacggttggccttgccgcgggcctcgccgtcggagcgcttgccggtccattcgcgggccgaacgggtggcgcccatgagcttgagcatgcgttcgatggcgtcgggatccttgagggtcacgcgctcggagctgcgcagcgtgcgatgcttggcctggatgccgagacgacgggccacgccacacagggccatggcggcctcttccgtggggcaagcgatttccaggaagctggccttaccgggatcggataggaagccacgggccatgaaggcgccgcgccatgctgctttgatttgggcgatggatccgttgaccacttcagacggcagtccacggacctgctgcttgcggcggtcgaccagtccggtctgcaaagccaaggccactacgttgcgggtgatgagcaccacgtaggtctcgacagggccgttcggggtctgacgggtgaggtggttgacctcggcttcatgcccgaacgtgttcctcaacgtgttcttcagccattctgcaacgtcaagcgaggtgaatacggcttggataacgtatgtattctgtaccggtcgaagaccgccgccaaaacggatcatggccgcagcttgggccttgatcgcggctggtgaatcgccttcaaaggccgccaactcgcttttgacatcgtccagaagagccaagatctacctcctacagtcccgttcttctcaatgcttcaggcgcttcgtgccgttatctgctgtcatacggtcggaagccatcggctttctgtgatacctaatctggtggacaagcgaacccgtttgatacgtattatgggctttgctttctcgcagtgtggtcaccgaacgcttgcccgatgaccgctcgacgcctgcttacgatgagtgacgcttatgctgttctctcgcggaaacggttacgttgagcccatgtgcgcgtaagcggcgagccagctcttcgctcatcgccaccgaccggtgctgaccaccggtgcagccgacggcgatggttacatagtgcttgtcttcctgggcgtatccttccaacgcaatctcgatagctttctcataagcgtcgagaaattccttggctcccttgctggaaagcacgtagtcggcgaccggcttgtcgtgcccggtaagctcgcgcaggttgggaacccagaacgggttgggcagaaaacgcacatcggccacgaaatcggcgtcgatgggcatgccgtatttgaagccgaagctgaagatgtgtaccgccacggtggtggggccggaaccgagcatcgtctcgtagagtttggtggacagctggtggatgctcagggagctggtgtcaatgacccagtcggctcgctccttgaggtcttccagcaggtgacgttcctcaaggatgccgtcgatcagtcggttgccgtgctgcagcgggtgcgggcggcgcacggattcatagcgcttgatgagcacttcgttgctggcgtcgaggaacagaatatgggttttgacgccgagatcatccagatggccgagcacggcggccagctcgtcgaaatagctggagcgcacgtcgatgacggcggcaagcttgtggacgcccgatcccgatccggaaccggaggtggtcatcatgtcgacaagcgggataagcagtttgggaggcaggttgtcgaccacataccatcccatgtcttccacgcagtcagcggcatgagagcggcctgcgccggacataccggtgatgagcagcacctcgaaggcatcaagcggggtcggctggttgtccggagtcgatgtggatgtcgcggaattcgccggcgcattcgtggcggccgcctcgccggtatcgcggattgttgtctgttgactcattacaacgcctcctcaagagctttgcgcatcgcgatctccagctggtcgtcttcggtggtggtgtcctgcagacgctggtcggcatcgctgggcgggtcgtcatcccagataccggtcatcagcaatacctgtacgagagcttggtacagcagcatttcttcgccgccgatggcgtgaccgccatgagcgcgccaggcttccatgagcttggtggggcgtggatcgtagaccacgtccagcagcagtccggagaatggctcggttccggcattggtgagggcatccgcgacgttgtcggccgcatgtccgggaatcgtgttgatgacataggtggcgttgcgggctgcctcgagcagggcctgatcgtcgcctaattcgatttcgctgtacgggttatgcacgttgacgaacttttcggccactggtttaagcccggtgtttttcccagggtggcgggcggcgacgatgatatggccgatttcgggcatcatgcagcatgcggccaacgccgaagtggcggtgttgccattgccgaggatcagcgcggcgccgcttctcgatgcggtgtggtgttcgccgagttcgcgattggcgtggtcgaaggcgagttggatgccgatgacatcggtgttgtacagcttgatgcccggcttgccgttcggccaagcgggatcatcggtagccacactccagtcgaataccgcggtattcgccaccttcagttccttggcccacagattttccggaacaccgtacggttggatggtcttcttcaacggcatggtcaggctcaggccagcccacgtcgagccaaggcctttgaggaaagcgtcgaggtcgtcttcccccacctcgtgcttgtcgtacagccaatcgtcgagtttcagcgaacgataagccgcgttgtggagcacgggtgacaatgagtgcgcgacgggtttgccgagtacagcgcaacgatgattggccatatcccctccttgatgtctgtttccatgctagccgacactttgcttcgaatatgtcaaccacaggccccgcaaccgaaaattcactctgggctgctggaccgggccggctcactgctcgtgcagcgcgttgtacagcgctttggctttggcgtggccgatgcctttgaccttctcgaagtcctcgacactggcttcgcgcatggctttgaccgagccgaagtggttgagcagccgcttctggtagctttcgccgatgccgggaatctcgtcgagcgcgctgcgcagggcgcctttgcgccgctgttggcggtggtaggtgatggcgaagcggtgggattcgtcgcgtacacgctgcagcagatacatgccttcggactggcgtttgaggatgatcggatagtcgtcgtccggcacccacacctcttccaagcgtttggccagtccgcagacggccacgtcgatcacgccacagtcctcaagcgccttggcggcggccatgacctgtggcttaccgccgtcgaccaccaccaggttcggcgtgtaggcaaagtgatgccggtttgtgttctgctggacgatgtcgggcgaggactcccgtgcatcgttctgcactccgaccggcaccgcgtgccccttgccactgatgtcggaaccgccctcaccattgtcgttaccgttcgcaacgattgtctccgccgccacggcagtggtcatcttgccggcggccgaggccgcgcgctgttccgcgtcgatgctttcgccggagtcgccggcgatgttgccgtgcctgaagcggcgggtgagcgtctcgtaaagcgcggacagatcatccaccgcgcctttgccgtccttgcctcggacggcgaagcgtcggtattcggatttcttggcgatcgcgtcttcgaacaccaccatggaggccacttggaaggcaccgcccacagtgttcgaaatgtcgtagcattcgatgcgcagcggggcttgcgcgagtcccaatgccttggccacatcgttcatggcctgggtgcgtgcgcccatgtcggagatgcggctcatcttgctgcgttgcagtgcttggctggcgttctcgttggcgcggtccataagctgcttcttgtcgcctcgcgaggccacgcggatggtcaccgcgcccccgcgcagattggtcagccagccttcgagttcctcgcggcgggccggttcgacgggcacgatgatttcgcgcggtaccggtgcgatgggtgccagcaggtccgcgcgtccggtggtctcctgacgggtgttgcgttctcgggtggcctgggcgcgtgccacagcgtccgtggccgtgatggtctgtgtggagccgatggcctcgcgattggtggagatggtcgcggccgactgggggtgattgtccccggcggcgtccgaatacacctgcaccagaaggtcggccatcaagtcggcgtcatcgatgtcctcaactcgttcgacgctccagttgcgttcgccgcgaatagagccggcgcgcacataaaaggcgtgcaccgaggcttcgagctcgtcgctggcgaagccgaacacgtccgcgtccacatcctggtcgaagacgacggcgttctgttgcaccacggtttccagcatttggatctggtcgcgcagtcgggcggctttctcgaattcgagttcggcgctggcctctttcatgtcgcgggtcaactgggcgatgtatggccgtccgaggcgtccggtcatcacgccgaccagctgttcgcacagccgccggtgttcgtccgcttcgatacggttcacgcagggtgcggagcatttgccgatggaggcgaacaggcatggccgtccggtcagttgcgccttgtggaatacgttggtggtgcaggtgcggaccgggaacgtgcgcaacagccggtcaaggctgtgccgcaattcccatactttggcataggggccgaaataccgggtatcccgacgtttgcgcgaccgagtgacccacacgcgcggaattcgctcccccgtgctgaccgcgagatacggataggtcttgtcgtcgcggaactgcacgttgaaccgtgggtcgaattccttgatccacgtgtattccaacgtcagtgattccagttcggtggcgacgaccgtccactccagactgcgtgcggtcagcaccatggtctgcgtgcgcggatgcagcagatacagcggctggaaataattggtgagcctgttgcgcaggttcttcgccttgcccacataaatgacgcgcccttccccgtcgcgccatttgtacacaccgggtttggtgggaatatccgaggtcttgggtcggaacaggtcgcgagaatcccccagcaaaggtgccccattcgcattcaccttcgccgtcgtttccccggcacccacagctacgttttccggcattaacgccgccgcagtcttccgccactcatccggactatgccgctcaatatcgttcgtcataatcctcctcgctattaagcaaaaccaatcatcagggattgggtgggttggggtgtgtgttgctggaccgtaaagacttggcctgagcggcccggagcatgtccagcaacataccacccccacccacccgaggtcagctgcaatggaaggctaaagcatgggcttcaggaacttgccggtccatgaggattcgcattcggcaacctgttcgggcgtgccctgcgtgacgatggtgccgcctccgtcgccgccctccggaccgagatcgatcagccagtcggcctccttgatcacatccagattatgttcgatgacgatgaccgtattgcccttgtccaccagggactgcagcaccttgagcagcttgttcacgtcttcgaagtgcaggccggtggtcggctcgtcaaggatgtacacggttttgccgtcggatcggcgctgcagctcggtggcaagcttgacgcgctgagattcgccgccggacagggtgggtgcgggctggccgagtcggatgtagccgaggccgacgtccacgagggtcttcaggtatcgggagatgccggtgtacgccttgaagaagtcggcggcctcctcgatgggcatgttgaggatgtcggccacggtcttgccgttgtacgtgacttcaagggtctcgcggttgtatcgtttgccgtggcagacctcgcagtccacgtagacgtcgggcaggaagttcatttcgatcttcagcgtgccgtcgccgtggcaggcctcgcatcggccgcctttgacgttgaaactgaagcggccggggccgtagccgcgcacctgggcttcgggagtcttggcgaaaagggtgcggatcttgtcccacacaccggtgtaggtggcggggttggatcgcggcgtgcggccgatcgggttctggtcgacgtggatcaccttgcgcacctggtccacgccttccacgcgcctgtggcggccgggtacgatgcgtgcaccgttgagcttgtcggcgagcaccgggtagaggatcgtgttgaccagcgaggatttgccggagccggagacgccggtgaccacggtgagcacgccgagcgggaagctcacgtcgatgttcttgaggttgttctcgcgggcacccacgactttgagcacctgggtcttgtggatcttgcggcgcttggcgggcacggcgatctctcgccggtgggcgatgtagtcgccggtgatggagcgcttggcttcgatgaggtgcttggcggggccggagtagatgacttcgccgccgtgttcgccggcgccggggccgatgtcgaccacccagtcggcgcggcgtatcgtgtcctcgtcgtgttcgacgacgatcagcgtgttgccgagatcgcgcaggtggtgcagggtttcgatgaggcgttcgttgtcacgctggtgcaggccgatggacggctcgtcgagcacgtacatgacgccgaccaggccggagccgatctgcgtggcgagtcggatgcgctgcgcttctccgccggacagggtggcggccgcgcgcgagagggtcaggtagtcgaggccgacgtcgttcaggaagccgagtcgggccttgatctccttgagcacttcgccggcgatcagctgtgccgagccttcgagtttcaggccgttgatccaggcgagttcgcgtacgacgggcatgtcacatacgtcgaagatggatttgccgtccacggtgacagagagcacctcgggcttcagacgacgtccgtggcagacctggcagggcacttcgcgcatgtacgactcgtagtattcgcgcatggactgcgaatcggtttcgtcgtggcgtcgcatgagcgtgcggatcacgccttcgaagccggtggagtattcacgcaggcgtccccagcgattgcggtaggagacgttgaccttgaagtcgtggccgtagaggatgtcgtgcttgacgtcgtccggcaggtccttccaaggggtcttcatggagaagcccatttccttggccaagccttcgaggatgtggccgtagtactgggaagtcatcttggtgccgctccacggttcgatgacgccgtcggccagtgacttgtccgggtcggagatgatgaggtccgggtcgatttccagtttgaagccgagaccggtgcaggcggggcaggcaccgtagggggcgttgaaggagaaggtgcgcggctcgacctcatcgagttcgagcgtgtgcccgttcgggcagctgcggtgttcggagaacggctggcggcgggccgggctgccttcctcctcgtccacgaagtcgatgacgatgctgccgttggcgagcttgagggcggtttccaccgaatcagtcaaacgttggcggataccgtccttgaccacgagtcggtcgaccacgacctcgatggtgtgcttcttctgcttggtgagtttgatgtcgtcggacagctgtgtcatctcgccgtcgatgagcgcgcgggcgtagccgtcggagcgcagcagctcgatcatgtccacgaactcgcccttgcggcccttgaccacgggcgagagaatctggaatcgagtgcgctccgggtagccgagcagcgtgtcgacgatctgctgcggggtctgggaggcgacgggctcgccgcattcggggcagtgcgggatgccggtgcgggcgaagaggagtcgcaggtaatcgtagatttcggtgatggtgccgacggtcgaacgcgggttgcggttggtggtcttctgatcgatggagacggccgggctcaggccctcgatgaagtcaacatcgggcttgtccatctgacccaggaactggcgggcgtaggcggacagggattcgacgtagcgtcgctggccttcggcgaacagggtgtcaaacgcgagcgaggatttgccggaaccggacaggccggtgaacacgaccatacggttgcgtggaatcgccaggtcgacattcttgaggttgtgttcgcgagcaccctgaatcgtgatcttgagatcgttcgggatgtgcgagatatcagctaccagcgaaccatcgtgttcgatcagcggcgcctttttgatttcccggctcaggaaggagtcgctggtcatcaccttttcgacgatgacctcaccgttcttgcctttgctggttttcgcgccctttgcgcttgttgcgcgccttgcgccagtccgcgttgccgccacagccacaccccaccttccatctcaccgttcccgcgcgcacggttatgcgcgcgccaaatctgtcccaaggatacccgaacacacgaccaaattcgaacgcttgttcgatggcgtgtcaggccggaaaaccgaaccatagtatgcaaaattccggaccatcagtggaccgaaacgcaagagccggcccacgcgacatcaaccgtgcgcccagccccagtcaagctctatcccgaagacctctcctcctctgatttgccccggttcgcatgtcaatcgtttgacgtccgcatcggggcaaaacccgctgtcccggttcgtgattttggcctgttttcgagaaccaggacattccagtttccacgaaccacataaaacgcgaacggaaacggcggaataaagccaatctcagaatcgccatgttgtcccgattctcgcatcaaacgattgacgcccataccggggcaacacaacatgtcccggttcgcgaaaaacacccgaaatcacaaaccgggacaacggattctgccccggtacgtccgtcaaacgattgatgttcgaaccgggacaaaatcttcaatggactccacggggatgccaagcttgcgtaattcgtcaactgcatcacgcatgggaatgcgttcctgttcgatacgccgataagcgatggttttgtcagcacacagtcgttcataaagacgtcgctccgccgattgaaggccgggcgtcggcttaggctcccgcatagcaatcttcgcgctgcgttcagtacgatcggtaccaaaatcgtcgtggcccggatcgagataacggaaccgcagttcggtcggccgttttgacagacccaacgtttcgacaccgagcagtcggcaaatggccttacgccgattggtttttgactcattcagccatttgccgctgaatcctgtcagtggaatctgtgcgacggtgcgcttcgcgatattccgccgccagcgtacgaccaaccacacgcatggctattgattcgtcaggaacgacgactttggagatcaactcgacagaggtgcctatggtgcgatgcttggttatgatttcgcaaccattcttgcttgcccattgccgtatctcattgttgttgtcatgcactgcaatcgcattggtttccaaaaatgcttggtccggcaatcccaccggcacgggaaatggccatgccggttcgatgtcgtacatatgtgaacgcatatgtttcttcacgcatgtggtgatcgcagcgatgtctttcatgccggccatagttcccatcacctgctttcgaacatcgtcgagtcgaaccgaatcgtcttaataccggcgacgccgggactgctcattcggcaaccccgtcatccttcaatatatccgacgatgattcatcgtccatgtcattctgatgcagcacggcctcgcgcagggaggtgaggccggtgtcggggtccttgtaggtcacgtaggccttggtggagacctcgaggatttcaccggtcttgctttccggggcggagacgatgacctggaatccgaggcgcggcagcaccgtgagggcgcgctgcgtgtaacggccgtcggccttgatgagcgcctcgtcgaggaacagcgtggtgtacgagggctcgctggtcaggccgccgccgagcaggtagatgagcgccgcgccgtatacgaacgaggtgagctcctgcaaggcgccgcccgaacggccgccggtggaggtgatgcgttcgtccggaccgtcggcatgatgcacgatggcgtagaaggacgagcggcagcgcgggtcgaggttgcgggcgccgtagcttttcacgccgttcgtgtccttgacctgcgcgagttcggcgcgcagcagcccgaccatcggcgcgcaggccgcgaaagccttgcgcgaggcgtcggaatcgttgacgtcggcggatttccaatcgttcagggtgccgatgacgcggatgagctgcgcccagaaggtgcgctcgggacggcgcacgtccgcgtgcagggacaggctgccgtgcttggggccgaactgttggcccttgagcatggcgttgatgcggtcaagctggtcgtggatgtcgctggcatccgtgtcgatggcgcgtttgatggtcaggaagctcctgagcagctgttcgaggcagcgccggtattcggcgtcggtggcggcaaccgcggccagctgggtgaggctggcgagttcgtcgagatagtaccggtagtcctccacgctggcggtcagcgaatcatcgtcggccgcgtagagcgcgatgtaggtgctcattttcgattcgacgccggtgcgcgcggcgtcggcctggccgttcagcagattgatgcgggaggccatgtccttgccgatgccggcgatggtgcgttcggggaagctctcccccggcgcctgcgttcctgccgcgcccgcgccgatgatcatgtgcgcgcgcatggccgcgtccgccaatccggcgaatcggttgtcgtaggattcggcgagcgccgccgtgacttcgtccggcagcgggccggaagcggcgtcatcgtcattgtcggcggtggcaccggcggcgtccgtcgtgccggtgtcggcatggtcgcgcagccagatgagcgccgcttcgacggcgctgccggcgcgggccgcggcctggtcggattcgatgcgctggcgttccgcacggtcgagttcggcgttcagttcgtcgcgctgtttggcgagttcggcgagtttgggatcgtttttgatggatgcgatggcgtcctgcgtgtccgtgatggtccgttgcgcgccggcgatgtcgatgcgttcccatgacgtgtaggcgagctggttggctagttcgagttcgcggtggaggttatcggactgtgttttggcggccgtgtagtcggtgtcggcttggctgagcgcgttgcgggcggcgtcgacctgcgctgcgagcgcgttgaggtaggtttcgttgacgaatccgatgacctgggcgcggtctttggtgccgtgctggccgcgtgcgccggatttgatctgaccgtcggcctgcacctgacggttggtgcggtcggtgtcgtcgatggcggtgacgcatagggcgtcgaatcgttcgtcctgggtctgcgagcgcagccagtcggcgaagggcgagtcgtcgcggtagcgcagtttgccggacagccagtcgccgtcctgttctccggtgagtatgttcgcgtgcgcgccggtgtcgtcgtagtggcgtgcggtgtccacgaactgccaggtgcgtcggggcatggtgcgcgggtcgatggtgctgactttggcggcgaagccctgttcgtggcgcttgtcgacgaggatggtctgggcgatgggcgcgtaggcgacgttcatggcgagacgccagtcttcctcgtgttcgttcacgtccatgagttcggccacgtacggcagttcggcgggggcgagtccggtggcgcggcagagcatggcgcgggtttcgtccatctgctgggagatgcgggtgcgctgggagcgttgccggtcgaagtcgcgttgcagtcgttcgaggtcgccgcgtgcgccggcccgtgcgttgatggcggcggtgagggcttcctcgcattcgccgtctcgtttgttgtattcgcgtttgaagttcacggcgttgatgcggcgttcgttccaggactgttcgttgccgggcagtgtctcgccgatggatgcgaacgtttgttcgattcgtgttcggttggcttgcatgtcttcgagggtgcggcgggcctggtcgagttcgagttcgagtcgggtcaggttgccgccgtccagaccctgcatctggcctcggatcatgtcgaggcgggtgcgcaggtcttcggttcggcggcgcagcagcttggcttccgcctcgctgttctgttgttcggcgcggtcggcgggcagttgggcggcgacttcgccgcgcatgcgggccaatgcccagtcgcgcagcacggccggcaccgtgccgtcgacggccggcttgaccggttcgaaggcgcgggccttgccgcgtgcggcggcgtattcgccgtaggcctgttggatgccgcgcagcgtgtccatgcggcgggtcttctcgtccatggcgtggaagttctcgtcgtaacgttcgtagtcctcgaccgtggtgcgggccaggtccagggcttcgggcacgccgagcacgccttgtttgaagatgtcgtcgagccgggagggcgcgtcggcggactggatcttgtgcagcagtcggcaggcggcctcgctcaggcccattgcgctccagatgtgtgtgtggaacgcttcggcgctggggaatgtgaggcagtcggggtaggtggctttgagctgggctggtgtgaacggggcgtcacggtattggtccatgcgcctggggtccacgggcttgccccagaccacgtactggcggcgcacgtcgccgcggccgtcgccgggcatcaggtagaggaatttggcgcaggaaagcacctggccggtggtctggttgcgataggtgtccacgatggcgccccacacgggttgcggcgcgccgttctcgtcgcgaccgcgcaggtagagcggctcgtcgccggtttcggtgctgcccacgccgaccatgccgcgcaggtaggtgtagtcgctgcgttcggagcggccggagttcgaggccttgttgaacggcgtgccggtcgggtacagcagggagatctgcgcgtcgaccagcgtggatttgccggattcgctggcgccggcgagcagggtcaccggcagcttgtggtccgtggaggggcggaattcgtggtagccctcataggagccccagttgatgagtcggcgggattccagcatccaccggtccgcgatcatctgcacgtctgtcgcctgcatcattcggctcccttctcgtcgtcatcgtcatcttccgtgtcgccgtcgccgtgttccgcgacgtcgagccaggtgtcggccagttcgcggtcgagcaccacgggcacgagcggcgtgatctggtacatggcttcgtcgtccaggcgcgccaaatacccgtaggtgatcatcgcggagacgatggtgccgatctgctttgccacgccttcctcgtcattgcgggctgccaggtaaccggcgccggtggcgagcgcggcgcggatctcctcaaagctgacgagccagtcggcggggtcggcgtgcacgttctcgtattcgaggacgcggatgcgcaggaaggcgagcagcgcggcctcctcgcgtttgaggctgacacgggttttgagcgagcgcagggtcacgtcgtcgccggccacgggcgtggcgtacatgatgcggtagcgttcgttgatcaccaagtcgagcaggtcgttgttcagggagcgtacgacgacgtcgcggttgtcgagcacggtgtcgtaggtgggcccgctgatatagcggtcgcgtttgagggcgatggcggccatgcgtgcctcggccggcatgtcgccggtgtcgccttcgaacagggcgtacgggttggcgttgtccatgtgctcctcgtgttcctcggccacggtcatccttcctccacaatgatgttcagctcgtccatgtcggccagcaccggtctagtgatccagtgccggggctcgccgtcgatcgatacgcaatgccaagtcgcggtatcgccgcgctgcgccggggccggctcggtggcgatgtcgctgtcgatgccgacgccgtcagtggacggctcgtcggcgatggcgctgccgcttacggctcccagcccgcccaggaagccgacgatctcgctttcgcggcgttcgctttcgggcagccggttgaagctggcggcgatgtccacgagggttgcgttggacctgtcatcggacctgtcaacggtcaccgggttgcgccggatgaggctgaccatgcgcaggagtcgggggccgccgctgttgaccatatcccgcagatcggccaccggagtcgcctgcggggcttcggcggcgaggtcgctcaggccgggtgcggtggcgcgggtcatggatttggccgggcgcatcggcaatggcgcgaacagcgcgtccgcggtggccgtgtcgtacgggcgcgaggcgtctcccatatgggttttcgcatccgcgttgaggcgcgcgtacagtcggttcaagcgggtgagcatcgtacggtagcgagtgtcggtttgctggcgcacgagccggctgatcgcctcgtcggagacgcgcatctggcggcgcacggcttcgatgccgtcgtagatgcgggccagttcgtcgcggatctggccgagcagcacgccggattcgccggccagatacggggttttggcgatggcgcgcagggcttcgtcgatttgctggcggccctcgtcggtgatgatcacctggaaggcgtcctcgaagcggcggccgctgtccgattcgctgaacgagcggcggtattcgtcgtggtagcgggtcaggttctcgtccacgctgatgtcgccggtctgcatgcgccggcgcaaggcgtcgccgttgtcccgctcgtcgagcacgagttcgcgcaggtcgatgggtacgccgcgcagcgtgttgtggatcacggcgatcacgtcctccacttgggcttcgctcagcgtggcgtgctgcttgccctgttggatgcgtttgatctcgtgcttgcgttccttgatttcacggttgaggagtttgatgcgctcgccggggtcggcggtcagctgcatgcgcgcgtgttcgatttccatgatgatgctgttggcctgggcgccggacagggcgcgtgattcgtcttcgagcctgctcagtgcctcgatggcgcggtgggcgcgggccgtcaaacggtagaggaatcggtgtgtggccgcatcatgcgagttggcgagccaggcgtagtcgccttcgccttcacgggtcaggtcggcgaggatctgatgggcggcctcggcgaaggtctggtcctcgcgcggcgcatattcgccggcgtcggccagagcgttcagactttgcgcgaaccgctcctccacggtctcgcgcggcagctcgccggtgagcgggtcgaacgtggaacgcagcagcgacacgtacagcatcgcgttctggcgcaacagcaaccgcaggacgcccgtctcatacaccggtcgcagccgttccagctcccgcatcacatcggccacagcatgcctccctctgtcgtgaccgcaccatactagccgatagccgcgaaccacaccccgcccgcgccacgcgtgctctctcccgcccagcaccaatatgtcacttttactgcacatgtcatcatgtgcagtaaaagtgacattgaggctgcgcactcatggtgatcgttcactccagccgtcgcccctattcgccgcgcagggcctcggtcggggtgagacgggcggcgcgggaggccgggtagaggccggcgaggatgccgaccaggatggcggcggcccaggcgagcggcagggaggtccagtcgagggcgatcggctggccggcactggcggcgacgccgatggcagcgccggcgccgagcgcgatgccggcgaatccgccgagtgtggacaggagggccgcttcggtgacgaattgcatgcggatgttgccgggcgtggcgccgagcgcgcgtctcaggccgatttcgccgcgacgttccatcacggtgacaatcatcatgttggcgatgctcatgccgcccacggccagcgcgatcacgccgatcatcaggccgagcgtggtcagtgaatcgttggtggtgtttcgcgctttggataggtcggcggacgcggtgacggacacgttgccgccggccgggttggcggcgtgggcgagcgtgcggcgggtgccttcggcgtcgccgggcgtggtgcgcacgtagatggcgctgatccgtccgatggtgtcggcctggtcggggtaccggccgagcgcccattgctcgccgatgatgacggcggcgttcatgttttcagcctgcggcgtggggttcaggatgccgatgacgccgtaccatgcgttgtcgatgaggatgcggtcgccgggctcgttgacgccgagccggtaggcggcgtccgagccgagcacggcgacgggcaggtgctcgttgttcgcgtcgatgccatgaccttgggcgaggcttgctccgacggcgtcgagtgcgccgggccgcatgatggcgagggccagcgcgttgccgttggttttggggcacagcccgttcttgaagatctgcaccttctctggcgcggtgtcgaagacaccgacccgttcgacctgcggctgacgggcgatggttgtgggcgcgtaatccggcagcggaaccttctgctgggcggcgtccacgccgggggcgaccaccgacagattcgcgccaagcgcgtcgagttgggcgaggagcgctgcctggttcgatgcggcgatgccggacaacgccacatatgcggccacgccaagcgcgatgcccagcgatgccagcaccgtgcgggacgcccgcccggcggccccaacccaagccgcatgcatcaaatccgcaattcgcgtgcgtattggtttactcataggagtacgttcactcatatctctcccccagtcagcctttggctgacagcccctcgtcagagggggcttgattcggcttgtcgagttcggtgactaggccgtcttggatgtgcagacgcctggggaaacgtgcggcgatggtctggtcgtgggtgaccatgaccaggcttgcgccggaatcggccgccgtaagcagcaggtcgacgatggtgtggccggtttcgcagtccagcgcgccggtcggctcgtcggcgaagatgatgtccggccgtttggccagggcgcgggcgatggccacacgctgctgttcgccgcccgacaactgggccggccggtgatgcaggcggttccccaatccgacctgttccaacgcctcggcggcccgttgccgacgttcgccgcgcggcagggttgtgtattgcaggcctgtcatcacgttctccaaggcggatacggtggcgatcagatggaactgctggaacacgaagccgatgcgcgcggcccgcaggacgctgcgctgccgctcacccatcgcattcacatccccgccgtcgtatcgcattattcccgaggtcggcatgtccagcgtgcccagtaacgacaacagcgtgcttttgcccgagccggacggcccgacgatggccacgagctcgccgcgatcgatggccagcgatgtatcatgcaatatctccagcaagctcccgtccttgcctggaaacgccttcgtcacatgctccaacgtcagcaatgccccatgctctgggccagcgggggcaaactcgatgtcgttcatgagaccaccaccttgtctcccgccttgaggccgtcggacttggtgatttgcacttgcgcgtcggacaccagcccgattgacaccggcacacgcaccaacttgccgccgcgtaccgcttcgaccgcatacgcgctgccggcgctggcgatcagtgcggtcaccggcacgatcagcgcctccccggtcgaggcatcggcgttcgggatgatgacttgcacggccgtcggcccgaaagccgccacctgcgactggtccgggaagtcgatgcgcgccgatggctgtgtggcttgcccgttgtcgccggtcttctgcccgccctgatcgaccgaggcgagcgtcgtttcgacggcggtgttgtccggcagcacgacctgcgccttgtctccggctttgaacatcgccgcctgcgtggcggtcaacgtggcctgcgcatgcagggtgacgcccgtatagcttgccgggctgacctgtgattggccgagtttcgcgttcaccgccgtgatgcggattggtgcggccgcggccagggccaccgtattcgggtcgaatgtgccggtgaccgcgtcgccggtcaggccgagcgagcgctgccattgccggatcgcctcgcgggtcagccagttgaaatgcggtccgacctcgccgccgtagaatccgagttcctgcaggttctgctccagttgcgtgacgtccgggccgtcggagacgccatcgccgatcgtccgccagaacgggcggtcgccatggaacagcggcacgggcgcgccgtccatctcgtacacctgttcgccggtgttgatctgtttgccggccaccggcagttgggtgattgtgccggaagcggccgcgaaatcggaggcgtcatcgtattgcagactcgcgccgagccgggtctcggcgttgagtacgcccttggtcacctcctgcgtgcgcagcgtggacacatccacctgctgcgatcggccagtctgcccggtcgcggtgacgtgcccggccaacgtccacggcctcaccgccacgcacaccgcggccagtccgatcacggcgatcgccgcgataatcatcgtcacgattctgcggtgtttcccgaatctgcgcgcttccgtccgtgtcatgattgctcctttgtccgttatcggatggccgtctcattgctggggcgcggcttcggtggacgcgctgccggaggtgaattcggagaggactttgttgtagtcatagccgaattcctcggtggtgccagcgaaggcataggagatgttcgcgccatcggtcgggcattccttgaggaatcggcgcagttcggattcgcttacggtgccgggaatcgtgattgaggtgggcgtatcggcgtccgggtccttgacccagtcgaagcccttcttacgcgcggcctgggcgtaggcgagcgccgcctgcttgtcttccccggaatactggtgttgcggccccatgtccggaatgggctgggtgaagtcggggttcttggcctcgcagtcggcgtattcccgctgtttggattcgtagggtgagccggcgagcgccttggcgtccttgaacaccacccaggtgctgtcgtcttccatcgacgtgtaggcagcgttcgggtagagttgcgggccgtcgtcggatgcgctgaggctgttgccttgggaggcgaccggcttgccgtcggtgccgatcatgcgcagtgcgaccgcgtttttggtcggggcttgtttgcccgagccggagccggacgacacgccagcagccgtacgcgcgtcgaatcctttgccggtcaggcaggcggcgaatcgcttcgccgtggcgtcggtggtggtcgtcgcatcggaccgatcgtcggcacctgagcctgttccgactgccgccagcggtgacgagcaggcgcccagcatcgaagccagcgagagtgcggacgtaagcattgcgattcgccgtaccaggcgcgtatgagtagtggacattaccgtctccattccgtgagtcgattgtgacgacttccatccaatcgccctcaccgtggagcgtcggtaagcggacggattactttcgccttaccgtagaatcgggaaaatgttgggtgatgccattggttcgggaaggctcggaaggggacatgatgcggattctgatcgtcgaggacgaccgcgaactggccgccgcgttggacgacgcgctgcgctacgaggggtacgcgaccagtctggcaaccaccggcgtcgaagcgttgaagatccttgccggcacgaacgtggacatcatgctgctcgaccgtgatctgccggtattgtccggtgacgcggtgatggccaccgtcgccgcgaaccgcattcccgtggccgtaatcatgctgacggccgccgccgaggtcagcgaccgcgtgagcgggctggacctaggggccgacgattacctgaccaaaccgttcgcctatcccgaactgctggcccgtatccgcgccctgcaacggcgcagcgggaccagcaacgcgaccgcagccgtgctcacgcgcggcgacatcaccctcgattccacacgccggctcgtgttccgcgaccacgggcgcacgctcgtcaaactcacacccaaggagtacggcatattgctggagctcatgcgtgcggaaggcggatacgtgaccgcgcacgaactctacgatgcggtttgggatgagccgaccgccgccgacccgaccgacgtgatcaaaaccaccatctattcgctacggcgcaaactcgccgatcgcgaggccatcgtctcgacacgcggggaaggataccggctgcaatgaaggcgacgaacacggcgaaagcatcaggtcgtatacaggcgcttgccggcaaactgcggcccaaatcattccgcgccaaactgacgttggccatcagtctcgtgttcctcatcgccatgggatcggcgaccctcgtgcagaccattgtggtcaacagcatgttcacgtacgccacgacggtcaccgccaaaaaccctgagatgcaggtcgaaagccagcacagcggttccggcaccggcaaacgcccggattccgacccgcgaatgttttcccggggaagcggcacaggtctgaacgatatcactggaacatccagcgtcggcggcgatatgggcgacggtgactatcaggtggaatggggcaaggacgggtcgtataccatcaacaccccgtatggcgtctccgtgtggaaccaggacaacatcgccaccggattgcgcatcagcgcggccatcatcttcgtgttcttcgggatcaccagcattctgatcatctggctggtcacctcgcgcatgtcccggcaactgacctccatcagcgcgcaggcggcggcattggacccggccaaacttgatacgcgcatcgacgtgaatgggccgccatctcgccgtaggccccagttccggcgtgcgggcagacgcgggaccgaggattgggatcatagcacggacagccgcacggacggtcgagctgccggccaatcctccgaagtcacgcagctcggtgacgccatcaacggcatgctcgaccggattcaggccgcatccgaagcggagcggcggttcgtgtccaatgcctcgcacgagctacgcacgccgattgccgcggtggagaccaatctggacgcgccgttggcccaggggcggttccccgaggatgtgcgaccgtcggtacagcgcgcactggatgccaatcggcgcggcgcgcaactggtgcaggcgctgctgaccttgtcccgtattcaaagcgggaccatcggcggcaagcaggcgggcgatgtgacacagatgagtcccgcatcaacggcacgcacatccacagatttgtacggatgcgtcggcaactcccttgcggatatcgacgatgccgccaccaagcgtcgcatcaccataaccgtgaacaaggccggcggcgacgcggacatgtttctcatcgccgccgacccggcgttgctggaactggcggtcggcaacctgctgcgcaatgccgtcgtgcacaacacggatgatgggtcgatcgacgtgaccgtcgtatcggatgaggatggaagcggaccccgtctgaccgtcacgaacaccacggatgagatgctgccggacgatctgaacgagctgacccaaccgttccatcgcggcgagaactcgcgtatcagcgccgtgcccggcgtggggctcggcctgtccatcgccagtgcggcatgcgaggcgatgggagccaggctggaactcggccaactggccgaaggcgagttccgggcgagcattcggttttgatggaacactcaggctccccttcaaagaggggagctctattgtttcgcacgcaaaaatcacagacagactattgccttgcgggaaatcatcgttagattggcgagaggaatattgtcaatgcatacgaaacggaaaacatcgtgaccgcaccgaacacgcccgccgaaacctctgaccagctcaacaagcccgccaaatccggcaaactggaggtctccgacctcatcaccatcggcgtgtttgcggccctgtacttcgtgatggtgtgcatcgccacactggtgagcaccctgttcaccagcggcttcggctccatcttcctgcccgccggacgctcgatccgcgcgcgagactcttccttctgctggtggcgaacctcatgctgttcttccatgtagggctcgccacgcaaatcgtcatggtcgtgctgttcctgttgcccctgctggcggccgcccgatggcgaaccgcgttgaacttcggcgtgacctatgccgtactcaccgcgctgggaatgctcgaccccgatgccctgggactgccgtggctgcatgtggtctccgcgctggccgtgggcgtcacgatgatgctgccctgtttcatcaccgactcgcatggctcaacggcgtggccgaccggtacgtggtattcgacggcggacatatcgtgcaggattacgaggccgatgaattcctgtccctctcccccggctgcgtggccgccatgggattgcgggcgtttgacttggaaccgtatcggcaccggattgcggccctggcttcaagcccggccgccgaatccggctccacggacaatgcctcgctcgccatcgaatggttcgccgaggacgacaccagcctcgacacttacgaatacgccatcgaccatgtcatcgagcacgggctcgaaagctcccccaccttcgtgctccgcaccgctgatccggccgccgaagacagcccgttccgctggctgctggccatcaaccctctgccttcgcgcaaggcgttcgccgagggcgggctgctcagccacctgcatttccagtacgccaacgatctgcacacgctcgtcgccacggatgaggccaccggcgccgagaccttgcgcaatccgcgttggtacgcacaccatgtgctccaacgagggaaccaccgaggaccgttgcgccatcatccgtgcgttgcaccacttgcagtagatctggcaacatacggcggtatgacggctccccgctagtgaaacagcatcgcttcagtagccatgcgagtgcagatactcgtcatcgaagccgaaataatggccgatctcgtgcaacacggttttgcgaatctgttggcgcagctcggcccgtgttgagcatacgcgttcatgcgaccccttgaacagggtgatgacgtccggcatcacgccgctgtagcccgtggttcgctttgtgatgggtatgccctcatacagtccgagcagctcaccgcacggattgctcattgtggccagttcgcgctcattgggttcgtccgcaacgacgatgccgacattctccagcacccgcgcaaaccgttcaggcaaatcatccaacacctgttcaatggcccgttcaaactcatcgtcaccgatgtgcatactcaatccttcacctgttgcttggctcccacgataacagacatattccgggttccggcttcttgcgggtgccataacgttgcgcggaacgcttccaatcattcattaggtcgattcttcattcattaggtcatgaggctgcgattgtcggtgttggaatggcaccattccagtggtgactgtcagagctcaccgacctaatgaatgaagaatcgacctaatgaatgcgtccggtcatatctcattgtgaaaatgacccggtattgcggtattccgcaattgcacttccaacgattctgaagtattcatccagattctgcgtggtagcgaacgttcttcttgtggcgggaaaagtcttatagcccgcgaaggagaggttgttccttttctcgatatctccttcccatcggtttcggtcatagtggtaccgtccgtcgtattccagaatcacatgatcattcggatacaccatgtccacaaccacctctttgttctgcaacgggaggtatatcggagcattcacctccaattcgggtaatccacgttttaccgattcaaggcgaaggatgctttcctgcggcgaatcggtgttctctctgcacaacgagagcgctttgcgaaataatctgatacctgggaatctacctatatcggcgaggaacaacgatatcttgtctttcgttgtctgtttcaaatgctcattacggcaggtggcccaatccaaggcaatgaccatactttccacatcgacgaactgtgcgatctgacacagcgcctgttccactgaaaccacggcgataagatcatcaatcatcgtctggtcaatgccatgaccccaataatggcattgcgtttcggtgagattcgacaatctttcagccccggacaccgtaacgtgcagtttgttgaggtcatagttgggcttgtaattcagcgtggccgtcataccagcaagctgtagcctggtgccatggctgaagcaaagctcctgtgaagtgcgcatcgatctggcacggcattgttccagtgttttctgggcgaggtctcgcgcctcatcaagtgtgaagaacgtgttgtatgcataggactccatgccatcccccccaatggttgtatccgtgaaccgcgttattcacggatacaactcacgatggcataaccaacttctgcgcgcaaccagctcggccgaatcggtggatatgtgtataacctgccagctcagctgttgcggttgatctcgatgtcggtgacggtgaggttggcctcgttgatcaggttgaagaggatgacttcggccagcggaccgggctgcatgaaggtgtgctgcttggcttcggacacgtaatcgtggctatcacggtagaaggcggtgtcgatgccgcccggatagacggcgaccaccttgacgctggtgcccttgtatgcggcctgcagactcttggtatagcccttctcgccccacttggtggcgcagtacacgctttcgttcgcgttgccgcgcgtggcggcggtgctcatgatctgggcgattttcacgtcgcgctctccacaggccttgagggtttccaccgtccacagaatcatgcctttgagccccttgaggcatttgtcaatgtcagcggcttcataggcggtgggcaccttgaacgaaggctggccggcgttgttgatgagcaggtcgatgtggccaagcgcggcgatgctcgccacggattccttgacgaacgcttcgtcggtgatgtcgcctacgaaggcgcggtaggattcggctggccactgcgcgctcagctcggcctgacgttcggcgttgaagtcgatgccggccaccagccagcccttggcgatgagttggctggcgagctcgtagcccaaacccagcgcgctgccggtgacgatggcgatcttctggcctgttgtggttggcatggttgattcctttgcatgcttgcgagactcccctcagcgaggggaacctagggttaacccgttctttgctgacagctcccggtaaggggggccacggtaggactattcttcggctacgagttcgaggtacgaatcattccagaggtcttcgtcgccgtcgggcatgaggagcacgcgctcggggttgagcgcctcgacggcgccctcatcgtgggtgacgagcacgatggcgccctcatacttggcaatggccttcagaatctcctcacgggaagcggggtcgaggttgttggtgggctcgtcgagcagcagcacattggcccgcgaggtgaccagcgtggccagagccagacgggtcttctcaccgccggaaagcacgtgagccggtttcatcgcgtcgtcaccggagaacaggaacgagccgagaatcgaacgggcctgcgtattatcgagctcgggcgccacatgctgcaggttctccaacacggtggcgttcagatccaaggtgtcgtgctcctgcgcgaagtagccgatcttgcagccgtgaccgtattccacggaaccggtgtccggctcctcgatgtgggccagcaggcgcagcgtggtggtcttgccggcaccgttgtagccgaggatcaccacacgcgagcccttgtcgatggccaggttcacgccggcgaacacgatgttggaaccgtaggccttggagatatccttggccatgatcggcgtgcggccgcagggcgcgggctcggggaaacggatgtccgccaccttctcggccttctgcgcctcggaggtgttttccagcagcttttcggcgcggcgcatcatgttctgcgctgccacggccttggtggccttggcgtgcagccgaatgccttgcttcatgagacggtcggccttcttctcggccacttcgcgttcgcggcggcgacgctcctcgtccaccacgcgctggtgcaggtaggccttccagccgagcgaatacatgtcgatctggccgagctgcgcatccagatgccagaccttgttcaccacttcgtccagcagttcggtggagtgggagatgaccaggaagccaccctcgtacttcttcaagtagccgcgcagccattcgatggaatcggcatccaagtggttggtcggctcgtcgagaatcagggtgtcggcgttggagaacaggatgcgcgccagctcgatgcggcggcgctggccaccggagagcgtgccgagctgctgctccatgacctcctgcggcaggccgagcgaggcggccatggaaatcgcctcggactgggccgcgtagccgccagccttgtcgaagtcctgcatggccttgtcgtaccgggtcatggccttgctcatcacgtccggatccgggtcggtcatatccttttcggccttgcggatgcggttgatgatggtggcgatgtcacgcgcgctcatcatgcggtcgagagcggtctgcgtgggatcggaggcgtgcgtgtcctgcggcaggtagccgagcttgccggagacgcgcaccttgccggcggtgggcagcatgtcgccggtgatcacgcgggtcagcgttgtcttgccggcgccgttgcggcccaccagaccgatcttgtctcccttggccacatggaagttggtggggtgaagcagcgtgcgcgcgccgatctgaatttcaagtccctgcacctcaatagccatgaataacctacttgcctgttacgaatactgtctcttaccaaagtccgactgtccatcatagcgaacaccatgccgaccgggctcagccgacgctcatgcgtccatacgcttatatgcccgtaggctcatgtaatacctgcaatgtgcgcgataagacagttgaatcgtgatttccgtcgtacactatccatatccgggcacgcttgcggcgcaatgcgtgtgcagtataggaaggatttcccacatggaaccaaattatctcgtgttattgggaatcgtgatcgtgattgtgggtttcgccctcaaacttgatgcgattctgatcattatcgtggcggctgtggtgactgcgctggtcggcggcattggcgtcgacggcttcctgaccacgttgggtacgtcgttcgtctcgaaccgcagcatggcggttttcatcatcgtgttgctggtcaccggcacattggagcgcaacggtctgaaaaccgcagccgcgcagctgatcggcaaggtgaagaatgcgacgcccggtatggtgatcgccctgtatggtgtgatgcgtctcgtgttcgccgcgttcaacgtgagttttggtggcgtggccgggttcgtgcgtccggtcatcatgccgatggcggtgggtgcgattgcagcgtccggtcacgagccgaacgacgagtatgtggaagagctcaagggcatggcttccggcatggagaacgtcgcatggttctttggccaggtgctgttcgtgggtacggccggtgcgctgctcgtacagtccacgttgaagccgctgggttatgacgtcgaactgttgcgcatggccattatcgagattcctgtcgcggtgattgccgtggcggtcaccgccgtctattacatcatcaaggacacacgactgcgcaagaagtactacggtgccgaagccgccgctcaggccgccaccgctaccaccaccggcaaggaggcctgatatgtcgttcttcatggaccccagcgtgaccgttggcacgaaaatcctcgagttcttctatattttcatgggtttcatgtccgtgtatgcgggcgtacgcaacctactcgataaaaccaacaaggcccgctacggcactttcgtgttctggacggcgctcggtatcgtcatcgcgttcggccgttggattccggccattgcggacggcgtgctcattatcatcatggtcattcccgccatcttccgccaagtgcgtaagggctcggcatccgattcgagcgctcccagcaccgccgaagtggccgcgaacttccagcgcatcggcatgcgcatcttcattcccgccctgtgtctgggcgtgttcgccattatcggcgccctgattcccagcgtcagcgccctgaccggctgctgcatcggtgtgatgattgccgccgtgattctgttcgcgttctcgcatgacaacaagccggtcgtattcctcaacgattcggaacgcctgttgtctgccatgggtgcgctctgcatgctgccgatgctgctggccagtctcggcgcgattttcacagccgcaggtgtcggcgacgtgatcgccacgctggtcggcggcattattccgaagggcaacgtcacgctgggcatcatcgtattcggtgtgggcatgatgctgttcacgatgatcatgggcaatgccttcgccgcgattaccgtaatgaccgtgggcattggcgcgccattcgtgctcgcctacggtgcggacccggcggtgattggcattctggcgctgacctgtggctactgcggcacgctgtgcacgccgatggccgccaacttcaacatcgtgcccgtcgcgatgctcgatatgaaggaccgcatgggcgtgattaagaagcaggtgctgcccgcattggtgatgattgtggtgcagatcgtctatatgctgatcgcgcaataacctcgttgtccaaataccacaacaatccgtgaaataaggagctaatgatgagcaagattctggtgaccggattcgatccgttcggcggcgagccggttaaccccgcattcgaggcagtcaagctgttgccggatgaaatcgccggtgcgacagtggtgaaactggagattccgacggtgttcacgcgcagtgcgaccgtggttgaggaagccatggtgcgcgagcagcctgactatgtgctgtgcattggtcaggctggtggccgttcggctctgaccgtggagaaagtggccattaatttggccgaggcgcgtattcccgataatgatggcgagcagccgttcgatacgccgttgcgtgaggacggcgacaccgcgtatttcgccacgttgccggtcaaggccatggtcaggaacatcaatgaccacgggattcccgcattcatgtcgtatacggcaggcacgtatgtgtgcaacagcatcatgtataacgtgttgtatctgattgaccgcaaattccccggcgtcaagggcggcttcattcatgtgccgtatgcgaccgcgcagggcgtgggcaagccgaacggcacgccgaccatggaaatcgcgaccatggcgcgcggcatcgaagccgccatcgaagccgctgtgagcaccggaaccgacgccaccgacatcatgggcgaaacccactgatacgcatattgttatgcccctgctgacagcagttgtcagcaggggcatcgctatgcgttgaacgttacagttcgcgcagctgggcggcgatctggatggattcgacgctggcctcggccttgttgcgcgtctcctgccattcggtagcgggcacggagtcgagcacaatgccggcaccggcctgcacgctcgcctcatggtcgcgcaggaacgcggtgcggatggcgatggccatgtccatgttgccagagagatcgaagtagccgacggtgccgccgtagatgccgcggtcggccggttccaactcgtcgatgatttcgactgcgcgcggctttggcgcgccggaaagcgtgccggccgggaacgcggacttgaacacatcgaatgcggtcagcgaggggtcgaccttgccggtgaccgtcgagcagatgtgcatgatgtggctgaaacgcttgatgtccatgagctgcacgacttccacggactgcggcacgcacaccttgctcaggtcgttgcgggacaggtcgacgagcatgatgtgctcgctgcgttccttcggatcggcaagcaattccttggcgaatttttcgtcttcctcaggggtggcgccgcgagggcgggatccggcaatcgggaaggtcatcgcgtggccgttgtccaccttgatgagggtttccgggctggagccgatcacgttgaagtcgcggccctgagcatcggtcaacgccatgaaatacatgtacgggctcgggttcagcgtgcgcaacacacggtacacgtcgaacgggtcggcaggcgaatcgatgtcgagacgctgggagatgaccacctgaaacacgtcgccgtcgacgatgtgctgcttggcgcgttcgacggcctgctcgtagtggcttttctcggtgcggaagcgcagctcaggctgggcgaccgtttcgtccaagatgttgacgcgggactcgcccggagccggggtggcggcatcgtgctgcatctggtcgagtcgagcgacggcctcgttgtaggcgacgtcggcgcgggtggatttatcatccacgttcaccgcgttggcgatgagccacaccgaaccggatacgtggtcgaccacggcgatatcggtggccagggcgagcacggtctcaggctggccggtctcgtccggagcttcggcgcgcagggtcggttcccagtggcggatggcatcccagccgaccgtgccgaccagaccgctggtcaggttcggcaggccttccacatgcggggccttcagagtcttcaacgtggcgtgagcgacttcgaccacgtcaccggtgactggcacaccaaccgggaccttgcccagccagtcggcctgaccgttgttggagcgcagctgggccatcgagttgacgccgatgaagctgtaacggctccacgtgccgccgtattccgccgattcgaggatgaaggtgccggatcggccgccggcgagacgctcgtagaagccgaccggggtgagcgagtcggcgagcagacggcgcacgatcggaatcacacgatagccggcgtcggccagttcgtggaactggccgcgactgggccaggtggcgccccacttcaggtgtttgacgctgcattcgctcatattcgctcctttacttacaactcgatgtcttgtttcgtagtacgcggtcgttcggcttcccccagtcagggaagcccgttctactgctcggccgggcgatggccttcgaccacggacagggggccgccttcgaggaagcagctgcgcttgccggtgtggcaggcggcaccgacttggtctacttcgacgagcagtgcgtctccgtcgcaatccagggacacgcccttgacgtattgcacatggccggaggtatcacccttgcgccagtattcctgacgggaccgggaccagaaggtcacgcggccggtggtcagcgtgcggcgtaatgcctcgtcgttcatgtagccgaccatcagcacctcgtgtgtgtcgtactgctggatgacggcagcgaccaggcccttggcgtcacgcttcaggcgtgcggcaatacggggatcgagttcagtggaattgtcgtatgtagtgtctgtcatacctatcttccttatgtggaccaccctcagtcagcttcgctgacagctcccggattatgtgcgacatgtgcatagcgcactgctacgaacaatccactggattgttcgtccagcgggagcaaggtgtattcgtttagcgaacggtgtagccgtgcttcttgagttccgccttgacatcggcgatggtcaggatgccgtaatggaatacggatgcggccagcaccgcgtcggcacctgcttcgatggcgggcgggaagtcctcgaccttgccggcaccgccggaggcgatgatcggaatcttgacttccttgcgcacggcgcgaatcatctcgagatcaaagccttccttggtaccgtcggcgtccatcgagttaagcagaatctcgccggcgccaagctgctcggcgcgcttgacccaccagatggcatcaatgccggtggatttgcggccgcccatcgtggtgacctcgaagccggattgcgtgtgttgctcgcccttttcgcggcgggcgtccacggagagcaccagcacctggttgccgaaacggtcggccacgcggctgataagcgacgggtcattgatggccgccgtgttgacaccgaccttgtctgcaccgcagcgcagcagcgagtcgacgtcctcgggcgtgcgtacgccgccgcccacagtcatcggaatgaacacctgttcggcggtgcgggagaccacgtcaatcatcgtgttgcggtgggagctggatgcggtcacatccaggaaggtgatctcgtcggcgccctgacgatagtattcggccgccagctccaccgggtcgcccgcatccttgaggttttcgaaatgcacacccttcaccacgcgaccggcgtcaacgtccaggcacgggatgactcgtaccgccaacgacatgcttcactcccctgttcggctttgcattacagtccttcagactacctaccgcccgttacatgcgccgcacccgtttctggaatatgagaatccgagctgacgcgcccgctgcgcgatctcaaggccgccgcgccctgccgttatatcgccgccgatatcgagaacgcgggcggccattacgtcgacgagcagctgcacgtggacgacgccaacggtttcaagctcatcacgtcccgcaagcccgctgatttggactacttcgtggacgcaatcaaggatgcgctgaagtaactaccgctccttagcggccaactgcccgcaggcaccgtcaatgtcctggccgcgggtgtcacgcagtgtggcggtgatgcccgcgcggtgcaggatctccaggaaccgctgttcgtctcccggcttggaggcggtccacttcgagccctcgatggggttgagcggaatcgggttgacgtgggcccagttgtcgccgtaatggttaagcctcttggccagcaactgcgcatgctcggcctggtcgttgatgccgcgcatcagcgcgtattcgatactgacgcggcgcttggaggccagccaataatcgtgcgcggcatccaacacctgcgtggtgttgaaacgcttgttcatcggcaccagctcgtcacgcagttcgtcgctgggggcatgcagggaaacggccagacgcacgggaatgccttcggcagtgagcttcttgatgccgggcaccacgcccaccgtggatacggtgatgttgcgcgcggaaatgccgaagccttcgggaggcatggcggaaatctgtcgtacggcggacagcacggagttgtagttgcccatcggctcgcccatgcccatgaacacgatgttgctcaggcggccctctcccccggccacttcgccgtcacgcatcattttggcggccacacgcacctgttcgattatttcaccggtggacatgttacgggtcaggccaagcttgccggtggcgcagaacgggcagcccatgccgcagccgacctgcgaggaaatgcacagcgtggtgcgggtcgggtatcgcataagcaccgattcgatgagggagccgtcgaacagcttccacaaggtcttgatggtggtgccttcgtccgccacttggcgggtcacctcggtgatgagctgcgggaagaacgcggcggcggcctcgctgcgcttggctgccggaaaatcagtgaattcggcggcattcacatcgaaatggccaaagtaatggttggcgagctgcttgactcggaacttcggcaatccgagttcggccgctttctcgatgcgctgctcgggcgtcatatccacaaagtgcagcggcggcttaccacggcgggcatggtccttggatagcacgtcacggaaggcacctgatgtgccgccgggagtaatgccggtttccggagtgtcaggatgctgtgtggtcatgatgggttcgcttcgctctcaatatcagaaaatagtcaaacatgcaatagaaatatcagaatccaccatacggcgtgccgcatacgaatcagatggcccatgtcttagcccatggcgaacgcatattgaacgatgattgcccccatatatgacatgtggcaccgtgcgatatacacacgatgccacattgttcatgcacgaggcatgcgaatcacagtccggtgacccacagcaaggcgcaggtgaacggtgcactcatcaaaatggaatccacacgatccatcacaccgccgtgtcccttgagcagatggcccatgtctttgatgccgatatcgcgcttgagcatggaagcacacaaatcaccgaacgtgcccacggcgccgatgagaatacccgccacgatcggcacccaccaacgagtggcccatttcgaggcatcatacgtgcatgcgaatacggcgaatgcgccagccatggcgaagagcatcgagccgatcaggccctcaacggacttcttcggcgagatacgcgggctgagcttgtgcttgccgagccaggcaccggcaaacaaaccacccgtatcggagagggcgggcaggaacaccagcatgatggcgtgtgcaatcggatgcccattgaaagtcagcgagatgatgatgcagctggccagcaacggaatgtacaacacggtaagcacggacacagccacatggctgagccgggaatgatgctgttccccgccctcatgattgaacgaggattcgaggcgcgcgctggcatccgtgttggacagtttgccggcaaccgccagagataggcggttgccgacgctgatttttgcgctggccgcgatggcgaccagaataatcgacacgatgatactcagcgacatcgtgatgagatggtacggggaataataggtggcgatgagggtgaaggacgcgcacagccacagcatgaacaccgggatgtgcaggcctacggtggcgaagtccaccctgagctcccacagcgccagaatcatgaacacgactaccagcagcacgaagaggtcgacgctgagcagcaggcacgcgacaataaggatgaccagtgccgcgcctgtggcgatggcctgcggcatgttgcggccggtcttcttgttgatccggtcgagcgtctcctcggcctcttcatggagttgttcgttgcgttccataattctccggacctggtctgaatcagacctccatgatctccttctgcttggtctccagcagagtatcgatctcgtcggtaacggacttggtgaccttgtcaagatccttcagcaggcgatcgccttcgtcctcacccatctcgccgtccttgacggccttgtcgatggtttccttggtcttacggcgaatgttgcgcacggcgaccttgccgtcctcggccttgcccttggcgagcttgacatactccttacgacggtcctcggtgagttccggcatggtcaggcggatgacgttgccatcacggttcgggctgatgccgaggtcggagttacgcagggccttttcgacggcaccggcctgggaagcgtcaaacggggtgacggacagggtgcgcggttcgggaacgccgatggaggcgacggccttaatcggggtgggggcaccatagtagtccacggtgatgccgttgagcagggccgggtttgcgcgaccggtgcggatgccggagaagttttccttggtgttttccacggtcctggccatctgttccttggcctggtcgataagagacatattcactccttgtgtgttggtgttcgtctgtgttgttcgtctatgaacgtttgattcgattgtaggcgtttgcggcttactcggccacgcgcgattcggcggtggagaccagcgtaccgatttcatcgccgacgagggcgcgggtcacgttgcccggctcttcgaggccgaagacgcggatgcgcttcttgttgtcgcgggccatggacagtgcggaggcgtccatgactgccagattgtccacgagggcgcgattgtagctcagggtttcaaaacgcttggcgttctcgtccctgcgcgggtcggcggtgtagacgccgtcgacgccgttcttacccataagcacttcgtcgcagtggatttcgagggaacgctggatggaaaccgtgtcggtggagaagtacggcatgccggcaccggcgccgaaaatcaccacgcgacccttttcaaggtgacggatggccttgagcggaatatacggctcggcgacctgtcccatggtgatggcggtctgcacgcgggtggcctgaccctcctgctccaggaagtcctgcagggcgaggcagttcatcaccgtgccgagcatacccatgtagtcgccgcgggaacgatcaataccggcctgctgcagttcggcaccgcggaagaagttgccgccgccgaccacgatggccacctgcacaccctgttgtacggccggaacgatttcctcggcaatacgacgaatcacatgggtatcgatgccgaccttgccaccaccgaatgcttcgccggacaacttgagcagaactctgcgcggcttgtcgctatcagtcatatcatgcctttctcaaaaccgaaagtgcgaaattatccgtagacaagcgtatcggtttacgacgacaccccctagcaacgacacccttggaatagcgaaacgccatccgattattgaataaccggatggcgtttcgttgaaattacgctaagcgcgtggagtaagccttaggctcactcctcttcgcccttgccgacctcgacacgagcgaatgcggtggcgttgccaccgacttccttgaacaggtcgccgacggtcttggacgggtccttgacgaacggctgctcgagcagcacgacttccttgaagaaagcgttgagacggccttcgacgatcttcggaacgatcttctccggcttgccctcggccagggacttctcggtggccacgcgacgctcggactcgaccacatcggccggaacgtcctcgcgggtcagccacttagcgcccatggcggagatctgcagagcagcttcgtgagccacggcggcgccggccttgtcggtggcgatcatggcgacgatgctcggcggcatctcggcggacttcttgtgagcgtagacttcgacgtgctcgccggagatcttggcgaactggccgaccttgacgtgctcaccgaacagggcggcggcctcctcgacagccagcttgacggtggtgtcgccagccttggcctcgagcagctcgtcagcggagttggcgtcggcgtccacggcgtagccgagaacttcctcggtgaactcgacgaacttcggggtcttggccacgaagtcggtctcggagttcagctcgacggcgtagccggtctcgccattggcggtctcgacgaccttggaggcgatggtgccttcctgagccttgcggccttcacgcttgccggctgcggcgatacccttggctcggatgatttccttggcgcgggcgacgtcgccttcggcttcggtcagagccttcttgacgtcgagcatgccggcgccggtgtcttcacgaacctgcttgatcagtgcggcggtaattgctgccattgattattctccttgagaaattttgcttacccatgaacgatgggaagcgcttattcaggcacttcccatcgtagagcatcactcggccttgggggcctcggcggtttcgccctcggcggcagccggagcggcggcttcagcggaagcctcggcaggagcctcgttggtcaggagttccttctcccaagcggccatcggctgctcggcggcttcgccctcggccttgttggcgccggagcgctccagcagaccttcggcgacggcgtcagccatcaggctggtcagcagttcgatgccgcggatggcgtcatcgttggccgggatcgggtactcaacggtgtccgggtcggcgttggtgtcgacgatggcgacaaccgggatacccagcttgtgagcttcctcaacagccagggcctccttggtgatgtcgacgacgaacatcgcggacggggtgcggttcatgttgcggataccgcccagctgcctgttgagcttgtccttctcgcgctcgagcaggaggagctccttcttggtcaggccggagccgtgcacgtcggtgaagtccatttcctcaagttccttgaggcggttgacgcgcttggagacggtctggaagttggtcagcatgccgccgagccaacgctcggagacgtaaggcatgttcacgcgggtggcctggttggcgatagcttcctgagcctgcttcttggtgccgacgaagagcacggtgccgttgtgggccacggtggtcttgatgaagtcgtacgccttgtcgatcatgtcgagcgacttgaacaggttgatgatgtggatgccgttgcgctgggtgaggatgaactgcttcatcttcgggttccaacgacgggtctggtggccgaagtgcaggccagccttcagcatatcgctcatagtgatctgagccatggtattactacctttcattgtcggttcttgcctggccatgcgcacctgcgtgcagctgctcccccggtttcacgagttgtgcagccgaccgacacaggccgtcgcgagcatgacgcgaatttgttgtgtgccggttgacaatattgggtggttccggacgccagcgactgcgtccgttgccgggtggcacacaagtttcgagaatagcacggagccagtactaagaagacaggttcccctccttgaggggaacctgtcgccataggcgactgaggggagttacgggcggtaccggcagaaccaccctcagtctcactacgttcgacggctcccgccagcgggagccgagtatggactacttcgcctgacgattgcgcatgtagcgcagggcttcgcggcgttcttccttttccaggcgatccaaatacacgtggccgtcgagatggtcgcattcgtgctgaagcatacggcccatcagcccggagccctcgagcacgacctcgttgccgtccaggtcgatgccacgcacgcgagcgtagtcggcccgacgggtcttgtaccacaagccgggcacggacagacaaccttcatcgccatactgctcgccggacttctcctcgagtacggggttcagaacgtagccgaccttgccgtcgatgttgtaggagaaggccctcaggctcacgccgatctggttggcggacaggcccgctcggcccggatcgtccacggtttccagcaggtcgtcaaccaggcggcgcacggccggggtgatttccttgatctcatcgcagggggtgcgcaggactgggtcgggcacgaccctgatctcacggatggccacttctcgttactcctcgttcttctcgtcagccggccggtccggcttgctgccggtgtcagcggcattgtcggcattgtcggcggaatcgccggtctcgccctcttcgggttcggccttcgacttcttgatcttctccgacacgctagcaatcgaatcagacacgctggttttcatctgttccgaggcctgtttgacctgttcggacgcctgcttgaccgattcggaggatttcttgacggtctccagcgtgctgtcgatgatcttggctgtggcaggcagcggtttgttggatggcttgggcgcatacagatcctcttcgatgacggtggcgtagcgctgcaataccttgggacgcaccactttcatgctcggggtgagcgtgccgtgctcctgactgaattcctcatccagcaccgcgaatttgcgcacggactcagcgcgggagacattggcgttggcctggtcgatgtactgctggataaaggcacgcaccgcgtcgttgtcgctggcctcggcgagtgtcatgtcggcattgaggccctgaccttccagccaggaatgcagcatttcagggtcgagctcgataagtgcggacacgaacggcttgccgtcgccgactactactgcatgagccacgatcgggcaggtgtcgatgacatcctccatcggggcggggctgatgttcttgccgccggcggtgatgatgatgtccttcttgcgtccggtaatgaaggtgaagccgcggtcgtcgatacgacccagatcgccggttttgatccagccgtcggcagtcatcgtctgtgcggtgagttcgggctgcttgtagtagccaaggaacacgttcgggccggtcagctcaatttcatcgtcttcgccaagacgcacgcccatgccaggcccaggcttgccgaccgaaccgacctcgttgtcgtcctcccaattgacgagcatcggagcggcggtttcggtcatgccataaccctggatgaaggtgatgtcatccatgccgttgaagaagtgggccaaatccacgttgagcggcgcaccaccgcaggccagccatttgaggttcggtccgagagcggaacgaatggatttgcccaccgtggccatgtagaacgaatggcgcatgcgctcgatgaacgaatggccgcggccggcctgctcatccttgctccacttgacgaagtgcttgaacgactgggcgaagatatgcccctggatgccggcaccagccttctgcgaggccgcgttatacaccttctcgaacacacgtggcacgcccagcaggtaggtgggcttgaagctgcggatatcggcgagcagtcgcttggcgtcgggaatgtatccgaccacgccgcagccaccgatgcacacatactggatgtagcgggcgaagcagtgcgccagtggcaggaacagcagcagacggttgtcgtcgtacagcatgccacgcagaatctcgtagccgttaagcacgatgtgcgtgtaattgcggttggagagcatcgcgcccttgggcttgccggtggaaccggaggtgtagaccacggtaagcagatcatcggctttgatacgagcgatagccgcatccaacgtctcatcggatacgccatgcccgaagtcagcgacagcgtcaaggccatcggccttgaaattgaacacgtatttcatgcccggatgattgacacggatctgctcaagcgtctgtgcgcgctggaagtcgccggcaaaggcgatggcgggatcgacttcctcgacgatgcccgcggtctgacgggcggaatcggtctcatagacgggcacaaccacagcgccgattgccgcgcaagcgaaatcagccacaccccactcatagcaggtaggcgagtaaatcagcaccatggtgccggctttgacgccaagtcccaacaggcccttggccacctcgcgtacgcgggacagcatttcagtagctgtggcgccgcgccattggtgggtgttgtcatcctgccattccgcgatgatgtcatccggcgtgcgagctgctcgtttggccagcagcgagtagacggtgtcgtcatcggtggtgacatatctgggttcttctacatgttcacgcatggtcactactataggcgaaccagcctatgacacggcagaaccgtcttccgctgccagcgtaggaatcggtgtgcgggcggggccgtctggtcagcccagatcggcatagatgcacatccatcgagaaccgatgaacttcagtttgaggttgactcgcagattttcctggccgatggtcatgaataccgccatttccagcgtgtccttgccggtgatcatgccgtcgatcaatgtggggacagtgggcagatagcagaatttcgctttgagctccggatgagtgaccatgtgggtgccgagcaggtattgcatggtttgcagccgttccaggcatggttttgtcatggctctgttgagatgtgcgacgctgagtctgccacgtatcgcgtccgccgatgtgcaggcgatgcggcatgcagccatggccatggaatgacattccttcgcattcagcccgcctatgaatgtgggttggatatgataccgcaccgggcgatccgacagctccacaacgatgaatccgtcataactcggcaacggcccgtactgatatgtgccgtggaaaaatcccgaatactccatgatgaccccttcaagcccccttgcaactcaccatcatcggcgagcgtttgtactacaacatcacgaaaggcgcgccaagtcaaacgacttgagcgcgccttagggcaagctaagcctcctgcatggagggcaaacccccattttcagggggggtaatcgggattatcgtgcggaatacgggttgaccaccatgccgcaacgctggaagttcttcacgtcgacgtagccggtggaggccatcgcgcgcttgagggcgccgatgaagttggtcttgccgtccgcctggtggctcggtccgaacagcacctgttcgagcgggccgaccgtgccgaccgtggtgcggtagccgcgcggcagcgtctggtggcgggcttcggaaccccagtgggtgcccttgccgggggcctcggtggcgcgggccagcggcgcgccgagcatgaccgcgtcggcgccgagggccagggccttgacgaagctgccggagtcgcccatgccgccgtcggcgatgacctgcacgtagcggccgccggattcgtccatgtagtcgcggcgggcctcggccacgtcggcgatggcggtggccatcggggcctgcacgccgatggtctggcgggtggcggagaccgcgccgccgccgaagccgacgagcacgccggccgcgccggtgcgcatcaggtgcagggcggcggtgtagttggatgcgccgccgacgatgacgggcacgtcaaggtcgtagatgaacttcttgaggttcagcggttcctggccagaggagacgtgctcggcggagaccacagtgccgcggatcacgaacaggtccacgcccgcgtccaccacggtggagtagaactgctgggtgcgctgcggggagagcgcgccggccacggtgacaccggcggcgcgaatctcgcgcagacgctgcgcgatgagctccggcttgaccggctcggcatagatctgctggatacgctcggtggcctgatcggccggcagcccggcgatttcgtccaacagcggggtcgggtcctcgtaacgggtccacagaccttccaaatcgagcacgccgagcgcgcccatcttgcccatggcgatggcggtggccgggctggtcaccgaatccatgggggcgccgatcaccggcacatcgaactcataggcgtcgatctgccaagaggtggagacgtcctcggggtcgcgggtgcgacgggaggggacgatcgccacatcgtcgagtgcgtagccgagacggccctttttgcccaaaccgatttcaatttcctgagacatggttgtaagcctattgcccgggtgggacgccaacaaggtcgtttcccacggaccggacgattgcttcaagtcgttacaaacatgcgctatgactaaatcatcttcacaccatctatcaggaggaagcatggccaaaatcaaggtcgaaggcactgtcgtcgaactcgacggcgacgagatgacccgcgtgatctggaaggacatcaaggatcgcctgatcctgccgtacctcgacgtgaacctcgactactacgatctgggcatcgagcaccgcgacgagaccgatgaccaggtgaccatcgacgccgcccacgccatccagaagcaccatgtcggcgtcaagtgcgccaccatcacccccgatgaggcccgagtcaaggaattcggtctcaagaagatgtggaagtcccccaacggcaccattcgcaacatcctgggcggcacgatcttccgcgagcctatcgtgatgagcaacgtgcctcgtctggtgcccggctggaccaagccgatcgtcgtggcccgtcacgcattcggcgaccagtacaaggccaccgatttcaaggttccgggcgccggccagctgaccgtcaccttcactccggacgatggctccgagccgattcagcacgtggtctacaactacggcgaagacggcggcgtggcccaggtgcagtacaacgtcaacgattcgatccgcggtttcgctcgtgcctgcttcaactacggcctgatgcgtcattacccggtgtacctgtccaccaagaacacgattttgaaggcctacgacggccaattcaaggacatcttcgctgaggtgttcgagaccgaatacaaggacaagtacgccgaggccggcctgacttacgagcaccgcctgatcgacgacatggtggccagctccctgaagtggcacggcggttacatctgggcctgcaagaactacgatggcgatgtgcagtccgactccgtggcccagggcttcggttcgctgggcctcatgacctccgtgctcatgaccccggacggccagaccgtcgaggccgaagcggcgcacggcaccgtgacccgtcactaccgccgctggaagaagggcgagaagacctccaccaacccgatcgcctccatcttcgcgtggaccggcggcctcaagcaccgcgccgatctggacggcacgcccgaagtccgtcacttcgccgagacgctggaaaaggtcatcgtcgacaccgttgaaggtggtcagatgaccaaggatctggccatgctcatcggcccggacgaaccgtggctcgacaccgacggcttcatgaacgcgctggacgagaacctggccaaggctctggccgagtaaatcatcgaacacatcgtgcggacctacatgggtcatgtcatgtcgccaactgtcatgattgtcgtgcttcatctggaatgttcctcagcacgacaatcatgacagttgttcgatacacgcgcgaaatacccctaattgttcccggatatgtggcgatttgtccactggtccgggactttttcgtatacggcctactagaatcgtgattcagtttgttttcacgcccgcttgaggaggtttcgccgcttatggtgttcgcacgccgctcaaccaccctgctcgccgccattgtcgcatcctgcgcgatggtgctgtcactgaccgcgtgcacctcagacaataagaccgttgtagatggtcaaaccacggtgacgtccaattctgccggcggcgtggccgtgttcacgccttcggacggcattacgctgaatcagcagacgccactgaacaaatgggcgaagctggtgcccgacctaaccaaggccctggtcgacgccggtttcaagaaaggcgatatcgatcatacgacgtccgactcgttggacaagcaaagccgcgccatccaagactttgtggtcgatcatctttcgaataacaccacggacgattccggcattgccatcgcgcccgacaacatgacattgctcgtggctccagtagtcgaggccgacgcttccactcgccaatacggcgattacgtcagccagaacctgagcaccaacgatgccacggatgagggagctacttctgacggtgattcttccgaagacagctcttccaaagatgactcgtccaacactgagagcgacggcactgcatcggacgagcaggcgcaggccgtggaccggctggtctcatcgctcaagctggccaaggaatccggcatgcatgtggtattgctcggcaacagcatcgaggggtataggccggacgccttcgtcaagttctcggacgcccagaccatcggcaagctacaggcggaaaagatggtgtccaaactcaagttggataaggccagtaaagacaaccccaaatacattgaggtgctgctgccatacaccgccgtggacgaaaaaggcaacgccaacgattccacgttcgcccaagaggcgttccgtggtatctggcaggtactgggctcctactatcagaagggcgttgtggaaagcccttcaggcaccttggacggcaaatccacggaaaacgattggcaagccgtggcctacgatgccgccaaggaaggctccactgcgaaagtgcttgacaagcgtctggcaaaaaccgacgggcagtccacactcacccgtattgacggtatcatcacgatgaacgactatatcgcctccgaggtcgtcaaggaattggacgatctgagatacaccggctctgccgccgatatcaatccgcagatcaccatctcgggcattgtcggcaatatcaccggcaagagggatctcagccgcgacgcagtgccggacccgatcaaatcccctgaaaacgacaacgcaaacgactcatccagttccgatgacgatgcggataaggacacctccgcttccgacaaggaccgtgactcgcaatggcctctggtgaccggatacggcgcgtacgtctcgaacatcccatccatcgtcaatggcaagcaatggatgaccggcatggaagacagacagaccatcgccacggatatcgctcaggcctgcgccaagctcaacaagaacgaagcgctgaattccatgccttcaatcaggaactccgaggtaggcggcgtgaagaagatcccgaccatcaacgaaccgttgctggctgtcagcgccagcaatctcaagtccgcgctgatcgcccccggatatatctccttggccgatgccggtctgtgattcatactcgtcacgccgctagccgcctgcgatgcctcttccgtacggccctgttccggccgacaaacattgctgaatcatgacggcttcagtacgatttttcgactccccgcatattgctgtgggtcaagatagtcggccgttcctcgcttgaggccccaatgcaggcaacggtcttcgcaatggtccgagttgccctcaacgatgcctacgggctgtctgcgggagatcgtatcccccaccgagagctcggtaacagccggttcgaatgtcgacgtgacacctccacgatgccgtacactcaccgcatctttgccagctactttgccagcaaaactcacggtccctgcctgtggtgacagaatcacggtaccttgctccgcagcaagatccacgccacgatgacctggtgcccacgggttgatcggccgctcgaactgttgttcgacctgtggatcgtcgaccggccagtcgaaccgggattcgcactgattgccattgcgccacgccagatcagacatatcggtgaaatcctccaccgtgtatgccgcatctccggtcaccgcagtatccgcatgcgcaacatgctgaggcgtggatgccagtcccactcccaaggcaagcagcaggccgataacggtggccaacgcgattatggcatccatacgccgttgccgttcctgagcccgctgacgcgcctgctgacgccgcctgctggcacgtcgggcttcgtcgcgacgccaatcaaacaacagtggtgcattcatgagattcctccccatagtgtgagtgtgatgcgattccggcttctttgccggtgatacccaccttgaggggtccgaaacaggatgtccagccagaacgacctatgtggttccagcttccgaagttatccacaatgaaatttcgcgtgacagtatcgccgcatcgtcatcatgttgtatgagtgggtattcgatgagtctgattctgcggaattcagcgcgacatgccatacacgcacgtaatttgctttttcgtggcaagcatgtaagatgtgtgacttgtgcgcgagagaaatctcaaacacagcagacattcctgcgtagctcagttggcagagcatccgactgttaatcggacggtcactggttcaagcccagtcgcaggagctcacctgaatgggtaactccggacgggatgaaaattgaatattcctgcgtagctcagttggcagagcatccgactgttaatcggacggtcactggttcaagcccagtcgcaggagccatcgaaagcctcggctctccgaggcttttttattttcatcgcattggtgaccagacacgacaccccatcatcaaccgggaaatccatggcgaagacctcaccactactcacatcaggcagacaggtcactgtcaattcaccgatgagaggcacggtattcccagtatcagtttgggaataccgtgcaaatcttacatcgagaccttggtcaggggcatggcggagtcgatcgggaagtcgggggcgctgggggccacgccggcttcgaccaggttcacgccgagcatggcgaccatggcaccgttgtcggtgcagagcttgatttgcgggatacggacgtcgacgccgtagttctcgccgaattcgagcagtttggcgcgcagctgcgagttggcggagaagccgccgcccacgatcagcgtgttggaatcgtactgccggcagccgcgcatggccttacgggctagcacggtggccacggagtcggccagggatgcgcacacgtcgtccaccggaatctcatggccggcggcctgctcgctttccacccaacgggccacggcggtcttgacaccggagaaactgaaatcatacgggtgcgcggcaccggccttgccttgggtcagacccatcggcaccttgatggcgtgcgggtcgccgttgcgtccatggcggtcgatgtgcgggccgcccggatacgggaagccgagcagacgggcgactttgtcgaagcactcccccgccgcgtcatccagcgtggtgcccaccacatcgatcttgcgcggcatgtcctccacatgcagcagcgaggtgtggccgccggagacaatcagagccagcgtgtccttggggaacgggccgaactgcagctgagtgacggcgatgtgcccgatcacatggttgatgccgtaaatcggcttgttcgcagcccaggccagcgccttggcgccggacacgcccacggccaggcaaccggccagtccaggaccggcggacacggcgatggcgtccacgtccgccaacgtcatgttcgcgtcggcgagcgccttggacacgcatggcacgaaggcctcagcgtgcgcacgggaggcgatttcggggatcacgccgccgtatcgcgcgtgttcctccatggatgaggccacgacgttggagagcagttcgcggccgcgtacgatggcagccgcggtttcgtcgcaggtggattcaatgcccagtacaaccggttcgctcatcgtgcttctccgttcttctccgtttgcttgccagtgatgtcttcagtgtccgccgatgccgtctgcggggcggcaaagcccacgaccctaggtttcaggtccaagctcatggtgtatgcgtcgatgccttcaggctggtagtagcgtttgcgcaatccaatgcgttcgaatccgaaccggtgatacagggccagcgcagggtcgttatccacacgcacttcgagcagcatgcgcgaggcgccctgacgcttcgcctcgtcgaccagtgcctgaagcaacgcagcggcgatgccttgccgctggtatgccttgcccacgccgatggtcatgagctcggcgtcctcgccgtcataccagaagccggcgtagccgcggacaaccgcctgttccacctctcccagcacatccagcagatacgtgcgggccggtgcgtccagttcctctcgcaccatgttcgcattccatgcgccgaggccgaacagttcgccttccaactgtgcgatggagcaaaccgcaagatcacgacttacggcagtgatgtcaacaatcatcgaatcaacccgtctcacgccttatcggcaccggcatggccgagcacgtgcttcagcgggttcggcacttcggcgtccggccggcgcaggtacaacggttcgaccggcgtatcgtgattacggttggcaaccagttccgcatcagtggcaaagatagcgagaccttgctccccttggtccaatacggattcatcggtgatgtcgccaagctgctcgattgtacccagcgcatccgcatatttgcgggccccatgacccacaacatccacgaccacatccacattgctgtcttctggcctaagtccgtcgcggtacgtatgaacggcatcattcacgcgctgcgcgatggatgcagggtaatcgatatccatgtcaatcagagccgtcgccacggtttcgccatcgggatcgccaacgagcgggtccgagtacaacgcaaaatagagttgtttgcggcgtgcgtcgtttacggcaagagtgagcacatggcatttatgagtatcaccgagagtgccggctttgccacggcgaatgagattccattgcacctgagactcaagaacattatggccgataagcgtcgctcccgttgcgaaagccagtgccttggccgtaacgataccggcacgcagaccagtaaagggggctggaccggtacccacaatgactgttgcaatgtcagatgctgggaacccggcctcctcgaccgcgcgcgcgatattgacctgcaggttctccacatgggtgcgcgaatcggtctctacaatgggatcgcgccccacaatgccgaccgtcgagccgaatgaggtgtcaatcaccaacgtgcaacccatgaatcctcctagtcgtaaagcctctagagagtgtacatcgaggagtctataggcgcatggcttactgcagatcgaacgcggcccatcgcttgccgactgggacgaatgcgacggtacgagtgccgttgctggtgagttcgccgtctgatccagcggatgcggcatcggaggaatcgagaggtcgatcgatatggatttcaagtcgttctggcgccaaggcggtggccatttgttcgccccactccataagcaccaccgtgttctcgccggggtcttcaagttcttcgtccaatcccagcgattccagctcgtccaacaaacgcccgatggcgtcctgccccggtgcataggctgagccgcccagacggtaggcatccacatgcaccagatgagacggagtgccgtcggcgaaatgcccgtcgagttcgcgggcaatggtgaatgtaggagacacgatgggttcggtaatgcccagccccgccccgaagccctgggcgaatgtggttttgccggcaccaagagggcctgagagcagcaatacatcgccgccgtgtaccattccggccacacgacggccgagctcctgcatggcctcgctggtgggagccgcaatagtgtgttcgctcataaatacccctttatcgacttttaccgacctttttatgactgatgtcttcaatgcagcgttccagcgcatataccgggtcgccaccgtttgttttgctttgctcatccgcccaggcgagcatacggatgcaatgcgcgagtcctgccgaagtccagccgccaagttggcgcatcgcattcttcagcacccacggattggttttcgcttcggcctgggaaatcgtgccggcccgtaccgccgaggctttggcaatggtacggagcttcatggccaatgcgccgatcagcgcgatgggatcggtcccttgttccacagctgcacgcatcatgacgatggcttctgcggttttgccttccacggccttgtctgccacggcaaaaccggtgacctgcggattggcggtcaaatactggttgacacggtcgaggcccatcggattatcgtcaaagtcgaaacacagttgctcgcacatggcggcgagttcgccggttttgccgccgagtacggataccagctgctgtgcggccatcggttcgactctacgaccacgtttctcgaattctccgagcacgaaattgagctgtgcatccggtttcttcaaatccggcacgtcctctttgcgagcgccggctttcaccagttggtcgatgattttgcgccctttgacgccgccctcgtgctggcagatcaccacgctggagccgttcggatccttggcggcctgcttggtgtacgccaccagagcttcggcgagcttgtcgtcggcattctgcaggttgacgagtttgaccacggcaacgtcggaaagcaacgatgggctgacggcttcatcgaaggcatactggtcggccgatgtggcgtcgagttcgatgaggtcggcgtcgggccgcgccttcaacgcctgcgcgcacagtgccttggtgcgcgcgtcgttcaaatacgagtcgcctccgggcaccacggttaccggtgcattcgctgctgttttcgccatgccaccatctcgccacacaggttggacaatgacctgccggcatcacgattttgccgctgccgtcaagatagtggtattcggctgggattgcgatggttgctgcaccgaataccgcattggctattcggcttgccgccgcgtaaagaggcgtctcgtctcctcacaccagagactgaggcggacgcgccaagcggaaccgaagcgcacgccagacattccggcctcataacgacggacatgctggaggcaacggctgacgaacaccagtagcatgccgataccgatttccgccgccacaatcagcacggcacccgtaacgccgtctttccatgggatgacggccatcgtgctgccgcccagccacaacgccacccgttccatcaccagcgtgccccatgacgatatccacgcgaatacgccggccagccatggcgtgcaccatgcgcaggccagtgccatcaatcccgccatcgtggccaatcccacgaacggtgacaccagcaggttcgccggcacggacagcaacggcaattccggttccatcaacacctgaatcggcagggtgaacaattgcgcggccacggtcatcgccatcatttcggcgatgctgtgcggcatcgctcgctcaaaggcaccggccagccgccccgcaaacagcacgatacccagtacggcggccgaagacaaggcgaatccgtagctggccgacatatccgggttcaccgccaatacaccgattatcgtccagcatagggcgctcaacgcttgcgtacgccgtcccatcgcatacgccaacgcacctatcaatcccatgatgaacgcgcgggtgaccgaatcactggggaacatcgccaatgccagcagcgcatatactccagagaccagcaacgccgtcagccgccgatcaagcagcatccacatgcataaccgacgcaccagtcctgccaccagcacgaagtgaccgccggatacggccatgaggtgcatgatgccggaccggcggaactgattttccaacgtttgcgcatacgtgctgttgaccggcatcggaccggcatcgccgccgatataatcctggccaagcacacccatcgtcaatcccggcaccaacacacgcccctgatcggacaattgtccggtcacggtgaaaaacgcctcctgcacctgcgcaatcgcggcgagatgccacggcggagcccgcacctgcgctaccggctgttttccttccaagagcagccatagcggtatgcgtccatatcgcgcttgctgcaatacgcccgtcaacagatagaccgcgcctcgacgcaactgcccacaatacgattcatcggcgtatacgcgcacggcgaccgtggaacgtacgtccgcgccatccacagtgatgccgctcagccgtatgtccgtctgacaatcgtatgtgcgttggtccgaagcgatcacgggcgtcgtcaccgtggccatgacttcgtggtatgaactggattggcgagcttgtgcggaggcaggatcatgccaggcaatggtgtccgacgcgattgacgccatactgccgatgcacgccaccgcaacgcatacggtcaatgttcccgtccacctgatccgcaggcggaaagacaccacgatcatcgccgccacggcagcacatgacgccactgttataggtaatattcgtgtgacaggccattccatgccgattatggtggcgtcaatgccagctccggcatcggcctttgcctgaccggtgccgagtccatcagacatcctccatgcgaataatgcgtgcgctcccagactcgccgcccacatcactatggcgatcggcagcatcctccaatcgcggctcccctgctcgcgcagtatccgatccctgctcatccgaccgtcacctgccctcgcatggtctccaacgtcttggagccgatgcctttgacatccagcagctgatcgactgatgcatacccgccaatcgccgtgcgatgatcaatgatccgttgagcggtaaccggcccaatacctttgatggattgcaattcctcagcggtggccgtgttgaggttgatgagaccatgcgtggaagcgccggcatcgctgccgtccgtctgcatgtgcggagattgcgtggtatccgattcggggttcgctgtggcatcggaatgctccgactgctgcggatccgtgcgtttctcgtccgtggtgttctgcgatggcatcgtctgatctccagcggagccgcccgtggtctgcatggcggtcggttgagacagcatggccatattcatcgactgctggaccagcaatgccaagctgatgccaagggcgacgatcagcagcaatatcacggccaaggcatgcccaatggtgaacgacaatcgcggctgatcccgggtgagtctggctgattcgccgacggcatcggcggaacgtacgccaatcagatccgataacgcacgtttgtcacgggtcgcctgccgcaggccgctctgcgccctttggggcgggtggccggccggacgaatccgtgcatggccgggaggcggcggaggcgtcgtgggccgttccactcgcggttggggcatggcttcgctctgcctgctgaatgcgcgcaaacggttggcggcatggtctgcgcgatggttatgagaaacgcccatgcatccacgctgatggattcatgggcgtttgtccagctgaaacggggtatgtggttctagcttatgaagttatccacaattgaggtggggcggttgacgctcccctcagtctcgccacgcgagcggctcccctcaaagaggggagcctaacccgcaacaagtcactccgcggggacgatggagacgatcttcggggccttgacgatcaccttgcgcggctctttgccgccaagacggtcggcgacggcggccagcgcctgccgttcgaggtcggccggatcgatgtcgaccggcacttcgagcttggcgcgcaccttacccttgatctgcaccacggcggtcacggtgtcgtggcccacgtaacgctcgtcggccaccggccacggctcggcggacagggactcggggtgacccagcttgctccacatctcctcgcagatgtgcggggcgatcggcgcgagcatcaggatcagcggctccacggcggcacgcggcacggccttcagaccggtcaggtggttgttgagcacgatgagcttggcgatggcggtgttcgggcgcatgccttccatttccgcggtcacttcggcaatcgtgttgttgagcagcttcagggtcttttcgtccggcgtgtcctcggtcacatgggcctggccggtggtctcatcgaccacattgcgccacagacgctgcaggaagcgcatgccaccgaccacgttgcgggtgttccacgggcgggattcgtccagcggacccatgctcatctcgtacaggcggaaggtgtcggcgccatagttctcgtacatgtagtccggggtcacgatgttcttgagggacttgcccatcttgccgaattcgcggttggcgtgttcgccgttccaggtgaacgtcggctcgccggaagcgtccggctcgccttccacgacctcgtcggccggcacatactggccacggtcatcggtgtaggcgtaggcctggatcatgccctggttgaacagcttgtggaacggctcggccgaatccacatagcccaggtcgaagagcaccttgtgccagaaacgggagtagagcaggtggagcacggcgtgttcgactccgccgatatacaggtccacgccgccttcgtcacccgagtacctgttgtggttcggacccatccagtagtcgaactcgtccttctgcaccatgtggtcggcgtcggtcgggtcgatgtaccgcatgtagtaccagcaggatccggcccagttcggcatggtgttggtgtcgcggtagtaggtcttcttgccgtcgcccaagtcaagctcgaccttgacccagtcctcgttgcggctcagcggcgcctctggattggattcggcgtccatcgggtcgaaggtgcgcggctcgtagtccggcacatcgggcaggctgatcggcagggcggaatccggcagcaggtgcggggtgccgtcctcgccgtacacgatcgggaagggttcgccccagtaacgctggcgggagaacagccagtcgcgcagacggtagctcacggtgcccttgcccacgccggcggattcgagccaggcgttgaccttggcgatggcgtcgtccacgcgcagaccgtcgagcgacagcgcatcgcccttggcgtacgtggattcgacgtgggagttgatcacgatgccgtcatgggaaacgaacggcgctttgccctcgtagttggccaagtcgtcgccggaacccggcagaggcttgacggtgtagatgaccggcagaccgaacttcacggcaaagtcgtaatcgcgctggtcgccaccaggcacggccataatggcaccggtgccgtagtccatcagcacgtagtcggcggtgaacagcgggagcttcgcgccggtgatcgggttggtggcgtacaggccggtgaacagacctgtcttctcaccgccctcgtccacgcggtccttggcggtcttggcttcggcggcgagcctgtaggccttcaccgcctcgaccgggttgacatagccgcccttccagtcttcgggtacatcggccggccattcggcgggcacgttctccagcaggtgatgttccggggaaacaacggcgaacgtggtgccgaacaacgtgtcgggacgggtggtgtagatttccatgtccttgtcaccgtcggcagtggccacggtgaagtgcacggaggcaccatgggattcaccgatccagttgcgctgcatgagcttgaccttctcaggccaatcgatgccgtcgaggtcggcgatcagacggtggccgtacttggtgatgcgcatggaccactgacggagctcgcgctggaagaccgggaagttgccgcgttcggacttgccttcggcggtgacctcctcgttggccagcacggtgcccaggcccgggcaccaattgaccggggacttggagatgtacgccaggcggaagtcgttcaagatatcctgctgctcggcggcagtgaggtcggaccactgcttgccatcggactcgtggccaggaatggccttttcgccggactcaaatttggcgacgagctcggcgatggggcgcgcggatcccttggagccggacgggttggtggcctcctcgtcgtaccaggaatcgtagatgcgcgagaagatccactgggtccaacgcacgtagccggggtcgatggtggcgaacgtacgacggctgtcgaagctcaggcccatgcggtgcagctggcggctcatgttggcgatgttcgcctcggtggtcacgcgaggatgctgaccggtctggaccgcgtactgttccgcgggcaggccgaaggcgtcatagcccatggcgtgcaggacgttctcgcccttcatgcggtggtagcggctcgtcacgtcggaggccaggtagcccagcgggtggcccacatgcagacccttgccggaggggtacgggaacatgtccatggcgaagtaggcggtgcggccttcggcgttacggcccttgccgtccttcaaatcgccgttgacgttggcggcccagaaggtgccttgctcgtcccaaatcttctgccacttgttttcgatgtcctgcgccagtgcggcgttgtagcggaagttgggctcttcggtttgcgtgctcttctcgttgtcactcataaatcagcaaggtagcctcgcaactggacacgtcgtcaatcgttattcagcatccgagacgatggctttggggtcaccgttcagcgaaaccgtgagctttgtttggcttgtgaacgtatccttggcggccgtccagctgccatcctcaaccatgtcttccaatgcttccgcgattttctgcgccaattggctgatgccttgactcacggcgatgccataactgacctcgcccttgtccgcaatcacgtccatatactggggcccgttggccgcttgaagaccggaaagcaccgccatatcggaggctatggcatccgccgaccctacttgcacggccgtgacgcactgcgcataactgctacgctcctgaatccgagcctgcgggtggttgccgcggaagatgccgactgtctcgtcacctttcactgcgcacaccgtgccgtcgcctacgtcgcccaccgaacctgcgtcattggtgaatcggccacgctcatccgacctgaccagcaaaccgacgctggtcgtgaggtatggtccggcaaaatcaacgatcgcgctggatccatcggtgataggccaagaggcgacgaccatgtcgacctgtccattgtccagcatggagcgccggttttcggggcgaacctgcttgaagacgatctgcttgttcgcatagccgagtttggcggccacgtatttggcgatggtgatgtcgaagccctggtatgtgccgtcatgccatgctcccaccgatggttcatcggctgcgaccccaatggcgatggtgggcccctccggcgctccggagacggtggtgacttgaatttggccgcaaccggccagaccagataatggcaatatcatgccaaaggccgcggcgaatcctgccatcagccgggagcgaaatccgcgccgcatcgggcggcgagcgcggagcatgctacggctggcgaacgatgaccaatggtgcataaccgtcaaacgccttacttgaacatgcgcgaacgggtgaggaaccaggcgaccacggcggaaagcaccatggagatcacgatgatgagcaggaagccccacggcttgtcagtgaacggcatacccatcatgccgccatcgaagttcatgccgtacatcgagaagatcagggtcgggatggacagtgtaatggagatgatggtgaagatgcgcatcacgttgttcaggttgttggacacgatcgaggcgaaggcgtcggtcatgttcgcaagaacgccgctgtagatgttggccatctcgatagcctgcttgttttcggtgatgacgtcgtcgagcaggtcctcgtcgtccgggtattgcttgatgcgttgcagggtggtgagcttctccatcacgatttcgttcgatttcagcgatgtggtgaaatacaccaaagtcttgctcagctccatgagcatcacgatctcgcggttctgcatggagtggcgcagcttcagttcaagcttgtcgctttcgcggtcgatgatgcgcaggtaacgcaggtacatcgtggcgttgcggtacaggatctgtaggatgaagcgcgaacgcatgaaggtgttgaagcctcggatcgtgccttccatgaatgggtggagcacgggcgtgtcctgcatgcagacggtgatgatgaggttttcggtgacgatgatcgacaacgggatggtctcgtaccagtcgcgtccgccgcgctcctccacggtggggatgtcgacgatgatcatcgtgtagtcgtcctcgacgtccacgcgagaacgttcctcgtcatccaggggcgcgcgcaggtcggccaggtcgatgccggtctgcgaggcgacggtggcgagctccacatcagtgggttcgctcaaacataaccaggagccgttttccggtttctcgatctgctccacctggccattgattgagctgaagattctcagcatgtcgcctcacccgccttccgcgctttcctactgttctatcgctgtacggttccaaaccgcaatcagtctagacccaccgttcgaatttgcgagcggggtttcgcatagcgaccgtcaccagacgattggctgccaacttggcatgtgcggtccgcgcagatcggtcggcccgttctcccagtcggcgctgtcggcgatggcgggagccttgttgtattcctccaactcccacaggggctgttcggcggggatgccgttgacgctgtggcgcactttgagccggcaccaacaggcgttgcgcatgccgccgagtgcgttcatgccgtccgggtcgagttcgagcaggttggagatggtggcggtaatccatgagccatgggtgacgagcatcagcgtggtgggcatgctgtctgaataggcggagtcgatgaccagtgcgcgcacggcatcggcacctcgctggcccacggcggcacggctttccacaccatgcttggtttcgcccccagtgtgctgtttccaagaggcgtagtcgtcggctgccacggctttgatttcggcgcgggtcatgccttcccactcgccgaagctgcgttcacgcagtcgttggtcacaggtgaccggcaatcccaaaatatcggcgaaggcgtgtgcggtctgttgggcacggaacaggtcggaggtcatcaccaccatgcgccggccggcggcgggagcctcttcgaactgtcgcgtatcagtgcgttcggcggcgtcaggaccgggctgggcgatggcttcgggatgctcggcaagtcggttcaccttggcccagtaataccgtgaagcgagcgcgaatccggtctggtcgacctgccattggcctacgatgtcgagcggcacatcgatctggccttgcaagcgatgttcgagattgtattgcgtacggccatgacgcagcatcatcacttcatcgatcatcggttttcgccacctcgttctcttgcggtttgccatactcatctcagcacaacccctagaatggcggcatggagatttctgagtcgacctgggcgttcatcgccaaacaccgccgtgaagatgtgcgtgatgtggccttgcacgccaaacatgatggcgacgtggatgtgccgttcgcgctggagcagattgccggctggcagcgcgcttcacttaagctacctgactgggcgtcccatgatgggctgattttcccgccgcaagtcccaatggaacaatgttccagccagttcacggctcaatacaaagcccggttagcacagcgattgttggccaaggaagcagtcgacgacgattccccgacatccctagtcgatctgaccggcggtttcggcgtcgacttttcttacatgtcccgagtgttcaatcgtgccatatatgtggaacaacaatccactttatgtgatatcgctcgccataatttcccaatactcggccttggccacgccgaaatcatcaatgatgattcaacagcagtgcttgatacgcttggccgagcctccatgatcttcctcgatccggcccgccgtgacgatcatggcgcgcgtacctacgcgattgccgattgcacgccggatgtgctgaccctgaaggatacgctgctggacaaggcaccgacggtcatggtcaagctctcccccatgctcgactggcataagaccattacggatttcgccggcgcggtgcacgaggtgcatatcgtctccaccggtaatgaatgcaaggaattgttgctggtgttggggcgcggccgttgcgcctcaccgctcgtggtatgcgtcaatgacgggcaggtgctgtcgtacaaggccggcgataacagcgacaatcaaacccctatcagcgattctgccttagttgcatgcaatacctgtaataccgaggatctcccggctgaggaaagcgcgaacggcttcgattcctcgcattggaagtacctttacgaacccaacgcctcaatcatgaaggccgggtgctttgatgttctcgaacagcgcttcgccgtgcatcacatcagcccgaatagccacctgttcgtggcggccgaacctatttccgattttccaggcagatcattcgtcatcgaatccatcgccaccatgaacaagagagaactgaagcagctattggccggtctcacgcacgccaacatctctgtacgcaatttccccctaaccgtggcccagctacgcaaaaaactcaaactcaaggacggcggcagcacctacctcttcgccaccaccgacgcccaaggccgtcacctagtactgcgcactaaaaagcgaaaaagtggctccctctgccgaggaagccaccaatacgtcagctaatcagtccttggcgatggtcttgccggcggtcggaccggaggcaaggttctggatttcggtgacttcgagaaccggaatcacggccggcttcttggtgcccttttcctcggcgaccttgacctgctcgttgtagatgtcgtcgtcaacgtgcagcaccacgttgccgcggaagcggtagccctgcttcttctcgaggttggcgaaggcgatgaccaacggagagccgttcttgaggttctcgtagtgctggccggcggtgcgctcgtggtaggcgatgtgcgtgtcgtccagaacgaacagagacatcttcgggccgaggtccagttcgccgtccttggagacggtggtgatccagccgaggttgttctcgatgaattccttgatctgcggtgtgatgactgccatgtcgaatcctttcaagattgttgcggaaccatgtctgttcttttctagaataccggtttcgcgcgcgaccggcccgggcgctcactgtgagtatcctcaccttcacatggttttcatcgcgcttccgcccgccggcggcaatacgggacgatacgcgcccgacacccgccgatcggtcggttttggccggtagtccccgtaatctgtgagccaagagagccacaagtttttccaacagtccagaggtacaccatgggtttggtcgatcgttgcaacaagttgcgcagccgctggtcacgcagctttcccccgaatctcgccagactcatgctgctgtgctgcgccgcgttgtggggaggcagctatctgctcgccaaaatcgccatggaggcgatttcgccccaatggctgatggggctgcgcatgaccggtgcctgtctgtgcatgctggcgttgttccataggcatatcgtgccgtatctgacgccgaagatcatcgtgccggcactggtggcgggcctgacctattggggtacgatggtcacccagaccgtcgggttgcggaccatcgaacccgggcgcagcgcgtttctgacggcggcctattgcgtcctcaccccgttcgccacatggatcgtctcgaagattcggccgaaggccatcaacctggttgccggcgtgatctgtctggccggcgtcggcttcgtctcgttgaagccgggcggttcgttgtcgctgggcgccggcgactggctgaccatcgccaccgcggtcatcttctcgttcaacctgactttcctgggcatctataccaaacggttcgacccgatcgccgtcaccttcgtgcagttcggcgtcgccggcgtattgttcatcgcaggagcggcgttcaccgaacccgcgccgaacgccggttggctggcgccctcggtggtggccagcgtgctctacctgttcctcggcgccacgatgagcgcccagatcatgcagaacatcggtctggcccacgtgcccgcctcgcaggcctcgattatcatgtgcacggagagtctgttcgccatcacgttttccgctttgttctggggcgagaggatcatgtggagctcactggtgggtttcgctttgattttcgccgccgtactgatgtcggtgatcagaccgaccgggcagtcgctgcatcgtaattgacgatgtcccgcggcctgcggcgacgcgaaacgcacgtgtgtgcgccgcagggcgtgtccgacctgtacgaaggccgattttgaaggtctcgtgtaggcctcgccccgcttccatcgagtttcaggcaacctgtcagcccgacaccctacggtcgtgcattgtgaagaagttttttgaaggaatctccctctcatccatcgtggcgggcacccttgccgccgtcacctcgttcctgctcgcatcgaagatcggcatcggcggttcggtgatcggagcggcggccagttacgtcgtctccgccgtggccaccaagatctaccagaacgtgctcaccgcctccggcgaaaaactccaatcggcctcgtcctccggcaacgggatcacgaaggacgccgagaacggcgatgccgatggcggcgccccccgaacggccggcagccggaccgacgttcgggacgagcccgatacggcgacgggcgtggccgccgatgatgcttcctccacacgcagaccgcgtgaaatcgtgttcagccgggcgaacggcaggacgtactcggtcgatgagctgcgcaagtcccgcttccgcgcttcgaagcacaccgccatgatcgtcaccttggtgtccggcctgctcgccgtggcggtgacggccggcgtcgtgatgctggccacgcagggacgcggcacggacaatctcgtatcccccaccacgaccacgcccgcgcgcaacgacaccggcacgcgaacgggcacccccgatcagaacaacactctgccccagacgggcaccggcgatgattcgaagggaaccagcaaggattcgaaaaccgacgccccctccaccgacctcgacgccaacggcacctcgggttcgaccggcgccggcgcctcggattcgaaaaccgacggcaccgccaacggttcgaacggcaccggcacctcaaaggattcgaccaccggggacccgaccagccaaggcgtcggcggcagccagaccggttcgaccggcgccggcaccggctcgacgaaaaaagatccatcgggatcgacttcaaccagtaccgacaccagcggcaccagcgggtcgccggccaccggccaagacgccggagccggcagcacgggcaaatagcgcatgcggaaagcccgacggccgcgacgtcagtcgacggctaagttgaatccgggaccaccatgccgaatatcgcttggagatatgataagggaacgacgcatgagtcgttcccttatcgtggtagccgtatcgtgaccctggcgcctttggtttctgcggaattactgaggagcagttctcctctatgctgttttatgatgacgtcaacgatatataggcccatcccataatgcagttcggagcctctgctctggtctgccatatagaaacgctcgttcgcgtgcttcaatgcctcttgcgaaaaaccacagccacagtccgtaatgcagacattcaagtgatcaccctggccatccgcatccatatatagcggagagtctacgggcgagtgctctacggcatttgaaaccacattcatcaatgcccgctccaacaatactccatccccagttatatgtttcggaagagcgtgctgcgtctgctgaatcacaatacctttatctttgcagatgatttcagcttgagatatgacatgtctccagaactccgggaagcatatgtcttccatctgcaattgatatccgcaggatgctcgggatatatcaatcatcatctttatgtaccgtctcatctgctcagagcttctcatcgcatacgacagatagagcttttgttcttcgtcaagcgtcgtttcatccaacaggtcgatgttcccctgcataacagtcaatggagtcttcagatcatgggccaaggatgtgatctgctctctctgcgcttgttcacttcgccactgttgttccaatgactctttcaaactgtttcgcatactatcaaaagatgaaaccacgttttcaaattcaagtattcgagaatgcctgatagcgaaatctaagttgtgattttcaatctctttagtggcttctaatataggcgtcagttcttttctcagttctctggcgaaatgaaccgtcaagtagacgcataagcctaagctgttagcgatgatcaaagcaatcatcagtatctccggagacggtaggtacttgttgcactgtgcattgagatactgagaacctatgacgtactgcagaacaatgtacccatcatctcgagtgatgaagatgaactgtgttctaccgcctgcatctatgagacccgtctcggcaaacgccagagccttctctttctcttcttcgttcatattcgtatctatggatccatagtttctatccaaccgaaggtatttaatcccaatgggcagatacacgtctgatacatctggcgttgcggtgagtatcggcaccagatttttcgcttgccgttcggcattatccgcaaacgttacaagccccatgctggaggcgaacatcatgcaggcaaaggggatgactacggacatacacagtccgccaagcagacatacaagaaatctataaaaagttcttgtaagcgtcgtcttcatctttgttcccatttatagcctatcccccagaccgttacgattggttgaacaccggcctcctcgaacttcgaccttatgttttttatatgcgtcgaaattgtagaaccatcgccatacccatagaagggaaaaacggcttcgtatatttgtttctttgaaaaaacttgccctctgttgccggcaagatattcgcagatcagatattcgcttttcgtcaaaggtacaggtatattatccaccagcagttcttttgcggatagatcaatctttatccgatcaaacgtaagcgacacatgtcgttctctctgttcacggcgtagatgcgcatgtactctcgcacgtaattccgcaatacggaatggttttgtcagatagtcatccgctcctagtccaagaccggatgtaatgtctctctccattgtcttagcggtcagaaagagaatgggacagtccaccaatgaacgtatcttgccgcagtaggtgaatccgtccatatcaggcatcatgatgtccaatataatcagatcatacccgttcagcccttcaaggggcacctgggcggtggacgtatggatcgtcactgtatgtccatctttttccagtccgtttttcacaagttccaagatgggtcgatcatcatcaatcatcaggattgtcgccatgatacacctgcttgcctcttctattccataattcatatatgcaataaaaacggtcattggcgctttgcaacatagaagacgtcatttatccgcaccgcaatggcttcagtcctctctctactgttgatttcataaacgtccttgtacatccattgttcccgatgccgtccgacggtttccccataccagtcaatttccctcaattcctcctttgacaaaggaatcttcgtctctgcatcaaatacgacatttttagcaagaagatcaatgcgacttcctagttcaccatctgacacagtatcagaagttacttgatagactacgccatcacaaagaatctgggtcgcatctcggggattgaccgagaatccgcaactcgtggattgtcgtatgtccttaaaatcaaacaccctatccacgtctctgacatcttcgtctatgacagctttgtgatactcgccatttatatccacaatcagatagtcgccggcatcaggagctgcatacacatttacgaatggaagaacatgggacttaccaggggctttatccaccagatccgatatcttcgccagagtctgcaaggtaccattcttgagatcctcttggagtattacctttcccgtctcgtctacggcaacaagttgtcggacatacccgacccacgtcccgagaccgttgttggagaccgtatcctctagaatggtgtagtcatttcccatacaggagaacttcgtcacgttatccttgttcaaataacattgctctccgggatattcgctgttcccctcttgcaacgaacagcccgtaagagatagacatgcgataccagcacaaagcatcggcagcattttactcatatccctttgtcccttcccatctgtggaaccacatcaggcttacgatgaatagcaccattgaagagacaagcatgatcatgaatcctagttggagttcgtataatccagaataaaactgttcctcattaacatatctcaagacacaataatccataaaccgcactccccagccccacggaaggaacttccagatacagtctccaagtcccgtagccagcaatgccgataataggcttcctgtaatacctatacccataactacacttttacctagagtgaaaccagcaagtatggaaataagatacagtggtattgcagacaatatcaacatggtaagtggtcgtatatagaacgagaatggaacgattgaataaagcgaagcaaatgagaagacacaaagcgccgttgcggaagctgccagaatgataagatatgccaattttccgatatatactgacatgcgcgaaggaaccacgccaaggattgattgaaaatgacctgcttcattttcaagttcgaccgtcatacctacgacgatagagataacaagtggaaaaacaattgccacaacttctaaaaaagtcgtcacagctgtcatccatccccaacctgatatacgaaaatatccagcaaaaacacaggccccgatcacagggaagagaacatggatcagaagtaatggcgtatgcctgcttttaagccattccgcttgaagacatctgataatacccgacatcaaagaacctcctgcttgataaaggatcttgccgttgacttcgcaaggccatatagtagaaacaccgacaggcacagtaccgcgatgaccaacagtaagggagtcgacagggcacttccttctactgatgctccattcggcaatattcccaatgcgggaaccataaggcgatcaacccaactataagggaacaggaaccaaaggcctgtgtccgcccccaatatccccagcgtcaggctcattccgacattcaatatgagagtggcgaatacacccaccttcttggtcagccataagcatagcggtatattccatgtacttgccagaatgatgcagagcgttccgaacaatgcctgcatcggtctgatcgtcatgggtatgccgaagatgcgttgaataatgaaaccacctgcaatattgcacaacatcagaattgcattggcgagtgccgcataaagtatgcaggtgattatctttgcataccatacccgctctaggtcgacaggtaacgacaatatggccctaaactgtaatttgccgctatctctctggattatcaagattgataatagcgtcacgcagccggggtacaagaacacataccaccagttatatgaattctgctgataccacataggagcaagcacattaagacataccgttagcataggggctatccatgctattttcctaacgaaagtacctttatgtttcaggtattcagaggctatataattgatcatactatcgttcttcctgtgatttccttacaacctcgacaaatagttcttccaagttctgatccttattcattggtccttcatatcccaaaacaccatttgagatgataccaatatcgtcagcaataagctgaacttccgatagaatatgactggatagaataacagtaatccctttagatgagaaggaacggataagagaacgtagttcttgtatgccgatagggtctaatccgtttgtcggctcatccaggatcaacaattcgggactattcaacagagcgatagctattcccaaacgttgtttcatacccattgagaattgtccggctcttttccgtcccgtatcttgcagatccactattcttagaacttcacctatccgggttttaggaatatccagcaacttcacacggacttccaaattctccgttgcggaaagattctcatacagtggaggagtttcaatcaaagctccgatctgttccagatctcttctgctccactcatgtccatcaaacagaatcttgccactggtaggatggagcatgcccgtgatcattttcagagtggtggatttaccggcgccatttgggccaagcagcccgtatatcgaacctctccgaacggttatagacacgttattcacagccctttgcttcttgaaatccttacataggttattcatctgtagaattgcttccatgtttgccaataccctttccttgttttcaaggtagagaataaacagcaaaattgaagactttttgaagatttcaagataccgtgcacccatccatccgcagcgttcaacttgcgacatacgcaaactgtggccacggatcagggaagggcccgtccaccgggtcatcacgaacgtttcgttccatcgagaaccgttcaatggaacgaaacgttcgtgatcatccggccgactgcgtggcggcgggagaagatggggacgggcgcgtacggcgaatgcgccccaaagccagaccaaggcagatgaatgcaacgccgaacaacgccaccagaccaatcgacgacgcccatgccccgtaatccactctggtcacggcatcaagcccgaacgcattgtcgatggacgtgcacaaccaccatccgggcagcagtttgccgaccatgttcttcggcccaagcaacatcacggtcaaagtctcctggggcaccgataccaatattatcgactctgagaacgtcacagaaatcaagacataactgcatgacgaaggcaaatcattgaactcggacaacttcaccatcacttggtatggcagcatctcgacggcgaggaacagtcgggccaaagctacacgttcgactggaaagagccaccccgaacaccacctctctcagatccccacaaccggacaggccacaccaaggcatacgcatgggaatcgtgcgtccgacacccggcctcaagcccatgagacacctaagagcatgactaccattggtatgttccgaaattgggcgtaaagcaggtattggtcgcaactacatggtaatgtcggctataaaaactggcggagatacgtataccagtggcttcaaatcaaactacgcttacaaagacgcaaggagagttttttttggggggggggatgaaacatcttattatgattattacccatattgagcaaagtagttcgagtatttagggcggggctatttgtcccgccctagtttatagatcccttcaaagaagaggcgtatgctatgaaaaagtttttaaagatttttattttccttgaagtcatactctttgcctatatttttaatacttccatttacaacatttatgaaaagaataacattgctgccaagaatctaaaagggtacgtcttagaggaaacatcgccagaagttctcgataggttttatacgttatttacaaaagagtattctcataataaattagagcttatcaacaatacgctcacttccacagataaatctgtttatgatctgtattgctttccgttaaattcttttacacaaaaacagcctatatcttcttctatcttatttcaatatcatgaattacagaaggaagattttttagatagtgttggtgtattctatacagatttaccaaacgatgcaatcaaagagatagcatctcgactgtccgtcgcgataaacaactttgaaagcgactccattccgtacagtatggtattggaactaaatcttgtgaatttcataattttatttattgtaattcaaatcatatactgtatttatacctcctatagtttgaaaaaaataggtattaaaaaaaagcatgggcttttctactatacatattttaaaggaacaaattacaaatataataaaatattattctgtagtatgcctagtattactgttgttgttaaatacctattacgcattaacaaacaggtatgcttcttcttatttaataacaagcgtgctattctttattggagttttagctataaatatactttgtgttttaatgacaagtattctaattaagtttgtttctttagaagcaatgataaaaaataagactctaaataatggcacaaacgctgtagttcaggttataaagatagctttttcagcaataatcgttattaccattatttcattactaaatcaaggaaactcatttagacaaagccaacaagctgttttagactataagcatctggatggatattataccgccaatggttttaattcctcgaagtatgactatgcgttagcaaacacaaacatattagaaaactattccaagcaagcatcggagatgtacaatcataaccattcactactgtgtgattttaagacagacgatggttcgcagacatcacgcccctattatgaacaacagcttgctatcgcaaacaggaactatctgaatgatttttcaaatattaagctcaacggaaaaccattggaagaagataaattcaatgaaccaaccgtattggttccgcataaatacaagaatgatgaacaatctattaaagaatatatcaagcaagaatatttccgattgatgaattacaatcaattctatggaataccaggagaagaaagaactattgacaagtttaatattgtttatatcgacgatgcttctacgataaaagctaatacagaaaacggtttttctgatatagccgatcctattatcattgttgatacaggcgattttgccggactctattatctggattctttaaatacgaggtgtctatttttccaaatgaaatcaagagaagatttctcttccttgttgtcagaatatggtttagagcaattagttacagctggaacattactcacaccttatttaatgcagcttgagaatgtgacattcgttcttaaaaaaactcaccatgttcatgattgtatttatagtgtctttactatttattttgtatatttcaaattatgtggacatctttgtaaatcgaaagaaatatgcggcaaaagagatcttgggattctctcattctagaacactgaagaatcgttgtattctttggggaattggactcattgtatcagtcatattgactgctatagatcattattttgctttcatcttcgtgatcatatttattgactacatattttgcgaattactttatagaacttatatctcaaacgctttatatgagattgaaaagggagcataattatgtcattgattacattgaagaacatcaagaaagaatatggaaaagatcaggttctatttgaaaatctgtctttggaaatagaagaaggcgaatttgtggggcttgtggggaaaagcggtgcgggtaaaacgacacttctaaatataataggattgattactgatatatctgcgggaacaatcactattgacggacatcaaaatgtgtccatgaacagtaaagatgctatgattttgagaagatacacaataggttatctgtttcagaattatggacttatagaagatgaaagcgtgttatggaatttaaaattggctcttgaatataagaaataaaaaagaaagaaaaactcaaactaatcgataagtatctaaagcaatttgagctaactgatatgcttgacaagaaagtataccagttaagcggcggagagcaacagcgaattgcaattatcaagttgattttgcaaggaagtcggatcatattagccgatgagccaactttcggacttgataaagagaatgaatcgatagtgatgaagcttctgaaagaattaaatgaaaatggcattaccataatcatggtcacacacaacatgaatttgctcgattgtttttccagagttataaatgtagaaaacttcagatagtttgcctaaagggagatacacggtcttacatgcgtgcaatctccctttgcatctcgtcatatcaagacccatattcaatcacgatacattcatggtgaaccacttatcatccaagcaatgaacagtctttagatactgtatttatgtagataatcagattccctgtatcgggttttgcttacagtagattttcccaacactcctgtcccttgaaaactacaaacattcaccgccagtcgcctgcgcttccatccatctttgattcctcatgaagaacggcatggacccattccaaatgctgatcggcggatcatcgaggtgcgttcccagcataagagccccccccctccgccggctcgcggtcactcgttgccttgccggcctggacttctccgcgactccgattcaatagatgcgtcccacggccttgcccgtggcgcccatcaccctgcgcaagccgagcgcccggcgcaaccagacgccgctcaccaaggacaagatagatcgactcgtgccattgccccccccccgaatactaccggcccggcgggttctagtgatcgttgcaacacctgacctaccgcaaggagggtcaggtgaccagaagccaccgaaacgaagaccgtggcggggaacaccgttgggcgttcaacggcgtcgaatatccgacgaggaagctgacgtgcgaggcgagacgcgccgagtacgtgcgcctgctggacgaggaaggcatgaacttcacccaggccgcgcacgcggtcggcgtctcgaaacgcaccggcaaggcgtggcgcaacggcaggacgcgcgccacgggaaggaacgagaaacccctggtggaccggtatcgttccaccatggacaaacccaggaccctccatccgcgccacctgagccaggaggagcgcatccagatcgcggaccgtctgcgtctgggcgattcggtccgcgccatcgcccgcctgccgggccgcgaccccggcacggtcggccgcgaggtcgagcgcaacgggaatcccgggtccggcggttacgagccctaccacgcccaacaaaaggccgcggaccggctcaaacgccccaaaccgcgcaaggcggccgagggcacgcgactgtgggacgagatcgccgccgggctgcgcaggcattggagcccggagcagatagccgaccggccgaggccggacctcccggataatggggatacgcacgcgagcgtcgagacgatctaccaggccatctacctgcaggccaggggcgaactcaagcaggagccgaaacgcgccatgaggcaggggcgaaccgcccgcagaccccaaggcggccaaggccgcgaaccccgtttccgcgaacccacggtcatgatctcggagcgacccccggagatcggggaccgggcggtcccgggccactgggagggcgatctcatcaccggcagccgcaacaaaagcgccatcggcacgctcgtcgagcgcaccaccaggttcacgatcctgccgcacctgcccgacgggcacgacgccgaacacgcccggcaggccatcatcgacaagatgcagcacctgcccagactcctgcgcaacagcctgacctgggaccagggagcggaactcgccctgcgcaaacggatcggcgcctcgctggacatggccgtccacttccgcgacccgcactccccgcggcagcgcggcgccaacgagagcaccaacgggctcctgcgccagtacttccccaaaggcaccgacccatccgtctacccggaggggcacctcgacgcggtcgccgaggaactcaacgaccggccacgcaaaaccctcgggttcatgaaaccaagcgagaagatcatcgaactgctcgacgccgcgtgataacctcaacaaccgacaacgtgaccatggaaggccgctcaaaccccgggtgttgcaaccaccactagaatccgccttatcgccaaatccatcaggctcttgtacccggtctggaagtagctgttcggactggaggactgcttatcatcacgatccggtttcacggatccgccgtagaacgtattcttcccgacggcctgcgtcaccatcctgggaccatcacgctcgatggcctcacggtgtttttccaacatcgcgcttccaccggtgatggaggccatggaatcaacgatgagcccgacaaaacatcaccagcccctcgcaggacacacgccgtaaatcgtgtccgactcggacagatatgcagctagaatctcttcttcaccacattgacgaccaagtggcccactttgctgacgaccgtgggaccgtatttcttggcgaaggcaggggctccggtatcacgtgtctgcatgaggagcacagagcttactcggaagacgaagcttcctgaggttctgcgtcagtcttcatcttgaacgggttcatcttccatttcctcatcgtctattgcgaaggcttcgtcggagatactgattcagcaatcaggagacatggtcattgacatgtctttgctcccattctggtcagcacccgtatgggcccatgaacctgaatccattgaaatgcatcatataatcgggagtgtcggcacaccaagtatggttatgaagttgtatgtggaaagcgtcaagccgttctctaacaagctgagatgttcccaatcggtacgcacgagctgttttatattcagtagcagaagaaccgccacgaacaaaaacagaaacgtccctatggaaaaatgatagacaaggtgttcgtcgccggcactgatacggtgtcttttgttccaaatctattgcataaatcaatcactcctttctgagtacaaaaagagcagtcaatcctaagactaactgccatgtatgcatagatatgaaattgcgaaactggaagttatcgctctgacatatatctctgtatttcatcagaggtcaattttcttatttgcgtatttgcatattctctgtattcttcaatcatgaaaacaggtttcatatctttgcaagtttttcctttgttcttctttagatataacagcaagtcctcaccgtccgcaaagattttgtatgaaagtctgccattctcacttttcagttcgtaaataccacatgactttttagtactataatcagcagtacgcaaatataatttcgctatctctaacgatctaaaagggaaattccaccgttgtaatccacgtttggggtcatgctcaatgcagatacacctcccgcaagtcccacatatgtattgtgtatgattttctaaacaatctaatggatttaaaagtggtgttattctattctcgtcaacataacattccatacacatttcagattcactccttctgcaacttcaaatgcgttgcttccttcatacccatatgataacagttccatatatctgctacaataaaaaatctacccaccaaatttattttttcggttgtccctgcggtgtatggttccgtggattgcctgcgttcttcaatacaatgtcctctgcttttacataccaatccgcatctgcacccgtataggtctttcttgataccgtatcggctccgggattgacaagctccacaactgcattatacgaaaattcccttaacggtacttctggcggtacagacacgggaataattccaccatgcagactacagtttaaatcaggctcttgtgttgttttcgtgggtggtggttcgtcggtgagccgttgaatcccaaatggtcgtcgaggacgtgccggcggacgattccccgttgtgtcccgctcccgcgccggtggtccgggtgcggtgcccgaaggcggcaccccggtgttcgcgctgcggacgcaagtgccctgagcacgacgacgggggcggcgaacggcgacggcccatcgaccaagccggggccgggctggaacgatggatcttccgggcttcccacagccgcatccccgaggtcgtggaactgtgcaggaagatccgcagacgcagggacgacatcctcagaaccatcggacccggctactccaacgcgcgtctggaagagttcaacaacaagatcaaggccaccatccgcatggcctacggcttccgacacgttgacaacctcatcgccatgatcaaactccgatgcagcagcctacccatccacctaccaacacccatcctctaacccacgaaaacagcagaaggctctcaaatgtatagcgacgaatatcgcaccttgtgattcgacgtattttacaaactccaatcgtctggaggattttgctaaggctatgggatttaatatacatagatcgacgtataccggctctttgtttatgtaagggaatgattgatggttcggtttgcctgtttgtataatgcgcttatttatcttggtgccggatgtttttcggtctactatatggtggcctatcatgatgtgggcctgtcggtgctgctgatctccatcgtcaatgtggtgttcgacgtcagcgaatcggccagcgagctgcccacgtccgtgctgttcgaccggtggtcccgggaacggacgctgatcatcggcgtgttgtgccgcgtcgcgggattcatattgatgctgttctggtccacgaacttcgccgtgctgtgcctggccaacgtgctggccggcatcggggccgcggtcgaaagcggcgcggcgtcctcgctgtacatcgaatacgcccgcaagcacgatccctcgctgggtatgaagaccttggtgtcaagactgtcggcgatgatcggtgtgtgcacgatatgcggcggtgcggtcggtgccgtgctgttcctgcttgactcccagctgatctggctgggcgcgacggtgttctacgtattggcgatcatcccgcttctcggtctgatgagggccgggtcgcgcaccaaggccgcagcgacggatgggagcgggacgacggaacggcaggctgaggcgtccgtcgaatccgatggatccgccgagccgggcgagtccgggacctcgctgacggtgttggatcatgtcaggcagaccgtggcggccgcggccgtgctgctgcggaagccggagatatggaatatggtggtgttcaatctgggtacgttgtcggtgctgacgttctggcagctgctgctgatgggccaccagaccggggtctggtggcagttcgccggcctagtgttcactaatatcgcgcagatcgtcggcagtcgtctgggtatgctgcggctgcatccacgttccggcgacattgcgatcctcgtgctcatcgtgtcggcggtggtgcttgcggccacgccgatgccggcggtgaggatcctggcgttcttcgtgttctcctgcgcgcagatgtacgtggcgaacacgatctccagcagcttgcacgagagcattgacgattcgatccgcgcgaccacgttctccgtgggatcgctcgtattgatggccttcaccgcggtcgtcaccccgctgtgcggctacatcgccgacacgttctcgatttcctggggtacactgacgacgatccccctgctggtggccctcctcatcgccggacttgcgcgaaagcctgaatccgacaaacgggtaaaagtcgatatttcgttggattgagacgtcaagggcttgcggacacgatgcccgcaagcccttgacgtctatatgtcattcattcatggttggaatgcgctcctcctacgcgtgcggttgaatggttagtccatcgctatcgtcggagggtgtcagggccgaagatgaaaccgtctgttccgggtgcgtgatccaggtggaatggattggcaacggtgtacgacttgtcgccgggtttcacgtcgtccgtgtcgaattcgttggaatccttgtcgagcagtgggccgtccagcgaggcgggacagtacacggtgacgtgccagttgccgtcgtccatggggatgagcacggtgtagtgccttggagaccgtctgctgcggcatcccttatggatgattccttgataaaggagtttcgggggggggcgggtaacaaaaacccggaaccgaagttccgggtttttgtctggctcctgcggctaggcttgaaccagcgaccgtccgattaacagtcggatgctctgccaatagacaacgggcaattcgactgccatgtcaggcatggtaatctcgaaccagccagaagatcgataagccaaattacctgcgactgaagtgaggacggaatcatgcgtagcgagttccctggtctgttgtattgcgcgggtgcattaatcgcagtgacctcttgggctcttttcatgttctcgaaagaagtccatcggaaaggccgaacagtatccatcctgagattgcccgtcatttggatactgttcctcgtgagttcggcgccggctctcgcatcatatccggtttttgaaatatactcaggatctatggatccagatgtcctcgatttctacagtcagccgttcatacggctactgccagcagcgacctgcatagtgaatctgtgcgtatcgacatgctactccatggctcttgtcagcaagcgcagaaaaaccgaacatcgaaaaatctgaaccacagcgttcgagatgagatgccatggaaaaaccgctgtttccgctggccttggtgccgctggccgtcggattggtcctgatatccgtcgtgatcggatccaaaaaccgggaagagaacgcaaaaggactcttctgcgtgtcttctcggcgctcatggtcgttgccggcgcgttgatcatcgcgagccaactcgcatgacgcttcacgctgcggctcggcttcccggctatcggccgcggccagtccacggctctccgcgccattcccgcaatcgcaccatcgccggtctcaagcccatgagacacttggaaccatggctaccatcatcatgcgcacctcgcatgataatcctagccaactgtttttggctttgttccaaggctttcgatttttgggaaacctaccgattaccctcgtttctccacgaggcacccacaggcacccaagaataatctcaactgattcccacccaccggtcggccaccatcagccggaacgctcgtatctcgcggcgttggcgatctcgttcgcctgaagcgtcgggcatcgcgttgacgatccgctcgaccttctcgcgcaccatggcgtcgagcttgctctcgaacatggcctggtcgaactgtatgatttccttggacatggctccatgcctctttccaatcgcggtttttcattgtctggcgactgaaaatcgtacccggcacggcccatgtccttttccatcaaggccggaatccaaaaatgcgcaagaattcggtcgttatccccttagagactaaaggaattctattagttcagcaaattcgtatatcaatttattttttagcatgtcggacaatacagtaaatcaaccactctatggctaagataccaaggtagaaaagcgcccatacggaaaaactaatcagctttactcctagtgtctgtacagttccatgcccgtccactgttcttataaaaaggaatacactaatgcataagaacaatatgaattgaatgatttggaaaattctccaacctttgttttccacaatcaccctcctgtaaccccaatctctatatgctgattccaccattataagccgcccttggtgaaatgtcaggcgccccgttgtctaattgaaagtgcaacacccgttagattggagattgtccggataaccagtccgaagggatgttgcacctatgggagaagcatgttcgcacctgtcggaagaggaacgccaggtcatccggatcgagatcggcaacggcaccagcatccgcaggatcggtctgatgctcggccgcaacgcctcgacggtcggcagggaggtcgaacgcgacacgtggttcccgtccaacgagaacgagtcctgacggccgtaccggccgaaacggctgaagacgggcccatggacgggcggatactatatcgccggccccgccgcggcgcaaggccggccgcaggcgcgccaaaccgcgcaagcgctaccgcctgtcatgcgaacgcctgtgggcgcgggtggccgaatggccgggtcgcggctggtcgccgccgcccgtcggcggcaggccgcgcgtcctgttccccggcgactccgccatgcgcgtgtgcccggagagcgtctgccgttggatccacgccgaccgtcatcgccgtgagcgccgggcgcgctgccttccacgcggccacgggaggcgtcgcaggcgtggcggcgggaggacgtcgcgtttcccgattcccggacgggttcccatctccgagcgtccgccggaggccggcgaccgcagcggtttcggccattgggaggccgacggcgtgatcggtgtcggatgtgacctgcgcaccgaggtcgagaggaagaccaggttcctcatggccgggatcgtgcccggcaggaccgccggggaaagcgtcggggcgcggctggcgatgttctcgccgctgccggccggcgcgcgcgtcagcgtcacgcacgacaacggcaccgggttcgcccgccacacgcgcctgcgcgacgggccgggcatggacacgtgcttcgccgacccgtactccagccggcggcggggaagcaacgggaacaggaacggcatgatccgccggtatccgcccgaacgcagcgagatccggatggacatggccggggaactgcgggagatcgtcgacgaggccgacaaccgtcccatgcgcgtgctgggctaccggacacccgccgaggcattcgccgacgaactgctagaattgcaggaccaacaggggtgttgcacctctaaatagacatcgggcgcttactgtggcgagaactggatctacagggccaacgtgacacaaattatcgaagaacacggcatctcagtcacggtccaacggcagaatgccggaaccgctcgccgcatcgttacccaatgcattggtctcaatcttggtggtcggctaccccatgcccctaatcacaacccgcattcctgcaatcaggcatcaccacccggtctcaagcccatgagacacttaagaccatgactaccatcatcatgcgcacctctgatgataatcgcatgtggtcgtttttggctttgttccaaggttttcaatttttgggaaacctgccggttacgctcgttttccacgaggcacctacaggcacccaagaataatccgggaacgttccaccaccctgccggcgctcagcgtcttcgccgaccggcacggaaaagcgcaataccccctgtggtttcatgatgttccgcatgggtggtgcccagaagcattcacccggcagcatgtctccatggcggacaatagacagaacgatacgcagcccgtgcaaccgtcccagccgccaatggcatccaactccatcccgaatcccacaggcccattgcagacagcccagatcagctggctcatggtccaaagccgcctgcgacgccaccgtcccaatagcaggaacggtcagctgcgcagtatgatttccgccctgtcggccagttcccgttcgcgcacacccatggcagacaggatcgcttggctccgcgatggcatggtggaggtcacccgtgcgaccaatgcggagaagcgaccgaacaattccaagtaatcgtccttgtcaagcaaataaccaagatcaccgatggcctgatacacgttctcgttagcgcgcccatcgtaccgggcacaatagcagcgctcgtcatgcgcgcacaggttgcggtagaacaccagtctgttgaagatgctgtccagccgcttgatggtgatgcgccgtggcctgtcgtgcgtgtccgcatacaaaccggtgaaactttcggcgaccgccaatcggacggccggggactggacttggaagaaccataccgtctggccgaaggaaagatcgttggccagcacccacaacggaacctggccgttgtggtcttccatgcaatggcggatatacgccttgccgccatagtcgcccctgttgcgcgggttgccgtccaactcaagtatccgcttgaagaccttgtcgatcaatgccatggcgctcggacggcacctggaatcataatagtcgggattgagatacgggttgacctcgtcggggtgcagcccggtgaactcatgcgcgcacactgccttgagcgcggcctccgcccgtgtgatggaggaaaacaacagttcacgcaactcacggtcgaacaggaacagggcgtacagatcatcgaaacgcgcgcccgttccgtaccggtcatcaccagcggtcaggcatgcctttcggtcgaggaacaaatccttatagccattgacgatcggataatagccctcgcgcctgagcacatgacccgcaccggcatcgacggccatgccacgggagcgcagaatgcgcagctgttcgttcacactcctgtagggcttgcgcaacgacatggatccgacctcccccaatccagcgatgaaagcactgaggccaccccgcgtccacggaatggcctcagcgaaccgaacgaagtccagcttatttcgctgttacagaatagcgccaatcccccgcgaatgcaacccagccagacggcggacgatataatgaaacctccatatcatcattccagaggcacacgccggtccatcaagaccaccaccagaaaaacccaaacgcccacaaaggagaagacgcgcgcctccacgaggcctgcatgaccctcgctctttcaagcgtctgcacgaaccgggcgaagtcgtagatgccgtatgtcgtacatcgatgatgtcgggtccccaagcagggtgctcgtggctcttcaccaggaggctggaacactttctcgtcgattccgcaggagcgacgcaagccttccgctccttgaactgggcctggcctctccggcaagccctactacaataggactcactcctccgcagttcgagaatcgagtcaatatgtgccgaatttgccacattcttgcaggtctcctagtgtgtgccggactcctacgcacagtaagcggctttatttttgactacctgcatccagaatacgtgtctagctttccttcatatctttattttttacgagcggttcccttccttgtcgctgctggtgctgtcgaaactattttattcctgacaaaaaggagaaataaataaagaaactcaaacaaattgtcactgctctagtatctgtaatattggctggaactgtgacagtaaatgcgtcggcagcagaatctatcgaaactccctataggagtcctaccctatccagctttccgtctaatgcttctctggaagatttcaagaaagcctcagataacgaagatctgagaattatctcatctccttctcggggtgctaattacaaaacgtgcgctgcagaggctgtagctttactgcggatttattctactacaggatccggctcgtcatctagtttcacgaatctcggtcattcttggcttatgatcacaaacctgtctggctctacggcagacattgctgggattaacgttgctgatggtaaatctataacagcaagcacttgggatgaatccgtagatgtcagtagagaatataagggtctgtggctcaatcttgattcgaagcttaattccaatggtattaatcttcagaatgtttccattcaattacccttaaggcaaattgatttagatacagtgaattctaatattaaaaataacgataaatggggctatcttaacaactgttctactttcgcttcaaaaatttgaaattcaattgctagtgacagcagtaaagttgacgctggagccatgaatacaccagccagtctagcaaaaagtattacaaaagttggtgaggcagaatcatatacattgttaaagtacaatacttcttcaccgcattacgattccgtatattacggctatcttcccataaagagtaataacaataattagacaaccaaatctgtccggtaaagccagactagttttatctataatgtgagccgcaagtgttggcatagcgcttgcggctcatacgcacgataagcaagagccacagcattcccacccggtctcaagcccatgagacactggggaccatgactacagttatcatgcgcgcctccgaaggtgacatgcgcatgatgcttcttctttgggatgtgacatcaggaaacagatcactgaagattgttgaaattccagtcaaaaccactccaagagccctgaacaatcccgattttcccgaaagatagaatccccacggtcgaaggatagcaccttattcaaaatcaccggcgtaggcaattactctttcttctaatggtttttcaagaagtagagaaagacaaaacaactgatgtccaatggagacaggaaaagacggaaatggggatgcgtcgtcgcctgcaaggacgcggacggaaggatcgtctcctggcaggcccgataccagagtcccgtcaatcccaggcaaagaatctaccgccgattcggattggaattccagaccgaggcgtaccgctggctcgacgaggagcacgcgctcgtcatcgaccataaaaagggaatccgcaggtggacgcacccgtctgcaaggacgatgcacggcaggatcctgttctcctcatacgcgacgcgtttcgtcgccaacctgcggaagaaggacgggtcggagctgagcggcagaagcaagcggatccagaaggcggcgttggacaaactgctcccctggttcggcgagacgcccatgtgcgacatcaccgaggaattcgtcaacgaatggtacgcgaaggcatgcgacgaggtgcgtccctccgcgctcgagcacgcggtctggctgctcaagcgcgtgatgagggccgcgaccgagcggcagccggacggaggtccgccgctattgtcctcgaatccatgcaatctcgtcacgaggaagagaccgtccaaaagacgcgagcaggcgccgatgaccaggcaggagatcgacacgctggtcgagggcttcccggaatactaccgcctgtcgatccatctcgcgctgctggtgggcgggctgcgcatcggagaggtctgcggactgcaacttagggacatcgacctcgaccacagactgctgtacgtgcggcattccgtgacgcaaggtccggacgatctgggcgaataccggctcgacgagacgaagaccccggaaagccaccgagtcgtacccatccccgcaccggtctgccgtctcatcagggaacatatcgacaggttctgtcccgacagggatcccgacacgatgctcttccacgcgatcaggcacccggaacgggtcctgaacccgacgacgatccaacggcagttccgcaccgcgaggaaaagaatcaaccgcgaggacgtgacgttccactccctgcgcgcgacacacgcgacgatgttcatgatccagggcggcacactgcgcgagaccatggacgagctcggccatgtggacgtcgacgtggccgtccgatgctaccaacgcgtggtgccgagacacaggcgcgacgtcgccgaacgactggcgctcgaatatctccccgccggggatccggccggcatcaaggcgcagatagcccagaaggaagaggaaatcgaccagctgcgacagaccgtcgccggactccggagaagactggaagagctcgaagacgacggagacgggcggagccagtccggataagcatacccaaaaccgaaaaaccgaaaaaccgaaataatgaaaaaccaaaaccggtggagaccggcatcaaacggaacaggcccacgcatctaagcgttgcggcatctgccgtcgtaacacttagatacgtgaggcgttatccgaaaatcatctcgacctgtgcctgagtttcggcttttcctgtcctggaggaacgatggcacgctgatagaagtaatgctcgcacacatgttgtctctgtgcgggagacatgtcgtatgccttgttcgccggttgcgcatactcaccaagatgggccagatcattcgacatggtcaacggttctgacaacggcttgacgattcttctgaacatatcctcgagaggacgcagatcgtttcgctgcatccccgcgatcgaggcttgatcgttcgtccttttgtcgatgagtccccagtcgaaatgccagccggcctcgcgcgcgatgatctcccagaaaatgcgttgcgtccgtccgttgccctcacggaacggg

SEQ ID NO: 2588 - DNA, 38534 bp, Unknown
  R222_15m  MAG No. k141_4920
cgactcgccgctggaaccgcccgcatacccatatacggcggcgatgattgcggcctgtgcgtccatcgtcacctcgcttgtcggctctcttgccccggccatcaaagccatacggctgcaacccgcgctggcgttgcgatggaccagaagccattctggacaagcccgccgacagctggatggtcggcattccgatcatcgattgcatccggtaaacaatccgcttgcgggatgtgtaccatggtcgagatgccgcaaccgcagaatgttgactattagcatacaaatacatactattgtcttacgtaatgatgttggaggttaatgtgagcatggcatccgtcacagtccgcgtggatgcggacaccaagcagaaagccgcaaacattgccgaggatctcggtctggacttgtcttcggtcacccgcgccttctacaagcagattgtccgggagaggcgcattcccctaaacctttcctatacgaccgtgccgcctgaaaccatggaggcccttgacgaggcgaagaacaggctcgccgacggcaaacctcgtttcaacagtgccgatgagatgttcgattcgttgggaatctgatcaatgctcaaaccggattacacagcggcattccagcgagatatcaagaaactcaaacgcaagcacactgatttacgcccgctgaaagaagtcattcgtctggttcttgaggacacggcggactccaaggaagtattgaggcgtaggcatcgcgcccacacacttaccggtgatttaaacggcgtattggaatgccacatcggcaatgccggcgactggctgcttctatggattcgcgatgatggtaccgccatgttcatgcgaaccggcagccatgacgaactgttgggcaaatagcgggtttacatcctgctttgaaccggccgatggcgatttgagtgcggcagtcggcccgtgcccgcagaagccggcatcgcctcgcagcgtgccggtctgcaatcgctgatcgacgaggaggagtccaggctcgaagccccgggattcaccggcgacaacctgctcgccgaaccacaccggccgctcacgccggagaccatgcgactgctgtcgggcttgccggcggaactgtacgcgaacatcgccgaacacgccgaccggggcgaatggtacgccatctgcgtcaccttcgacacggacgccatccacgtctccgccagcgacaccaccacacccgccgacatgggactcggcctgggcagcggcctcgaccgctaccggaccatcatcgaaacacacggcggcaccttccaaacccacaccgaacaagcccactggcagctggatgtcagcattcctgccaagaactagccaggcttgggactcggtaatgcacgcgcgcaacgatttcttctgtgagtttctgttcttctacacaacttaatccgatatgccttccgggcgtgtcgttgctcgtgtcgtgaaccgtcggttcgtttctagctacatacatcaatgaacgtttgtttacgatgtgccgtggaaggagccgcatacgcaggatgacatgacctcgcccggtggggcggtgatgcgcgacgaggatctgctcgcgcgggtcgcctccggggacgaacgcgccttcgagaccctgtatgggcgtcacgctgcggcggtgcgggcgctcgtgcgcgtgcgcgtgccggatgccggcacggccgaggaggtgtgcgccgacgtctggctgggctgctggcggtcggcgagggcgttccgtggtgatgcgaaggtgctgtcctggctgctgggcatcgcgaaacggcagatctacatgcgcgtgcggcgcgtacgcccgaatgtgaccgcgttggacgatgcgcccgaaccgcgtgacgatggaccgagtccggagacggccgtgctgtccgaagcgggcgtggatgatctgatggcgttgttgcgccggctgcccgtcgaactggtggagacggccacgttggcgtggctgcacggcctgtcgtaccggcagatcgccgatttgtcggacgtgccggaaggcacggtcaaatcccgtatctcgcgtgcgcgccgtctgctgcgcgcgcaactcgaccgctaaaacgatgcggatggaaaggaacggtgaatcctgatgaccgatcatcttgacgaaacgatcgaccgtttgacggacgagacgcccgacgggcgtctgcttgcggcattggacgccgtggaacgatcccgttcgggagacgcgcctcccgctgcggcggtgatggcgcgcatccgcgcgtcgcggtccccgttggacggaccggcatggtcgtgggcgcgcagtctgcggttgttcatgctgctgctgggccggcagtcgcgggtggtgccgtggcaggtggtgccggccacactggcgttgatggcgttcgccggattgggggcgcggttcttcgcggtcggctggagtgcgacgatcgtgtcccatgcgttctgctcgatggtgctggccggcgtgctgctgagcgtgacgatggcgttcggggattcccgcgcggacatgatctcgtcggccaccccgttgggtacgggggcggtcacgctggtccggctggtgttcatactcgcctgcgacgtcgtgttcggcctgatggtgaccaccgtgatgggcgcgcaggggtatgggacgttcggcgtactgctggtcggatggctgtcgcccctgctgctggtcgccggcgtgggcgcgatgctcgcgatccgtttctcctcgggcgtcggcttcggcgtcggcctgctgttgattatcgcaatccggctgaatccgttcgggttcgcgggtctggcggacgcaagccggtccggtgcagcacaatcctccggacagctaggtctggccgccgcggggctgatggcctgtgtgggggcggtggcgctggccggacgattgtccggggcgcgcatggcggccgcgaccgtctgaccgactcgaagccgataactcatctggtcgttcggcatgtcgcgtgaacttcaggacaggcggccgctacctacttggtgacgaacaaaaagaatgaccggcaacttcatcggacttcaaggagggtcggcatgacgggaatgattcgcgctcaggcaaggcgcatcggcatgggattgctggcaatgcccgtggcctgtgggattgcggtggcggcagccggcgtcatggtatccggcgtgtggtcgcgtacgcaaacattgatggtggtgaactggctcgcccagctgatggtgatcggctcgggcgtgtgcgtggcggtcgcattgaccggtgacccgctggtcgaggcgagcgagtccacgcccgtgggttggaggcgcgtgcaaaccacacggttcgcgctcacggctgtatccactcttgtgggtgccgtgcttatgttcgcgccgttgcatgtattgggcctatggccgcaggatatgggatggataagtctgatcgcgccggccggcgcgatactggtcgtgggcctggccgggttcgcggccgccgcatggtccgcgtccgcacaggccacggtcatggcggtggtcgccgtatggatgttcctcgccctgctgtgggacccgtacgtgctcgatccggtcacgcaacgcggcatcccaatcgccgtctccatgatcgccgtagtgttcgcgtggcgtctgctgggcgacgaggaacgcaacgtgacgctcgcaaggagaagcatatgagtccttgcaccggtttccggcatctgacccgcgtccacatgatcatcgtgtggcggcaacgttcattatgggtcgcggctgtcccgctggccttgctcgcggttctgctgggcgtgatctccccggcaggaccgcatgaccacggtgcgggcgatttggcgttcatggccaaggcgatggccatgttcatgccgatcgcctacatggccgcgttcaccgacttccacacgcggcactcccgacttggcattggtcaattggaggattccacgcccatccccgcgcccatgctggccgcggctcgcacgctcggcgcgtttctgatcctcatcaccccgtcgctcctgctgctggagtgcgccggcgtcgtccagaccctgcacggctcgtggcgggccataccacaggcattggccgccggactcgcgatcaccgggccggccgtgctgaccgcgatgagcctgtcctcgctgctcggcgcgatcctgcccatgatcgtcgcgcgcatcaccggcgtgctcgcatggttcgcgctcgtgttctcctcgccgatgctgcccgtgccgaccgtcaacggcaccatcctcaacgtgatcggcgacgccgtcggcgccggatggttcgggctcggccccgtctacccggccacgggaggcatcctcgcggtcaccggcacgcccgccaatgcggccatatccctgatcgcgcagctcgccgtcgccatgctgctcatggcgttgggtggatggtgctcggcacacccgcgcacaacgcgctgaacggcaccggcggaacccccaccgaaaaaacatcacacggaaagaagacgtcatgttcatctccatcaaccacctgaccaaggacttcctgaggaagccccgcgcgctggacgacgtgacctgcgacctgccgcacggcatggtcggtctgatcgggccgaacggcgcaggcaagaccacgctcatgcgcatcctcgccggcatcatccgccccacatcgggccaggtactcatggacggccacgatctgaaggacgagaggacccgccgtgcgctcaaacgcacgctcggctacctgccgcaggacatcgaaccctacccgcagctcaccccgctcgaattcctcgactacgtgggcgtcctcaaaggcatcgacgacacgcgaaagcgcatgcgccaggcgcacgagctcatcgaacgggtcgggctcacggacgtggccgaccggcgcatcggcggcttctccggaggcatgcgccgccgcgtcggcatcgcccaggccctcatgggcgacccccggctcatcatcgtggacgaacccaccgccggactcgaccccgaggaacgcatgcgtttccgcacgctgctcgccggcctcggcggcgaccgcaccgtgatcctgtccacccacatcctcgacgacatcgcccagacttgcccatacgtgttcgtcctgcgccaaggccgcatccgctacgacgggccgaccgaacacctcaccgaacacgccacgggccgtgtctggctcacccagccatccaacaccccgccaccggccggcatgatcgtcgccaacgccgtcaccaccgcacgcggcgtacgctaccgcgtcatcaccgacaccccgcccgccgacgcgcatcccatggaccccacattggaggacggctacatggtcctcatcgaggaacaccccgaccagcattgacggcagacgaacaagcaccccgaccaccaccgaacacgacaaaggaaaccagcatgaccaacacgacacacgccatccaaaccatcaccgccaccggcctcgccgccatcatggccctgggactgaccgcctgcatggacggcatcgaacaccccgaaaactaccctaccaacggcagcaagaaaatcaccgcgaccagcaacccacaggacatcagcgccgaccagctcggccacacatggcccctcaccgtcgaccacggcaccgtcagctgcacgcacaacagcaaaggcgatcccgtcatgcgcttcaccgcgcccgacggcacccaatacgccctcaaccagaccagcgacaacaaggacctgcccgacatcaatcagctcctcgccgacggcaaatccaccggcaccctcaccagcttcgccttcaccgtctgcgacgtgaaataatcatgcgcccgctgccggcggccgtgtcgatgtcgaccaccgtgcgcataccgcgagaatcctgtgacgctgacggttcatcatcgtcttgcagtcaggaccggcgcggttccgccgccgttttctccgtaacaatcgcgtatagcaccagtgcgaccagcacgacgagccgggtccaatcggaattacggatgagcagcccgacgagaatcaggacgtcgtagaacagcgtgcgcgcccaccgccacgggtattccttacggacgcgcatcgtctccgccaatccccagatcagggcgcagacggcgatgataccgttgaaccacagcactatgggcctgccctgcggatcggtgtccggcatagcgagattgctgaagaacatcaccagagcacccgtatatacggcctcgggcgcgaccgacaatcttccgccttcaacgcgaggatctgacatgattacctccttattgggggatccgtcaacgctaacgaatcatgcgaaaaaccattatatttgaatggtatgagcggggctcaagcattcacaacatgctgtcaagcaatcgtatgacaagaatcatccgtttacggcatcgccgccggatgaccacaccagcagggcacccgcgagggagacgacgatgacgccgatcacggccaccgcggtgatggtctgtcgcaatatcagcgcggcgataatcacgctcatggcggggtcgatggagaacagcgtgccgaccacgcgcgccgacgtgatacgcccggacaacgtgtccatcgtgtagggaatcgcaactcccagcaccgccgaggctgcgatgacgccccactgggcggccgacacatgcggcgcgcgagtgatggataccggcgaagtggccagcgccgcaaccgtgaccgacagggcgagcccgtcgagcccggtgcctgccttgccgacccggtcggcgaagagcgtgtacaggccgaagcacacggccgagcccagcgcgaacaggtagccggccggattgaagtagccgcccggcgtaaacgagatcaagcccacacccaccagcgcgaccaccgcgcacaggccctcgcgccagtgatgcgaaccggccagggcgaccacgcagggtccgaggaattccagggtgacggccacgcccatcggaatgcggtcgatggccgagtacaggcagacgttcatcgccgccatcgcaagcccgtagattacgatgcccagccattcgcctttcgaccggccagccagtttcgggcgggtgagtgcgagaatgacgatcgcggcgaccagcatgcgcatcgaactgaccggaattggtcccaacgcgccgaacaacgacgccgacagggacgacgacgtctggatacccaacgaccccaccatcaccatgccggccgccgccatcacacggccacgcgccgaacgcggcgcccgaagcttgcccaatacccctcccctgtcacggccattcccacacgacctctgcgccaccaatgatagtgttcggcgaagactcgcgacgtgcggagtcgactttgtatggcgggatcagcggaaagcggcaggctcactcccgcaacggaatacggcgagaaagctggctgccggacgattacgatccgaaacagtgcacccgtatacggcttcggtcagacacgtttcaccgccttgaacagcagacatgcgcttatcgcggcgatggcgacgccgaccggaatcacgtaaccggcgaatttcaccccgttcaacacccatgtggttggtatgacggcgtacagcatcggcgcgtcctcgaacatgccggaactcaccgtaagtccggcgacgatgaagaaggcgacgacgttccaggcgacgagaggactggcatagagtcgcagaacgaagcatgccagggaaaggacgacggcggtgaacgcaagcatcagaatggtacgcgacgaaagcggctcgttgacgacgagcccgacggcaagcccgtacagcaaagtcaggcagacgttgatcacgacgccgagcgacagcgacttcacgctgaagcgaagcaggagccggtcgtggatgctgaaggaacggtacgaggagggcaccctcgcatgggagaagacgagaccggccgcggttacgggaagcgccatcaccatcgccgactgcaccaccgcacccgtgttcccgtaacgcaaaaagaacaacggaaacagcagcacggccacgaaggcgagcgtcgaccagcggatcaccgccacacgctcaatacgcaatagggacttcatttcctctccactccttcgcgacggaaccggctcaacagcacataggcaaccaaaagcaccacgatcgggacgacgaccatcacggggccgacggacgctcgactcgccgcttccgccggcgacatcacggtgccgttcaggttcagcccgacggtccgtagggcgttcgcgacgtagggcgtcgcatagtcgggaaggtcgcccggcaggagaatccatgcatagcaaaggatggccgagacgattccggcggttctgggatcggcggcgatctcgacgatcgagtagatcagggaggtcgcaaggctctgcagcacgacgaagcacaggacagctgccagatgcgggtgcattccggtacccgtcaggaccatgatggcgtcgaagcacagtacgccaatcaggttcacggaggtcaggatcagggcccggaacacggccctgagcgagcatggcgtccacgcggaatacacgtggcgcggcaggccaccgtagtgcgccttcgcgaccctggcatcgcatgcgaagagcagcgaaagacagatcaacggctgggtggcggtgaaatagacgcaataccctccggttatcggggttccgttcgccgcgcttgagatccacgcacccagcagaagggacgagacggccccaaacaccgcggcgaggaaataccacgtgttccagtagtaggcgaccaacgcgcgaacaggggaaacggcgttcaagaccctacctcccctgatacagatccgcgaggttcaccccggtcagatccgtgacctgcacggcccggccgtgacgaatcatgatgcactcgtccgggacgccctggatctcatgaagcagatgcgtggagatgacgacgcagttccccttgtcccggtaggcgcgaagcgtttcggacaaggaggctatgccatcggggtccagaccgttctgcggctcgtcgaggaacaggaacctcggatgcggcacaagggcgaggcacagctccagacgctctttcatgcccgtcgagtagtccttcgccttccgcccatacaccgcgcgattgatgcccacaccgtccaacgccgcctccgggtccacatccagaccccagaacgcggagaccacctcgacgttctctctaccactcaggtaaggaaagaaactgggatggtctatcgccgcggacatctcattgatattcgtccctgtgtacgtgacctctccgctcacgggctttatccgtccgagtagcgtcttcatcaacgtggttttgcccgcgccgtttgccccaagcagacagatgatcctacccgtgctcaaccgcaggttaatgttgctgacgattggggaacccttgtacccgatcgagagattcgtagccgatataactggcataatcacccttcacgaaaggcgggcctgaaggcaaaggcaggatgccttgcccagacccgcgcgttgcaatgtcgccgccatttcacccttcagcggccgcaaacgcaacaacatgtcaggccaatcgcatgacgatagctccatgctccctcgattcgccgaaactatccatcggccaaaggaatgaacctgcgcatcatccgcaaggacgatgcatccgactcccatcgcacacttgccgccaccggtctctccccccccccccaaaaaaaaatggcgaagggcgggttccagtgatcgtcgcaacgcctggctgactgatgggagggccaggtggacaggtgggtgttcgagggcgtggagtacgcgacgcgtggcgagatgtgcgcggcgcggcggcgccgctacgccgagctgctggaggcgggcatgaacttcacgcaggccgcgcgggcggtgggcgtgtccaaacgcaccggcaaggtgtggcgcaacggaaggacacgatcgaacggcaggaacgagaagccatcggtggactggtatcgttccaccgtggacattccccaaaagatcagttcgaggtatctgagccaggacgagcgcatcagcatcgccgactggcggaaggccggcatgagcgtgcgcgggatcgcgcgcacgctcaatcgtctcgcgtcgaccgccagccgcgagctggtgcgcaacacgaatcccgcgaccggcatgtacgagccgtaccggccccagcagatgagcgcggacggcccagacgacccaagcccgcgaagatccatacggtgcccggcctgctcgcatacattcgtgcaggattgcgggcgcattggagtcccgagcagatcgcggggcgcctgcgcgccgatttcccggataatgatgctatgcatgtgtgcgcggagacgatctaccaggccatctacgtccaggccaaaggcgaactgaaaaaggacgtcatcaaggccctgaggagcgggcgcgcccaacgccggccgcacgggcaggcgggttcgcgcaggcccgtttccgcgagctcatgatcatgatcagcgagcggcccgccgaagtcgaggaccgggcgatacccggtcattgggaaggcgacctgatctgcagcgcggccaacaaaagcgcgatcggcacgctcgtggaacgctcgacacggttcacgatcctcctgcacctgcccgacgggcacgacgccaaacacgtccggcaggccgtcatccggaaaatgcaatacctgcccaagctcctgaggaactcgctgacctgggaccagggaagcgagctcaccctgcacaaacgcatctcgaccacgctggacatgcaggtgtatttccgcgacccgcattcaccctggcagcgcggcaccaacgagaacaccaacgggctcctgcgccaatacttccccaagggcaccgacctgagcgcataccccgaggactacctcgacgcggtcgccgaggaactcaacgaccggccccgcaaaacactcggctacaggaaaccatccgagaaaatactcgaactcatcaacacagcatgatacgatcgcaccaatccaagaccgccatcaagagcggcaaaacacacaggtgttgcaaccaccactaaaatccgccaagcccaccttgccgaatggggtgtcgaacatggaatccgtcttggggggggggcgtgcggtagtcgcattcgtaacaacaatccgcttgaatgagctgctgagcaaatagcaggtctacatgcctgctttgaaccagccgatggcgatttgagtgcgattgcgcaggcccaaagttgcgaggatacgggtcacggcacgtttgacggaggcaggttcgacggtgagttgattggcgatttcctcgttgatgagcccttcggagatgagtgcgcagatttcacgctggcgaggggtgagtgcgtcgaaagctttgcgcatttcttgctggcgctggctgctggtgggatgcggaacgcctcgtttaagcacttgtctggtgattcgtggggtgagtattgcgtcaccgttggcgatggcgtgaaccgcgtcgatgaggttgtgcttggtgacgtccttgagcaggaagccgctggctccggcgtcgagaccgccaaaggcgtaatcgtcctcgtcgtacgtggtaaggatgagaatgctgatggtgggccagcgtctggtgatgcggcgagtggcttcgatgccgtccataccgggcatccgcacatccatgaggattacattcggcaatggacgatgctgaacggcgagctgttcgagcgtctcgatggcggatcggccgtcagcggactgggcagtgacgacgatgtcggaagcatcgtcaagcatgagttggaagccaagtcgcgcgaaacgctggtcgtctacgagcattatacgaatcatgcggtgtggtccttttcgttcactccgttggacgggatggtcgcctcgacgacccattcgccgtcttcgtttggaccgtattcgaagatgccgcttgccgattcgacgcggtggaatagacggacgagcccagtaccgtcatccttgcgcgcgtccttgcgcgcgggactgccgtcattgcggataatcacggcgacggtgccgttctcgctgtggttccaggcgatgctgatatgcaccacgttctgtccgtgacgtatggcgttggtgatggcttcgcgagtcacatcgaaacacaaatcagcctgagcttcgtcatcggcgcgcgtaccagtctcggtgaacaccgtgacgatgcccagccggcgtgcgtgcgcgagaatcggccgaatgtcatcccatgaatgctggtctgattcttgggtgtgcgtatcgtcaccgttcgccgctccattgaactcggtcagtgcgcggacggctttgcgcgtgtcgcccagactctctcgtgcgatttcgttgatgccgtgcagcgcatcctccacgcgtgggtcatcggttttgccggccagaccctcagacagtgcgatgattacggtcagatcctggcccacactgtcgtgcagttgaccggctatgcgcgaacggcgtattgcggcatcgcgttggaaggccaactcggctgcccgccggcattcctcggcagctttgtgttcggcttccttggcctgttgcctgccacgtactgcaagcgcgccgcctcccacggctgccaacgttaccactcgactcacccattcggtcgcgagaacgtccggatgcaccatgatggccgacgcggtcatcgacagcatcatgccgatgcctccaacgcacagcccgcgccccctcgctgtccgggcgaacgcatagcaggcgacgagcgtctgaatcatcacgattgagtccaaccgccagtacgaggcaactattaacaataccgcttcaagcgccaaggcaacggctggcagccagtaacggacaagcagtatcgcactgctggctatggtcatcgccagcagcagagccaatcccagcggatctttggcaaacgtatacatggtgtcggccggcgctccgatcgcatgctcccacagcatcgctgcacattcgaccacggcgatgaccagtggcacggccaggaccgtgaccttattggcctgcgcggattgcggtttcatggctcccattgtggctctttttgtatgatgttgcgtgcatgtcagcatgtgcgtatcgtgtcggccacgctgcggtgtagcgcggggcgaatctgcgtgaactggatgaggaacaatgccagccagcaggccgtgcccatgccgattacgcccggccatgggatttcggccacggggatgccgacgagcgccgcggatcttgcggcgaaaacgcttgcgctgacggcgaccgggatgagcgagagaatgaccgcgccggcggccagctgcaggctctgccagagatacatgcggatcacacgacgtggggacaggccgatgctgcgcagcaatgcctggtcggcgaccatgctgcggttcgacagggcgatgaccgccatgctggtggccagggacacgatgcacagcatcgttatgagcagcagcgagtccgcgtagttcaggctcttcggatggccgcccaaggcgagtatccggccataggatcgcgcgcaggtcagcagggtgaccgacagtcccatggcaagggcgagtggggcaatcgtgttcgtgttgctggcggccttcgcctcggcggaacgggcggcgagcacgccggtcgcggacccgcacaggcgacacacgacacgtccgatgcccaacagaatcggaatcagcatgctgacaaggatgtacatgccgaacgaggcgatgatgccggcccacagcgcgctgttgaatgtctgccccgcctcctggccgaacgcgagcgcccgtggcgtgcccatgccggagaacgccaatgccagcgccgccgccatgacaatcaaaccaagtgcccagtgcgcccaagaccgccaaccgtgccgtatcccgatggctcccgtgccgcgaatcacctcgatgggacggatcttcgctgcgcgcagcgaggggatggacgcgcccaacatgcacgtggccacacccaacagcagggatccgagccacgcggccatcgacggcgtgaacgcaggaggtgcgaacgagccgaatccatcggcgaagctttccgcagccatggcgttgaactcgggaaccgccagcaggctggccggcactgcagccagagagccgatcagggaaccgaacaggctcgccacacccacgagcatccacatgctggcaagcacctgactcgggctggcgcccataagccgccattgcgcgaacgtgctgtgaatacggttgaccgtggccgagccgaccaccgtcaacgagaagaacgcgagtaatgacaccaccacatagatcgtgaccgacaccatgccgaactcggccggatcaagacccgcctgccgcgcggccaatgtgaacgacggagacgaggtccacacgaattggttcatgcatatgcccaccagcgtggtcaccactgcgaccaccagaatcgtgggtacccatcccgtgacattgtcgcggaacacacgcagcacatacctagccacgatgagcctccttccgctgctgcggatacgccacgcgctggaccggtcggcccggttggacggattggataggctgggcgttcaccatcatcgggccgacagaccgcgccgccgcaaccaacggcggcgacccggccggtacgaaagtgcggcgtatgccatcggcaatctgctcggcggtgagtctgccagcgatgtgggtgacctgaccgtcgcgcaggaagatcacgtggtcggccaaagcggcggcatccgtgtcatgcgtgaccatgaccacgctggagcccgcatccgccagctcgcgcagcacctgcagcacaagctcgctgttcgcggtgtcgagcgcgccggtcggctcgtcggcgaacaccaccgccggacgcatgagcagcgcacggcacagggcgacgcgctgctgttcgccaccggacagggcgcttaccgtcgtcttcgccctctggcgaagaccgaaccgggacagcagctgcgtgacctgcacgtagtcggccttgcgatgggcgagcgagagcggcaacatcacgttctcctcgaccgtcagatacggcacgagattgtattgctggaacacgaaaccgatatgcccgcgaatgaaccgcgaacgccgttcctcattcagtgcgtagacgtcggtaccgccgatggtcacccgcccggaatcgggcctgtccaatccggacagcacatacagcagcgaggtcttgcctgcgccggacggaccgacgatcgccgtcaagcccgctccatcgatatccaacgaaacattattgagaacagtctgcgtgtttgcgggtcgggaggcggttcgagcatcgaaccctgtccgtttcaccagtccgagcgcctgaatcggtgtgccggcattttgccaagtcatgaggtagccccctgtcgtgaaagttgacgccgtttttctcaaccttcgcgccaggggcatggcaggtcgaggtaaacacggaaagtgacaccctagggtgacagattccagtagcgttccatgaccggcacccaatatgccctcaaccagaccagcgacaacgaggacctgcccggcatcgtccaactgcccgcctatgccaagtatgatggacggctgctcgtcatacttggttcctccgggaagcgaatatccttctgtcgtttgcggaaacaagccctgccgatgcccaagaccgccagataaagcaggaacatcacgggcacgacccatgtcacgtaccgccacgggtcaatctggaacgtatcgaagacgatgaacatgacgccccacacgttgatggcgacgatcgccagaatctgggcggccgccgaatcgaacctggattcggccgggctggtatcgttcgcgtcggccggaacgtcaggcgtccgcccggcgcgacgcatgaagccgagcgccgcccacacgatggccgccaccaacgccacggccgccggcaccaccagcttccagaactccccgtcattccagccgtaccggatgacggcgcacgtgatggccgtgacggcggccacgcccaatgtggcggaagcgccgaaaaaccacagcagaccttgattccgacgcccaccatgggaggcccgcacctcatcgtccgcaaccatatcgtccccgcattccataaagtccgacgcgtacgcatgccatctcaattatggcactcaaagagtcaatcagacaacatgctgtcaagcgatcgcatgacaggaatcggctatccgtcaatgccttagggttctgtcgatgcatatccgattgaccgatgcttctacatgcgtgccggcatgtgccggtccttcgcgtccgcgtacgcattcttacatcacgacctcaaactaatctacgaaaaactttaaacagatatctatttgattttaatattatttatggtatacttaattttattaaacccgccgtgaattgaaggaggcaggtatggatacgacgatgatcccgccgtggatgtcgaacctcgatgacgaggatatgacgttcatcaaacggtttctgctcgcatcaggctccatgaaggaggtcgccgcgcagtacgacgtctcctaccccaccgttcggcttcggctcgaccggctcatccagaaaatcaagttgggcgagcagatcgagaacgagccgtatatcgcgctcatcaaacggctcgcggtcgacgacaagctcgacttcgacaccgccaaaatcctcatcagcgaatatcgcaagcagctcaagcaaggagagtaatcatgattggcgccacaagatttgccgtagtgtttttcgtgtttctcatcgccatctgcatcggcttcatcatattgcagatcaggctttcgaagatggacagcaagtggcccggtctggtattgcccgccatcacattgctgctgtcgcttgtggcggcgattaccgtcttcgccagggcggacatcggtgcgtatggcaacatgtggaacgtcgtgctttccgcattcatcgcgttcctgtccaacaacgtatccaccatcgtgctggccggcatctacttgtatcagcgtgacaagatcaatcgtcgcgccgagctggcccgtatgaacgttcaggacctgtaactcactgtgcaaaacacgcagactgaaccctacgccgcttatgccgactcatcatcttttgcgccgcttcgcgcagcttggatgattaagccggtgacgtggtcgcagggttcgtcgcgcaatcggagccggacgccctgtcatttcggctgattccgtacatcctgttccgccgcgaaccgttcggcgatttgccgtgcgtggatgttcttggcttcgttgacgaagtcggcgcatgccttgctgccgtagagcgcctcaccacacgggtcggcgaaacgcggatcgccgaccagcgcggagcgaatggccccgaacgagccggacagcggcatggcgttcatcacggtcgcggtttgattctgtgccgcccgggtgcgggcggtcttgaccagaccggtctcgtcgcagtagcgcaacgtgcgcgtcgtcacgccgctgatcaatgccgcctgatcaatgggccacaaccggcccgtatccagcggattgccctccacatcgaacgcgccggaaccgttgacggcgttcgccgtgttgtcgttctcgttcatgatcgatcatcccccttgaagccgattatcctctacccgccgtgcgtgtttcgcggcgttgccgtcaggatagacgtttacgcaacgtcaaccgcaagcgataatgggatgtatcgttcaagccaggcaatatgccgtcaagcaatcgcatgacagcaccatgttcggcacataccagatggaagaattggcaaactttaaaaaataccgcggttattgctgtgccgagaacgccaatatgaccatagacgtgctttcccgctacacgttattcacctgtcatgcgccgatatcaatcaaaagacacttgcataaccaccgctacgcatcgccaataacataccgatgagccagaatgaggcccaggccacgatgctaatccgtaaataatactggtcagagtggcaggtacattggtcctatggctaagcgcaaacatatcggcactgttgttattgcaatactggtcgctattctgctggcggtgggcgtttccggctggctattctggcagtcggtacaacgggtgatcggcgaggcgcagcaggcgggcgaatatgcggctgaagcacagcaatccgtcgggcagggcgacttcaagcaggcgcttgagcagatggacagcgctggcagtcacatcgtcacggcgcacgacgaaacccagggcgcgctatggcaggccgccgaatacgtgccatattacggttcggacgtgaaagcggtgcgcggcatgctgggcgcggccgccgacgccgcgaccaacgccctgcccaaaatcgacagtgccgcgcagggcacgttggtggacttcaatatcgaagagctgctgtccggcatgaacttctccgacggcacgctttccattcccaaaatcgcttccatcaagcaggacctgtccgacgccggtgcggtcttgaagcgcgtcaagacgtcgatttatgcgctgccgcaaccccgcacggaacagatcaccgaaatggtcaaccagggcaagcaggtagtggaccaaatcgatgagactttcgacaccttgaacaccatcgtcgaaaagattccgggctgacgttggttcgttcttgtcgtatattggcgtaacctccgcataaggctagtccatacaaatttacataaataattctttagctatgtaactataagctaaagaattatttatgttaaaatttgggataggaggtgccaatatgccgacacgcacaccaatcccggtcagtcgggcgatgcgtcagatatccgccaacctcgatttggcgcgcagacaacagcgcattcccgtagccttgctggccgagcgggctggattatccgtgccaacggtcaccaaaatgctgcgtacgggtaatggcagctttgagaacttcctccgcattgttcgtctgcttggactgctgggcggcgtacagcaagcgacggaccctcttaacacagatatcggcaaactacgcgccgacgaagacactccgaaacgtattcgatagcacagcaggaggcgcaacacatcatggaagcaatcgtcaccctgcagctcaacggcacagacgtcaccgtcgggaaattattcaccaatatcaagcgcggcatcaaatcggcaaatttcacatacgatacggcctatatgcgctcttcaaacgcagtatccctctgtccagagatgcccctctcccccggaacgttcccggccgagcataatgcgatgcatcgcatctttcaagactgcatgccggatcgttggggcaggaacctcatgcttcgtgcagaacgtcaagatgctcgttcggagcatcgcacagcacgcacactattccccatctttgagctgcgaaatttatccgtataggtcaattgcgttgtactccaatgtaatcagtcaatacacgccaagtgaaaaccattgaaaaacaatgtgacaacatcatgcgaccttagcaaaactcccctcagtcatctacggcgccagttcagccgtaatgaagacggtctggcgaccgcgctacatagctcggctgtcgcctcgccctcgcttacaaacagcttcgctgtttgcttaacggctcagcctccagaggggagccagtagacgagtagtgcgttaccgtttcacgattgagcgcttggcgaggtatggggttttgtgttgtttgcggttgcggctggcggccgacttttcgcgctcgcgtcgggctttcgcctcctcgcgggcggccatcgcacgctcctcctctagggatggcagaccggctgcggcacggcgacggttgtcctgctcgtagtcgcgcctgaccttgcgctcgcctgccgccgaaccgggcgtggggaaccatcgcaattgacagagcgtctggccgagattccacagattgttggtcaaccaatagagcagcacgccgaacggcaacgtggcgcccgacaccacgtaaatggcgggaaagacgaacacggtcatcttctgcacacggaattgcggcgagaccatagcatctttcgacgtattgcggtgaataagcatccactggatcacgaacaacgtcaggcacatcaacgccacggccacgccgatgatgatgcgtgactgcggcgaggcaaccgtgccgaacgagtcggcgatgcgtacgccgaatatggacgatgattcgatgtcgcccgccatggtgtggtcgatgccgcccaacggttccgcattcccatcggcgattgcgggcagggattgcagcgtgtagaacagcgagcacagaataggcgcttggatcagcgaagacaggcaggagccaagcggattggcgttatgtcgctgctgcaaggccatgatttcacgttgcatggcttctttggaacgcgggtccttgcgcgtggcgtacttgtgctggatgcgttgaatctgcggttggagcacctgtatccgctgcatcgcacgcatttgggaaaggaagagcggcagcagacagatgcggatgacgagcacgaggcacatgatcgcgatgccccacgcggggctggggccagcagtcatgccaaacgtgaccagggcgtggtgaaacagggtgagcagttgggcgacaacccattctaggggtcgcaggatgtggttgaggatattgatgaagttcattgggattcctgatgaattgacgaatctgggatgtgtttccgagttcaagcaactgcaatctggtacggcaacagctgggaactcccctcagtccgcttcgcggacagctcccctcagagaggggaaccaaattagggggaaacaagaacatcgcataaatgcgtatccacatgtcgcctaaacaacacaattgcgttagaccgtggggcgcaacgatgagagctgaaaagagaagctaaatcagattcgggaatcggggagcgtgtaacggggccagcgtggcatccattgcgggcgggcccatgagcggacggcgttcatcaccgtcgcatcgaagcggaagctggcgggcaacggtcggcggccggccgaacctacgaacgacaacagcacgaccgcgcagcacgcacatacagccgtcaccgtggcgacgaagaccatggcggccaaggcagtctgcgaatcaccgccggcaatccagcagccagtggcactcaacgacaacaacaacgtcatcaacacgatgatgtccgccatcggcatcggacgcgacagtacccgcccacgcgaggcagccatcgtccacgcaccgaccaaacgctgccgcaacgactccgcacaggccacgggcagaagaactggcatcatcagcagcacgcatacggcaaaccccagccgggtgccaagtgcaatgccgttcatgatgttctacccattccttctgaaccacatttccgcctggaagacggtcccagtatatacccgattcgacaccaattcggtattgtccaaaagcactgaccaattcgacgaaaatcacatctcatccaccatgacttgtagcgctgacttgtagcgctccgccactgacgtatcactgcatatcaaagtcgctcatcctcgaattactgtcctgcaacaccgaacgcgccgcgggctggaatgtattttgagtcctgagtagattaaccgttcacaagaccgatatcgcaacggcgcaacaaaggcaacagcacgcccaaaaagcccggaattccaccaatatgagatggtcgacaaaataaccaaaacgtcaacgaaaaccataggaggtcatcgaacatgtccgagaacatggaaaaacaaacaacattcgatttactgtcgggtttctggctttcggtcttctgtggagcagcggcctgtacgtggtggccaccgtgctgctccccagctgttcaaggacatcggcgtcgctaacccggatgtggcagtcggcacgttgaactcggtcaccgccatcgtgggcctggtttccaacctcgtgttcggcaacctctccgaccacacgcgttccaagatgggacgccgcaccccgtggatcatgccgagtgtcacgggcatgtacctgtacgcgggcatcgccggcttcggctatggcgtgtactcggccatcgaccaggcactcaacgtcgacgtgttgccgaacaaggaagaggctggcaaggacctcggcatcctcagcttggccaccacgctcggccaagcagtcggtcccaccatcacctccgtggtcaagaccacgaccggcacctacacgccggcgttcgccatctccatcgtcatggccgtgtgcgctgccgtgttcgtgctgcgtatccagaaggtgaagtagccgctgcgagtgcctatctccgtttcaaggggctgattttgactttgcggaacatctacttccgtttcaaggggctgatgccaaagtagccactggttaaaaacggcggaatagtgatagaacaatgccatttctatctgcgttccgccagttgaccagccccttgaaacggaagtagacctccggcaaacgccaaatcagccccttgaagctgattttgactcagcatcatgcagcgcagctatatcctcagtgcgggtatactattccgggccgtcacgacgacgcctatggaacgcacgcatggcaaagagagaaacatgagtcagcccgacaccgacacggcggcacagtcgccgtcctcgcagcaggaaccgcagattcagacggatggccgtcaaaaccagccggaacaggtgaaccaaccagcgcaaatcagccagtccgagtcgccacatgacggcaaaggcgagcacgcgctgcataccaacctgaagcgcggcatggaatcccgccacctgcagatgatctcgttgggcggcgtgatcggcaccggcctgttcctgagctccggatacaccatccagcaggcgggccccatcggcaccattctggcgtatggcatcggcgcgctgatcgtctacctggtcatgctcacgctcggcgaactgtccgtggccatgccggtgaccggctccttccatgtgtatgccgagaagttcatcggccctggcaccggcttcgtgatcgcgatccagtactggctcacatggacggtggcgctcggatccgagttcaccgccgccgggctgctcatgcagcgctggttcccgaacagtcccacatgggcgtggagcgcggcgtgcatcacactcatcttcaccctgaacgccttgtcggtgcgtttcttcgccgaggcggagttctggttcgcctccatcaaggtgttcgccatctgcgcgttcatcgtcatcggatcgctcgccatcttcggcgtcatcccggtcgccggctaccaacatgccccgatgttcggcaatctcatcaaggacggcgtcttccccaacggcttcatgccggtgttcgccacgattctgaccgtcaacttcgcgttctccggcaccgaactcatcggcgtgaccgccggtgagacgagggacccacaaaccgccgtgccgaaagccatccacaccaccctgtggcgtctggcgctgttcttcatcggctcgatcaccgtgatgtgcgcgctgatcccgtggcgccaggccggcgtgggcgaaagcccgttcgtgctcgtcttcaacagcatcggcatcccctatgcgggcgacatcatgaatttcgtggtgctgacggccgtgctttccgcctcgaattccggcctgtacgcctccacgcgcatggtgtggtcgatgggcaacgaaggcatgattccgcgctggttcgccaaaacgaaccgtcgcggcgtgccgatgctcgccttgtgcgccgcgatggccggtggcctgctggcgctcctgtcttccgtgatcgccgcctcgactgtgtacctggtgctggtggcgctttccggcctgtccgccgtggtggtgtggatcgccatcgcctactgccagatcgtgttccgtcgccgttggctggagtccggccattccaccagcgaactcaaataccgcacgcccggctatccgtacgtgtcttgggcggcgttcatcctgtgcaccgcatcgttcgtattggtgattttcgacgtggagcaacggttcgcgctcgtggccgagctcgtgttcatcgtggcctgctatggggcgtatttcctgcaacagtgggtacgcaagcgcaaaaaggcgaccgaggccgacgacctcgatacgctttgggtcgcgcgcgactgaacggctcgcgacctaccggcgcaccgctattcgcgccgtgaacgtgcactgatccaacgcaatgccagacccagcaaatccacaccgccacgattgcccatgatgtgggtttgagcgcggccggggagaacggcagcacctgcaggccaatgatgattaagccgacggccagcagcgaagctgagatgaccataccgaacttcttccagtcaaggccttcgcttgcctcttcggcactctgcggaatcgtgtcgaaaccggtgtagaagagcggcgtcatcaccagcactccgggcagaaacgacccgaccatggtaaccgcgccggacgtcgagccgatcggcagcagaaacacagcgcccagcacgaaggcgatcatcgcctcgaccgggccaccgccgacgatcatccagtcaccgaccagcagcacccatacggtgccgatgattgcgccgaatcccatggtgaagtagttccacaggctcagcgatctgaccatgccgccgtcgccgccgctgccatcggcactactgtcgccgttgccgttgttaccatcctcgcgcacaggaatagcggcactgggcaggccagtcgattccaccaaactggccgtcatcgtgcttgacgggctgaatgccgtggatgcggcgaccatgaccgagcctcctttaattcggcctgactgtgatgataacgccgttcacgatatgccgtattatgaacgcagtgagagcccgcttcaccggccctattcggctcatgaataaacttcgcctatctgcggcactgaacacatgaccataatgtgatacacgtcacttcctgaagtacgtagtcgttatggaatcacccgcacgtttcccgtatcggagctgtacgatagctgtgagacaggggggtcgtcagatttcggggggagggttccggaaacggtccgactgcaggatgcaccgggccgtgcgacacatgtcaacttgcgtattcacgccaaactcaattgagcaagccgattctcgtaaatggccagaagcggaacaacgccacaccttggatatcgtcgtatggcactagcccattgttgccgtcgtcaagatggtatcgagaatctctggaattggagcgattatcaccaagcacgaacacgttgccgtcagtaacggttacggaaaaaggactgtcgcttggattcacgccggacttaagataagcgctttcatcaatgggtttgccgttgaccgtgatgggctccccggatcccttgcaggcgacggtatcgccgggcagaccgatgacacgtttgattaggtaacgattgctgtcgattatcgacatcagattggtgggaagctgctccccctccatccagtctgcgggatctttgaacacgatgatgtcgccacggtgcagtgcaaagagtctcggagtcaatcgcgaggcaaatacgcggtcgccgatttgcaacgtgtcttccatgctacgggatggaatcacatagacgttgaacacgaaggtgcgtcccagcaacacgaccagcatcaccgcgatcaccgtcagcagatagccgcgaatttcactccaaacggagggctttcgcgcatgtctcctcgactgtccacgcgcttttttgctatgacgccccaccatcatatcctttccgaccggtaacgcaacaccatagtcctcaaaccatgccgttacctacgcccatgtttgagctcagctgtcacaccagcggttcgcgcacgtctagttcacaggcgatgccggtttccttgcgggcccattcggccgcctgcagtgcggcgatgttccataatgcgcacggcactccgccaaggtccggatgcgatgcccagaatgtgaggtcatcagcgtatgcggtgatgaccgattcttccgtgactggcatgatcgtgtggtacagacggtccgcaagcgtggccacgaattcgttggccgcggcgaacgtgtcgataagatgctgttcggcggtcaccggcgggccgaccagctcccaggattcgacgtccgtggcgctccaatgcgcggcttcgccgtccacatcgcgttgcaaagagacgaacagcctggcgaactcatccgaagtcagtcccgtaacccggcgtcgggttgacaattcaatcggagtcatcagataccgttcctttcgcttcgttcattccgttgtctcgctggtttgatttgctgccaaccggtacaaagcctatctcgcacacctcacgatagcccaaaccaccggcatggccatgattgccagccctacgaccagtgaccatgaggagccggcgattccggtcagattggtcatggcggcggagacgtcatacatgccatgagccacgatcagcggtgtaatcatgcccatacggcggtacagcagcacggcgagcactgcaatcagcacgcggtggcgtgccgccggcacaatggccctatcgagcatcgccacatgattcgtgcggtccacaatcgaggcagcatcggtttccattcggttcatgcggccagactatcgcccgttcttgccgattgcctgtaagcaggttcggatagactggcgcgagaacaatgcgagaaagaggcaagaatgacccggaaacggtcacaacagcacgacgcacaacgcaaaccgtcctggcgcgtacgctggaagaccatgagccgagccgtagacatggaaatccgcgaacacaaaagctcattcgcggtctatgtggtgctgcgcatgctggtgctcgccatggcaatactccagttctttaacggcgactacgaaaatgtgttcctgtgcatcctgacgttgctgttgctgttggcgccggcgttcatccaggtgcagttccgcatcgagctgccttcggtgctggaagtcatcgtgctggtgttcgtgttctcgtccgagattcttggcgagatcagttcgttctatgagatcttcccgttctgggacacggtgttgcacacgatgaacggcttcctcgccgcggcgatcggcttctcgctggtcgacctgctcaaccggtccgaccgggtgaagttcgagctttcgcccctgtatctggcgatcgtctccttctgcttctccatgaccatcggcgtgatctgggagttcttcgaattcggcatggaccagttgttcggattcgacatgcagaaagacgccatcgtgcattccatcagctcggtgatgctcgaccccacgcacaccaaccatgcgattcgcatcaacgacatcacccaggtcacggtcaatggccaagacttgggcctcggcggctacctcgacatcggtctgatcgacacgatggaggatcttatcgtcaacttcatcggcgcggtcgtgttctccgtgttcggcttcctgtacgtgaagaaccgcggcaagaaaaactccatcatcagtcggttcgtgccgcgccgcaagtccgccgaccgcgattatctgcgactggtgatcgatggcgggagcgcggctgatgccaaggccaaagccggcggtgccaacgctgacgatagtgctaacgccagtgcggccggcaccgattcagctgatgcagccggagccaaagccggcaatgccgacgccgctccgaccgtcaccgccaagccctgagtacgctctacagcactttcgaagcgtcgaaacggtagtgcccggtgaccgtcatgtgcttcttgaaggcgaagtagtcgttttcgcgctgccgctgcgccatgttgtgaatcacgtacggtgcacgccccgcgatcggccggcggatagccgccctgatagtagccggaatcgtaagccggatggttttcggcgtccttgcgcgcacccgccacgatatccgcgtaatcgtccacaccattgtcattgaaatcgaccgaactggcgactctcgaatacttgcggtccgcctcgccgtgtgattcgatgattcatgaacgtattcgggtcacactgtgatcgtccgacccgccgctcgcgcctcccaatccgcccggtgcttgaacttgtggggctttggcggtatcgcgaccgcagcatcgccatgctcatctccagccatcagctcaacgaattgcaggagttgtgcgggcgattcctgttcatcaaaggcggccggcttgcggacgaattcgccggcgaacagaagcggatcacggttatcgagcttggccggccgctcggtgtcgcgaaacgtgcggcggtcgcggctttggatccggccgccgtcattcatactgattctgccggccgtgaacctgttcaactccgatttcatgaaagtcagcggaaagaccggtccggtgagtgtgctggatttcctcgctggcgagttcgtcgtacagaacatgctgatgctgccgatggtggtcatggcctatctggtggctggtgccatctatacgcccgtggcctccggccgcatgttcctgtacaaggatctggaccgcgccacgatcatcaatgcgaaaatccttgccctgtttggtatctacgccgtgtacgtggcattgcagacggtggtgacggtcgctctctacatcctgtacatcgcgcgcttcgactacgcttccggcacactgctgccggccgcaggtgcggacatcgcttcggatgtggcctccatcgccggcatcctgtgcgccggtgtggtgactatactggtggtggccgcccttgccacccggttctcgaccggcagtacgaaagcgcggaccacaccgtgcacctcgatgtgaaggtggacgaggatacggtgtggcttaacagaaagcaattggcattgctgtttggccgcgatatcaaaacaatcggcaagcatgtcggcaatgcattgagggaagagctcaatggattttcagttgtcgcagaatttgcgacaactgcatctgacggtaagacataccaagtcgagcattacaacttggatatgatcctgtcggtcggataccgcgtcaaatccaaggaaggcatctaatttccggcgatgggccaactcagttctgaagcagcatctcgttgatggttacaccatcaatcacaagcggcttgacgcacttcacgccgtcgtcaaggtgctatcgaggcccaccgaaccggaaattgctggcaccgcagagatcttggaacgatatttgccgagtcttgtgctgcttaacgactatgacacaggcaatgtccctatacccaagggcgacgagtcccagtgggtcttgacctatgaggacgcgatgctgttcatccggtcgatgccgttctacacgcaatccgatctgttcgggaggaaacgcaacggttcgttccaaggaatcgtcgcaggactctaccagacgttcggaggcgaagaactgtaccgttccacccaggagaaagccgcgaacctgctgtatcaagttgtcaaggatcacccgttctccgacggcaataaacgttgtgccgccgcactgttcgtgtatttcctgaacggcaacagtatactgggcgacgatgactcccctgcttgtggagggtaacgccttggcggcgatgacgctgatgattgcgctgtccgcacctgcggggaaggacacgatgatcgccttggtcgagaacttccttatacggcatgaatcgcaggagatcaattgagagaccgtcaatgaagggtgcacatcaatcacgttctagcattgcgcgactatctgtacgagtcgtctgaacgatctgctgggagtgctcttcgcggaaaaccaacagcagaccggaggccgcatccactatgtgttgttcaacccttgggccgtgcgcagcaatgaggcattgaacagtttcgattcgccactgatgaagctgctggcgcgtgccatttacgccattgtgggcgtcagcgtcgaggaggcgattgcccccatcacccacttgatcgacaacccgccgcacaccgcgctgtcagcgttcatcaagaccaaacccgtcgatctcactatgaacaccttcgacaggggcaaggcggtccggttggacgatatcaccaaaagctgctgaatcgctagctgtcatagcacaaggccttagacagaacacccagaaatcgaacgggtagatggatcgcgtctccccttgacttccggcaagcgcacgccaatcatggggcgtatgggtattgcaatcaaacgtatatatgaagagccgactgcgtcggacgggtatcgggtgctggtggatcgcctgtggcctcgcggcatgacgaaagagcgtgcggcgttggacctgtggctgaaggacgtcgctccctctcccctcctgcgcaaatggttcggccatgaccccgccaaattcgcggaattccgcatgcgttacatcgccgagctcgacgccaatgccgccgtggacaatctgcgccacatctgcgcggagcatcccgacgtgaccctgctctatgccgccaaggacccgcatatcaatcacgccctcgtactgcgcgattatcttaactgaatattgactcaggacgaccgtcgtttcagtccatctgctagattctcgccgattttcgtatctttgaatcgaagtgcacagtcgtcactccttggattgccaagtaaagggatgcctccaaaccaaatcaatccgtcatcgattatggcaaaatcggaacacgattcgacggtccggacaatgcacccaatagcacgcagccgattaatattccgttctattcgtgttctggttgccaccgcagcagtcgccggcaaacggacataaacttcgatgagcgctttcctgtcggccagtcggagcaattcatcgtcaattgcgctgagtccctgttgtgatacatattcagccgagataatcagggaacgtgcgcaaccggcaatatccttgcggagtatctctgcataattcgtggctgtaacgatgctgccttcgaataatccgtcagaccgggtgtcgagcaacgcatccgcagcatcttcgccctgcgtcgcggccgtcatgcaagcgcgcaacgcttccgcctttgcactgagcatgtccattttgtcagtatggtcaggatttaccgaatatccttgatttgcgtatgccttcagccgttttcgatacatgacagcggataaaggcacggtcacgtcgatgtaatcatagacacgaacctcggtcttgccatcattctcgcgatgaagtcgccctacatattgcgagagagtaccctcaaacgagaccggagcggcaagcagaagcgtgtcgaaacgcttctgatcgaatccttctccgatatagctacccgtagccactacagtcaggctctcattattcggcaccaaggatagatcatgcatttttttggttattcgctgtttgcggtggggcgggcatgggttagtgtttcgggttcgatttcctgtcagaaaaaataatcgagtgcgggattacggccggtaaggctcctgctgtggatgcggatgcgcgtcagccttacggtgatgctttcccaaaacgcggattgtacgaggtgtgggacggcacgcggattcggccgttttccgcccgccgtcccacagcgctcgctatgaacggttgtgcataatcatggagctgcagcgagaatcggcgttattccgcggtttctacagtcgtcggtgtgggacgctacggacgttaaacggttgacttgtctgccatcccgcgctcttgagggacggcgcggacgacaaacgattgactcgtctgccgtcccacagatattgggatgtgtgcggctgcctgctgcctatagcgggtgtcggtcaccccccaccgatcgccccccaccggtcaccaccctgcttggcggaaatacgcaactcgactttctgtaggcatcatggcggcatggcgacggcggacagtcgaagagacccccatgatgcctcaacagccatcgcccacacacatcacagctatcaaccgcaaatatcaagaggccgaaaatctatgagacaagcaaccccggaaagcctcagaccctacaaatggctttattgcaagggtatatgccggttcaaactccactaatagaacaaatagaacagccggcttaggtacggcgcggcaaatggcgcaaaccggccgcgatagtagtagcgtggtgcataccagtacaaccatgcgaggagaacagccatgatcaatgaggaatacaaggccatgcttggcggcaagtccgtgattcgcgagctgagcgagtatgccacgagccgcggtgccgaaatcggctaccagaacgtgttcgattacagcctgggcaatccctcggtgccggctccgaaatccttcaccgacgccatggtcgacctctacgaaaacggcgatccggtggccatccacggctactccccctcgctcggcatcccgtccgtcaaggatgcgatcgccgaaaacctcaacgaacgtttcggcatggcatacaccggcaaccatatcttcccgaccacgggcgcggcgggcgcgctgtcccacgcgatgcgcgcggtgaccaagccgggcgacgagatcatcaccttcgccccctacttccccgaataccagccgtacgtcaagggcaccggcgccaagctgaccatcgtgccggccgacaccgagaacttccagatcaacttcgaggcgttcgaggccgcgctcaacccgaacgtgcaggccgcgctcatcaacaccccgaacaacccgtccggcgcggtgtattcggcggacacgctcaagcgtctggccgcgatcctgaccgccaagcaggccgagtacggccacgacatcttcctgatcagcgacgaaccttaccgcgaaatcgtgttcgacggagccacccagccctacccggccagcttctatgcgaactcgctgacctgctactcgtggtcgaagtcgctgagcctgccgggcgaacgcatcggctacgtcgcggtgaaccccgcagccaccgacgccgacctgctcgtgccgatgatgggccaaatctcgcgcggcaccggccacaactgcccgccgagctcgatccagttgggcgtagccaaagtcatcgaccagaccgccgacctcaacgtctacgagacgaacatgaacctgctctacgatgcgctcaccggcatcggcttcgacgtggtgcgccccggcggcacgttctacatcttccccaaggcgttagaggacgacgccgtggcgttctgcatgaaggccaaggaatacgacctgatcctcgtgccgtccgacagcttcggcgtgcccggatacttccgcatggcctactgcatcgacaccgagaaagtcaagcgttcgatccccgtgctcgaaaagttcgcccacgaggtgtacggcctgtaaacacgggccgcaagtaacaaacacaagaaaggggttgccatggaatacaccgaagacgccgatcatcgcgaactgctgctgcacagcgcctatgactccgatacggtccgggccatggagcgacccctgctggacaaaggcgtgccgctgatgcgcatggccgcccaggccgcggcccacatggcggccggcatgctggacgacgaggatctggcgctggaggacacgtcgatcgtgctgctggccggggccggagacaatggtggcgatggtctgttcgcggccgccgcgctggcccaggagggcgcgaacgtcactgccatcgccgtgggccggtcgctgcatgaggccggattcgccgcgctcgtgcgcgccggcggcaaggtgctggtgcttgacccggcagccgatattcccggttgcgcgtccgggttttccgccggtgaggccggcgagcgattgcagaccgccatcgccgtggccaggaaatcgcatctgatcatcgacgcgatgaccggcatcggcattcaaggctcgctacgcggcattcccgccgcgctcgcctccgcccttggtctcgacggcgagtctcccgatgagcccgccctgccgaaccatgagtcgtcaggcgattttccgctggtacttgctgtggatacgccatccggcgtcggtgtgaacgatggttctctgcccggcccgtacattccggccacggtcacggtcacgttcggcgcgatgaagccgtgcgcggtgctgccgcccgccacgttcgcctgcggccgtatcgagttgttcgatttcggattcgatatcgacgacaaggatccggacgtcgaggtggtggataattcgttcgcgtccgacgcggtccgtctcccccggttcgaggattccaaatattcccggggcgtggttggtctggtgaccggctcgcagcgctaccccggtgccgccgtgctcaccaccagcgccgccgcccgcgcgaacaccggcatggtccggtatctgggcccggagcgcgcgcagaacatggtgctcaccgcactgccggaagccgtgatcggcaagggacatgtgcagtcctgggtcgtggggtccggcgtgcccgaggctagcgtcgagggcgccgacggcgatatgcagcgggacaccatcgccgcattgctcaagcattacgcgctcggcagcgaggatgagaacaaggacgcctacgacatgccgccaatcgtggtggatgccggcgcactcgacctgctgccggagcgtgtgcccggccaggtggtgatcacgccacatgccggcgagatggcgaaactgctcaaccggttcgaaaccaccgccagcaccgcggagcatgccgattcgcacgagccgtacaccgccgacgacgtgcggctgaacccgttggccagcgcgaagcgcgcccacgagctcaccggtgccaccgtattgctgaagggcgcggtgaccatcgtggtggatgaggaccatgtctatgcgtcgggcagtgcgccggcctggctgggcaccgccggcgcgggcgacgtactggccggtctgaccggcgccctactcgcccagcaggatgacgtggccaccacgggcgagaccgtggcctcggccgcctacctgcatggcctggcggcggcgatcgcctccgaatccgagcagcagggctggcaggagccggaactgatcggccgcgagcatcgccagcgcttcatgacgctcggccacccaatcgtggccggcgacgtgatccacgccatccccgaagccatcgccgacgtcatcgcataaccttgttgacctccctctgacgagggaggtgtctcgcaaagccgagacggagggagagaaacataagcctcaaactccacataccccgacctatacacaaaccccgtacactaaatcgcagaccccacccaacgacccaaacacacaaggaaccatcatggccaactcccccatcaccgacgtgattttcgacttctgcggcgtgctgctggactggaacacccgcgcatgccttgaaggccgattccccgatgaaatcgtggaacgcatctgcgccgacgacgacccctgcggcttcttccactacgaggaccgcatggacgccggcgaggatttcgcggacatctacccggatgtggtacgcgaacaaggccaggaactcgccgacatcttcaagttctacatcggccactacgcggacgcgctgccccgcacgctgccgggcatggtcgaactgctggcggatttgaaggcccacggctacggcgtatggggtctgaccaactggtcgcatgagaccttccacctggccttcgagaagtacccgcgcctcgaacagctgctgcagggcaccgtggtctccggcgtggagaagatgcacaagccgaacgccgacatctacgagctggtcctgacccgcttcggtctcacggccgagcgctgcgtgttcttcgacgacaccgccaagaacatcgtcggcgccaacgaggtcggcatccacagcatcctcttcgagaacgcgtcgcaggcgcgcgaatcgctcgccgaactcggcgtacgcctgtaagtcgccaaatattgcgtcgcggcagttgaagtctatggacccgtccttgacgacggtgaccggccgtttggcgaccggcatgtcgcactgttcggtgagcacttcaacgacgcggcacgcggcaccatgcgcagaatcatcatgaaggcgttctggatgttcatcacgtcggcgccgagcctggtcatcaggctcggcgtggagaagcggtcgatgctggagaaggagaaggtctggatggcatcgtactggtcctgcctcaggttaccaatgtggcgcatatcccgttacacagcgtccgcgatatgcgaggcatctcatattgtgtcgccatagtggattgatgaggttataaacccgtgtggcgaccatccctagcgatataaatagactttatgacactgctgcagctgaaatacatcgtcaagatcgtcgagtgcggctcgatgaacgaggcctcccatgccctgtacgtctcccagccggccctgagctcgtcggtcaaggaattggagaacgagctgggcatcgagattttcacccgctcctcgcagggcatcgccctgaccgtggacggcgcggaattcctgacctacgcccgccaggtgctcgaccaggccgacctgctcgaagagcgttacaagcatgccaagccgcgcaagcagctgtgccaggtctccacccagcactacatgttcgccgtcgaggctttcgtggagatgatcaactccattaagtccgacgaatacgagttcacgatccgtgagacccgtacacgtgacatcatcaaccaggtggcgaacatgcagtccgagatcggcatcatctatctgtccgacttcaataaggacgtgatcggcaaactcctgcgcgagaaacaccttgaattccatccgctcttccgcgcccccctgcacgtgttcatctcacgggacaacccattggccgccaaaaagatcatcaccatggaggatctgaagccctatccgttcatccagtacgaacagggcgaggaaggctcgttctacttctatgaggaggcggtctggccggaatactcccccaagcagatcaacgtgaccgaccgcgccacgattctgaacttcatcatcggcctcaacggctacacggtgtgcaccggcatcgacaacggcgacctcaacaatgagaagatcgtcaccgtgccgctcgacaccgacgaaacgatgctggtcggctggatcacgaacgagcgttccaagctatccaaggccgccgaaacctacctcaccaagctcaagtccgtagtcgccgatcacggctacaagctcattgattaggagtaagtaaaacagtcatggtcagcagtgagatatactgcgattaagccaaccccgctggggaaatggaagtaagagccggcccctgagtatctcaggggccggctcttgcgctattgagactgactggcaaaaccagtttgatggcctccggctacttggccgagattaccgacgtggcggctgtcgcggcaaatcccttaagcacctcaatcatcacgtcacggtcttcaacatcaatgctgcgggccgcggcgagcataatcggcagtgactgtgtcaaatgcgaagtgagttcgccgaacgtgacgtacccgccagcctcgaagatggcaaacaggttttcgatgaacttgcggcgatgctcgtcgtcgtattttgccatccatccgttgatcgtgcgtgccaggtatcgcgcgctacttgtcagtccatcagcctgtacgaattggccatgatcgacttgccagtgcaatgcgaaatgctgcatgatgctggcaccgtcgctgctgaccaccgtatagccgtcttccacatgctcacgagtctcaaacagcatgccgatgatcgacgatcccggtaccgatttatggattttcggcgcaatgcgcgcgtacccatcctcatcgaagaacgcctcatcgaagcctggaccatcgtgcgaatacacggccgtgatacgtccctgaatttcgccgggcacattggccgccgcgtataccgccagattgccgcctttggaatggccgccgaccataatcggcccggccca

SEQ ID NO: 2589 - DNA, 27514 bp, Unknown
  R222_15m  MAG No. k141_5057
cagggttggtctgcacgccaccgagcgccaccacgtgggctacggtgcggatgccgaacgcctgatccaggaactgcttggccacctcgcccaaggccacacgggaggcggtctcacgggcgctggagcgctccagtaccgggcgggcgtcgtcaaaaccatacttgcgcatgccggtcagatcggcgtggcccgggcgcgggcggctcagcggcgcattgcggccttcgcgcggcaggtcatggtcgagtgcatcggcgctcatgacctcggtccacttcggccattcggtgttggcgatttcgatggccaccggcgagccgagggtcagaccgtggcgtacaccggtcagcagacggaccttgtcttgctcgaacttcatgcgggccccacggccatatccaagtcgacggcgtgccagtgcggaaacgatatcgtccgtgctaatacgcacgccggccggcaacccttcaatcatggccaccaatgcttctccgtgcgactcccctgccgtctgccaacgcagcataacttccctcgtttcatgtgtgtacgtctatgtgtacgtctaactaggggttaatgttaagccatgccatacctgttcacgctacccggtctgctatgtgggcttgcactgtccattgaggatgttcgtcatcggcgggtgccgatcgcatgggtggccgtgggcgcgttaatccagttggccgccgatttcgcgcatggagtggtggcgaacgacctgttcgtgctgttgcaggcgctgttgttcaccgtgctatgttgcctgatccagttcgcgttggcgttgctggtgccgcggtcattgggattcggcgatgtgaccgccttgatacctatgggattgtctgtcggactgtttggcctgttgcctgtggtggtctggtggctggcgatgggcgttgccggcatcacatggattgccctgtggacgcgattcgacccacaacgcacatcaccggcacatgcgggcaaggtgccgtatgtgccggtgatattggtgggcgcgattgtggcggtggttgttggggcttaatcccgtatcactcccctcagtccgctttgcggacagctcccctcggcgagggaagctaacgggatgactactggttttcggcttgccacttgcgtagttcggccacattctggtcatgttcatcggcggttacggcgaacttggtttcgccggtgtccagattgaccgtgcagaagtacagccaattgccgctttcggggtgcagtgccgcttgaatggcgctatcgccgggattgctgatcggcgtaggcggcaggccggagatcttgtacgtgttgtacgggttggactcgtcttgggtcatctcggtggtcacctgcgcgggcttgacgttattgccataggccacggtggaatccatgcccaacgacatgccctgctccaaacggttctcgatgactcgcgtcactttgccgtagtaatcggctttgttgacctcggcctcggcgatagaggcgatgatcatcacccgttcgcggtcactgccggtcggcacgcccaattcatccaacttggcgatacgcttatcgaccatggccttgaggatttccgaagcgctcttcatgctcttgacgttgtaggttcccggctccagccatccctcaaagctaccgcccgcttcattgggcagaatatccttacccttgttcttgataatcgtgtcgaattcgctttgggcaacgccggaaagcttcgcggcgtcggcgaacacatcggtagcacgttcaccgggatgaacctcaaggaagcccgccgcctggttggtgtcggagagaacggcgatcacatcggatgcggccatatgcttcttcaatgtgaacgttcccggatagagtgtcgcgctattggcgttgaccacgctggtgaacgcggcagtggacttgatgacttcggccttgagcagattatcggcgatctccgccgcgccttggccctcgctcacggtgaattcgacctcgccatagcccggtccccgatagtccgcgatggccgtcgactggttgctccggctgtcgcgccatgcgatgagcttggttacgccgaaatagccgccgccgataagcagggcgacgatggcgatagcgatgataatgccactgacgcgcttgcgcttgcgctgtgcacgtcgcttgcgcatctccttgcgggatttcggcggttctggcggctcagtcccgcgcattggttctgacccctgttcgacccaatgcgtgttgtcatcaaagaactcgttaaaatcatcggtcataaccgatacctcactgctcccgggtacggtcgagtgccgtctgcaaaatcaccactgccgactgctggtcaaccaccggcctgtgcttgttcgaagctttatgggcctcgaacagttgacgatgcgcactgactgttgtcaatctctcatctatcaatgacacctgcggaatctgatactccgtagaatcactgtcttcactctctgcttgcagcctcttctccagattggccgcccacctgcgcgcttttttggcgcttttgccttctgtaccgtccatctgcaggggcagtccgacgattacatggtccacatgttcgtcttcgatgacgttcaggacctcgtcaatagcaaagaaatagtcgccggcaacatgaatgttgccagcagggtgtgcaaaggtaagctccgggtcggacagtgccagtccgacccgggcattacccaaatcaacgcctaaccacaccactggcggaatcaggctttctgcgcctcgtgctcgagcgcttcgagggcctcgtcgatcttggaggcatcgacaccgccaccctgggcgaagtccggcttgccgccgccaccgccgccgaggaccttggctgcgccacgcaccagatcaccggccttgatgccgaccttgcgggcggcctcgttggtggccacggcgaccatcggcttgtcatcctcgttcacgccggcgagggccaccaccacgggggcgtcttcaccgagctgggcgcgcacgtcgagtacggtcttgcgcagggcgtcgaccgcgccgaagtggcccacgttcttgacggccaccttgaccggggccgcggagttcttggtgtcagcaaccaacgccggaaccgaggcggccagctgggactcgtacatggaggccaagcgacgatcggattccttgagcttggcgagcagggcgttcacacgctcggcgagctcgtccgggcgagcgttgagcttatcggacagctgggagaccagcgcgtgctcacgagcgttgaagtcataggcaccctggcccacgacggcgtcgacacgacgcacgccggagccgatggaggcttcggacaggatgttgaccatgccgatcttgccgacgtggtccacgtgggtaccaccacacagctcgcggctccagccgtcttcgccgatggagaccacgcgtacgatgtcgccgtacttctcgccgaacaggtgcatggcaccgagggcgatggcgtcgtcgaacttcatttccttggtggtcacggcgaggttgtcgcgcagcttgtcgttgacgcgctcctcgactgcggagatcacggacttggccggggccttggaccactggaagtcgaagcgcagacggttcggggcgtcctcggagccgcgctgggtggcctgcgggccgagctcctcacgcagcgccttgtgcaccatgtgcgtggcggtgtgcgagcgggcgatggcgccacggcgggccaggtcgatgttggcgttgacttcggcgccgacgaccagcgtgccttcggtcagacggcactggtggacgatgaggtccttgatgggcttctgcacgtcgtcgacttcgagcactgcaccgtcgtcggacaggatctcgccctgatcggcaagctggccgccggcctccgcatagaacggggtacggtcgagaatgacttcgacgttggccgggccggtgacggcgggcacggagcccttgccttcctgcatgatgccgatgaccttggcacgggcggacatgtccgtgtagccgaggaagtcgatcggcttggcgagcgtcttcttgaagtcgtcatagaccgacaggtccacgttgtgacgcttcttgagggcgtcggcgcgggcacgggacttctgctcggccataagctcgcggaacttggcctcgtccaccttcacgccctgatcggcggccatttcgagggtcagctcaatcgggaagccgtaagtgtcgtgcagagtgaacgcatcagagccggagaccaccgggtcggcggtcttcttggccttcttgacagccacgtcgagaatctcgatgccgttctccagcgtacgacggaacgcatcttcctcgccgtaggccgcttcggagacatcgtggaaggtgtcgttaagctccgggtagctggcgaccatggcctccttggagacaggcagcagctcgggaatcaccggatcggtcacaccgagtacacgcatggcctgcacggtgcgacgcagcaggcgacgcagcacgtagccgcggccgacgttggacgggcgcacgccatcggacataatcatcagcgcggaacgcacgtggtcggccacgacacggaacttgacatccgcggcctcgtcctcgccgtacttgcggccggacatgcgctcggcggcctcgatgaccgggaagacctcgtcggtctcatagatgttctgtttgccctgcatcaggtaggccagacgttccagaccggcgccggtatcgatgttcttctgggccagctcgccgacgatatgcaggtcggtcttggacttgacattgtcgacctcgtagttctcgaacacgaggtcccagatctcgatgaagcgcgtctcatcggccgcgggaccgccatcacgaccgtattcggggccgcggtccacgtagatctcggagcaggggccgccagggccagggccaccggtggtccagaagttgtcttccatgccgaaaatctgcatgtgctcgggatcgaagccctcgttcttccagatggaacgggcctcttcatcgtcggtaaaggtggtgacccacagcttttccgggtcaaagccgtaaccgccctcgctctgcggggtggtcagcagctcccaggcgtagtggatggcctcttccttgaagtagtcgccgatggagaagttgccaagcatctggaagaaggtgccatggcgggtggtcttgccgacctcatcgatatccagcgtacgcacgcacttctggttcgatgtcatgcggcgcttcggcggggtctgctcaccaagaaggtagggaatgaacggcaccatgccggcgatggtgaacagcgtggtggggttcggggaaatcagggatgccgaaggcatgacgagatgatcatgtttggcaaagtaatcgaggtatcgctttgcgatgtccgcagtgcgcatgagcggatgaactccttgtttgggtaatgggcgcagtcgcgcctggtattggtggaaaaagactggattatgaggactagtttgttctagctggttcagtgactagatggcaaggcggcatgcgcgtgtcagttggcgcgctcgatgtactgacggttgagctcagcctcgcgggctcgacgggtggcattgaactcgttgaccaacccttcgagtgttttcatcggcacattgtcctgatcggggccaagcaggaactggcgtgccgcatcaggcgtattggccttgacataggcctgtgccttggtgacggcaacgattccgatggccacgccgacgccgacccagaagatgcgtttgaacatcactcccccttctcggcggtgtcgttgacggtggttttcgcggcgttcttcgcaaggaaggactgccccgtagttttcagcgcgtagaaggtggaagcaatcttgatgatgggcttaccgaggaaggagccatacaaatcggtcaacgcaccaacgttgttggcggtggtggaagccgcggcggaaatcttgttcacgtcttcaagcgacttgttgacctgcttgacggtggtcacgccttcgtccagcgcggggatggcgtgttcaccggactcccggaccgtctgcgatatctgatcaaacatcttgcccagcctgatcagcggatagatcatgaaaccggccaatactgcgaacgcgatggccgcgatcaggccagcgatctctccgacttccattgttgcctccttgaggtcacacttactcggataagggtagcactccttccctatttcttggcataccattgcacgcgcagggcgaaaaccgtgcgcgtggatgcatgcggctataggcgaaaggtgtcctgctgacgctttcgtttgcggcgtgccgccgtggaccgtacgtgctattcgatatgtattgcttgctatttgctacttgccgtacgaaacgatggtcacggcctcgccgaacggcttgtcggtgtcgaagtcgagcacggttaccgaaccattggccgggcgttcgttcagatcgaggtcagggccgccgaaccggtggccgaggctaagcagtgtgttgccatgcgaaatctgcagcacatcgtcgccatccttgagattcgggttgtcggcgataagacggaacgcgccttcgacgcgcgtccaatattcctcatcggattccgcatcgtggaagggatcggcttccttgagaaaatcacgcgaggcccccaacccgaacttctcgacgatttggttgtaggttttggcgccgtgaggcgctcccgcggcgtaccaggccatggccatgtcaagtccctcgtagtagccgtagaactgctcgcggaagtgcatgtccgtcacgagtgcggggcgcgggttacccgcggcttcgttgatgtcgagaattttctcggccgtctgccgggcacgcgtggtgtccgaacagtaggcggcggtgaacgtcaatcctttcagtcgctcaccggccttgacggcatcagcgacgcccgactcggtcagcggcgaattcgaccatccctgcagacggttgtatcggttgaaataggtctgtccgtgacggaccaaatgcagatgaagaatcatggttccgattatgtcaccattccggcggtttcggtgcgggctgccggaagtcataagtcataacggcataggtcactacctgagatatgcgtaatccgggtagtatacctgacgattcctgagagtacacttagggtactatgagcataacctcgaaacctgcaccatctcaatcgtctgagcctgcccatttcaggggtatcgatggactgcgcgctctggcgattcttggagtcatagcattccacacccgcccgtcgctattgcagggcggattcattggcgtgacgatgtttttcgttatcaccggttttcttgccacacgttcagtactgaacatggtggaccgcaccgggtcctttggatatggccgatatctgatccgccgcattactcgtttatggccggtgatgctggcgaccattgccgtggtgccttggctcacttggatgttcgctcccagcctgttgcagaaagtggtttccgattcgctgccgagcgccttgttcgccagcaattgggtgtacatcttccgcaaggtgccgtatttcgaggcggccggattgccttctcctctgacccatctgtggttcttgggcgtgacgatgcagttctatctgatttggccgttgctgatggtggtgctcggcaaaatcaccaagtccaaatgggtgcgctccatggcgattcttgtcatcatggctgcttccaccgccgccatggtgctgctgtttgacccggccaatacctcccgcgtgtattacggtaccgatactcgtctcgccgagctggccgccggcgcgctgttggctatctggattgcgccttcctcgcgaggtacggaagttgcggaagctggagcggcttcgcaaacagtgcagatcggacgtcaggccggcgacaagacgggcgcccgtctcactatcgtctgcaatgttcttggcaccgcggctttggcggcactgctggccggattctggttcgccaacgggtatctgtcgtacatgtaccaaggcgggtacctgattaccgcgttcatatcgttgtgcgccttggcctgtgccgtgaacaatgactcaatctggtcgcgcgtgctgggttgcgctcccctacgctatatcgggtcgcgatcgttctcgctgtacgtcatgcattatccgctgctgcagttcatgaacccggcgacacgaacgcaggcgttgccgtggtggggttgggttcttgaggccatcgtggtgttggcggcgtcggaagccttctaccagctggtcgaggcggcccgtaaatcggtgcagatgcctcgcagccaacatgccaagccgctgccgaaagccggctaccagctgcgcccgggcgcgtgggtcatgtcggttatcggattggtgaccgttgtggtgctgacgtgggcaccggtggattggaatggcatcgctcaagcgcgagccattcagctgcgccccgaactcgcggcacccgccaagccggtcaagaaaccggcgaaacccgagcccgagtcttctgccacgaatgccgcgaacggcgaaaccaataccgctgacgcgaataagaacggttcggattctcagccgcccaccatcaaaccgattgcggaaaaggtgccaaacaatcttgacatttcgaagtacgcctatgatccggcaacggaaagctgcaacgcggatatgatgatggtcggcgattcagtgacgtcgggtacttcggacgccatccaggccgcattcccgaacgcttttatcgatggcctgccgaaccgtcagatgccgcaggcggtggatgtgtatcagcaggacaccgctgccggccacagtggcagtgtggtggtgtttggcctcggcacgaacggcgtgatttcgaatgagcaggaagtgcaacagctcattgacctgaccggcggcaagccgacatacttcatcaccatccgtatgccatacccgtggcaggagaacaacaacaatacgatgctgcgtgaggccgccaagaagaacaagaacgtgggcatcatcgattggcatgggtatagcgaaggtcatagcgaatacctcaacgatgacggcattcatccgaatatgaccggtgcctatgcgtacgcgacgatgattcgtcaggcggtgtgcggccagtaatcgccctacaacgctcgaaccccgcggcttctcgaaagaagcgcggggttcgagcggtatgtcctggatttgttgaccagagggcccggatcagcgggcgtagaattcgaccacgtactggatgttgacctgcaccgggatctcttcgacctccggcttacgggtcacagtggccttcagggacggcaggttcacgtcgaggtagccggggaccgcaggcagcacgtcacggtgcacgccttcggcggcgatctggaacggaaccatggtctggctcttggccttcacctgaatggtctggccgggcttgacgcggtaggacgggcgatccacgatgttgccgtcaacgaggatgtgacggtgcaccacgaactgacgggcctgggcggtggtgcgggcgaagccggcacgcagcaccaggttgtcgagacgggtctcgaggtcggtcagcatggcgttaccggtctggccggcagtacgggtggccttctcgtaagcggcgcgaagctgcttctcggagatgccgtactgagcgcgcagacgctgcttttcgcgcatacgcaccgcgtaatcggactcggtacggcggcggtcacggccgtgctcgccaggagcgtacggacgcttttcgaagatgcgctgagccttgggggtcagtgcgatgccgagggcgcgagacagacgcacctgacggcgagaacgctgaacgttcgtcattggattaatccttctgtcgttatctgaacggaacgcttgccttgcatatgcctggcaagcgctgagccgggcctccccagcgcttcgtcgtgaacgaacacgaacgggttggttttcttgcgatcacctaccgccgacccgctgatgggctatgactccagacggtatctacctgttggcagacaccagcagaccatattacaccgaggctatggacagcactccggcgtccatgcgatacacccggtctgcgtattcgagtgcatcgggatcatgggtgaccatgagaatcgccgtgccgttgttggcttggtctctgagcagacgcattacgatgtcggtgctctcctggtcgaggtcgccggtcggctcgtcggcgatgagcaggctcggctggttcatcagcgcgcgggcgatggagacgcgccgcatttcaccgccggacagctcgcgcgggtagctgtctgccagatcggcgacaccaagctgggtgagcagcatgcgagctcgggtggcgaacaggtccggacggctcgcagccgtgtttgacggcgtgttttcccggtctgtgattggcgcaatgacatccggcatgaacaggtcggcggctgcttcatcattggtggcagcggcttgtgccacggcatcggtcgacgcaacagcgtccacctgagcaacggcatccgttgcttctgcgttttgggcgaacggcagcggctccggaaacatcgttgcgggcagaatcacgttgtcgagcacggtcaggttgccgagcagggtctggctttgggtcacgaatccgatggtgcgattcctcagcacggacagtgctttatcgcccaagtcggccacattgcgtccagccacgctcacggttcccgaagtcgggcgaatcagcccggcgaccatgttgatcagcgtgcttttgccgttgcccgaccggccgacgatggcgatgaattcgccggcatcgacggtgaggttcacgtggctgacggcgtcgaacggcgtgccgcggcggacgaactggcgggtcaggtccgtcaaggtcagcagatggtccggggagggcgtctcggttacgtgcggcgaatccgacgaagtcggcgcgttcggctgagctggcgtggtcggcgggagattggtcggcccaaccgtggtcggctgaagcggcgtagttgtctcagtcatatcactccccctctcgcaaggtcaggtaggcttcgggccggccgagacgccacatggtggccagcgaaccgatgatgccgatgatcgtagagcacacaacggtcacggcaatgaatccaatcaccgcaaccgggctggcttgcagatacggcaattgaagctgtttgccgatcagcgaactgaatgggaaaatcaccaggctggccgcgccgacgccgattacgccaccgatcagaccgatgatggcggattccttcagaatgatggcattcaacatgccacgcgtggcgcccatgatgcgcagggacgcgaattcgcgtttgcgttcgttcaccgacgaggcgaatacggcgagcagcacaatcacgcccattacccagatcaccgccacgaaaatcttgaggtaggtgacaagcgcggtcagcgaagttctggtgttggcggtgatgccgccggggtatacgtaccccaaatcggcgaaccgggagtcaagacgcttgatgttttcagccacggtctgcacttcgtaaccccgctgcgtcttgatcatcacggtggagacggcttcgcctgcatattcggcgggcatgacctgcttggagaccttggccgaggcggcaaccatatcaggcacggtgttttggctgatgaacaccgaattgtcgaggctggtgccggtgttggcgagctgggcgacgaccggccacttatggccgtagagttcgatggtgccgtcggtggacacgttgacgtttgcgccggcaatcatctgaccgtcttcaagggggccttcgaactgggatgcgacccatggttcgatgacgaagtcagtgtccgggtcgtaaccgatgatctgcagcttttcggcacagcaggcggcggccagcgatgatatataggtctgttcggtggcctgtgcgatgccgtcggcctgcatgacctcgtcggcgatgtctttggtgaaatagaaagtgctgggattgccgctggtgagcagcgcttcagccttctgcgcggtgttttgcggcacgaccataaggtcggcgcccaggcgcttctccatactggtcatgccggtgttgaggttcatggtcagcatggtgccgccgaagaacgtcagcgcgaggatggtgacgacggagagcagtgcgccggtgcggaacggcttgcgtttgaggttttcaatcggaaggccgcgcaatgcgatatgggatggcacgatgagtccttatgttgcttatagtgcggttgcaataagcgagaccggagtccagcgttcggaatggctgggctccggccgtctgctcgatcagttgcgcttggcggcgcgagagtcgagccagatggcgatggccgcgaacacgatggtgagcacgccgagcacgatgagcgtgggcagcataaccatgcggcagtgcatcatcgcgcccttgcagatgccgatcaggaaggtgggtacggcgagtagtagcagggcgttggctgcggcggcgatattgaggccgatgcgaatctgcggggcgacgaacaaagccacgacgccaaacacgaggatgacgacgccgatgccggtggccgcctgctgcgagtagtggcaggcacccggcatgtcatggccggtgcaggcgtgcgcaaaggtctggggcgcgatggtgatcagcgcgccgaacagaatattgggcacggatgcaaacagcttgttcttcataactacttttcctctcccctgttcccagggctcgtaggcgcaacctccgcattatgcccagatagtgatgaagaacacaagtcttgttttttgtgaatttatttggtatataactcagcccctcgtcagaggggccaatctatctacaacttctcaataggtgctacgcggagcatgaggcgtttgacgccggcggagccgaagtccacggtgattaccgaattgcggcccttgtcttgcgcgtcggtgaccttgccgagaccgtactggtcgtggctgatcatgtcgcccacggcgaagtcggcgatattcaggccattgtccttggtgagcttcgagctgggcacggcagagccggtcgaaccggatttcggtgtggtgcggcgcgtggtgaccttgccgccacgggtgccgccatatgaaccggatgaagaaccggaacgggaacgcgacccgtaagacgaccccgaacgggagcgagacccgtaggaggacgagccggagcgggaatcatatgatgatgaacgggaaccgtacgaagaacctgaacgggaaccatacgacgaggagccggaacccgagccatacgacgacccataccgcgaccgcgacccataggacgaacccgaaccggacgaaccacgcgagccgaacgtcgacgacccaccaaacgtggcaccgccgaaatcgtcatcatcccagccgcccaaatcgtcggcgaatccatcggtctcccagttggcgcgcatacgctccacgccggcttcacggcgtttccaatcaatcagcgaatccggaatttcgtcgaggaattggctgggcatcatatcggcggcctggccccactgggagcggacggcggcgcgcgtgacatacagtctctgcttggcacgcgtgatgcccacataggcgagtcggcgttcctcctgcagttcagtggtgtcttccatcgaacgcgaatgcgggaaggtgccctgttccatgccggtcaggaacaccaccgggtattcgaggcccttggcggtgtgcaaggtcatgagcgtcaccttgcctgagtcctccgcctcaccgggcagctggtcggagtcggccacgagcgcagtggtctccaggaatgcggacaacgtggcgtcaggcgtgttctgttcgaattcggctgcggtggactgcagctgggagaggttctccagacgggaggcgtcctgcggatccacggatttctcaagttcggcccttaagcccgacttctccaatacttcggccacgatctcgctgggcttggagtcgtgcgcgtgcgtgaactgcgagagcgcgcccatcagatcgcggaatgctcgtagcgaggtggcggtgcgggtcggcacctcgatctcatccaagtgcatgagtgcgtagaagaagctggtgccatgctcgcgcgcgtaggcgagcagcacgccttcggcgcggtcgccaagcccgcgcttgggcacgttgagaatacgacgtagattcacatcgtcgtccggattgacgagcgcctgcaaataggccagcgcatccttgatttcgcgacgttcgtagaacttggtgccgccgacgagctgatacggctgattcgtgttgatcagcgcctcttcgagcgagcgggattgggcgttggcgcggtacatgatcgccatgtcggagtaggagatgccctcttcggcgtgcaggcgcgcgatttcggtggccacccactgggcctcctgctgggcgttgtccgccgcgtagccgacgatcggctcgcccttgccgagcgcggtccacagtttcttgggcttgcggccctcgttgttgctgatcaccgcgttggccgcgtccagaatggtctgcgtcgaacgatagttctgttcgagcatgatggtcttggcgttcgggaagtcctgctcgaagtcctggatgttgcggatgtcggcgccacggaatgcgtagatggactggtcggaatctcccaccacggtgatccaggcggggccggacttgccggcgttcggcgcgcccgggatggccttctcccccgtgtccacgccggccagctcgcgcacaagcacgtactgggcgtggttggtgtcctgatactcgtcgacgagaatgtaacggaagcggtgatggtagtactcggcgacggccgggtcggtgcgcagcaactcgaccgtgcggccgatcagatcgtcgaagtcgacggcgttggccagggccaagcgatgctcgtattcggcgtagatcaccgcatagatggcttcaaggtcgcccaccgtgccgaactggtagccgcgctggccaggcgtgaagtcgggcgcgtgaacggcgaggttttccttccaaccggtcagattgttcttgaggtcggagatatggccgaggatcgagcgtggagtgtagcgcttgatgtcgaggttgaattcggtggcgatgattttgacgagtcgctcggagtcggcggaatcataaatggagaagccggacttgagcccgatggacttgccgtcgcgcctcagaatgcgcacgcaggcggaatggaaggtggagacccacatgcgctgggccaccgggccgatcagcgagccgagtcgttcgcgcatttcggcggcggccttgttggtgaaggtgatggccagaatctggctcggccatgcgccgaactggctcaagatccaggcgatgcggcgggtcagcacacgggttttgccggagccggcaccggcgccgatcagtagcgcctgaccgcggtattgcacggcttccgcctgctgcgggttcagatcgcctacgagttcctgcgcgctgcgtgcgatgacttccggctcgtcgtacactgttgcctccctttgaatcgcgacattcatgtttaccacatgcacgggtcagcgcaggacaacgtacacttacaagtatccatatcattcactgacatacagcaatgggaggtctaatgcaggaacttgaggagcgaatccagagcgagggaacggtgaaggcgggtgatgtgctcaaggtggacgcgtttctgaaccaccagtgcgacgtgcgtctgttcgaccgcatgggttcggcatgggccgctcatttcgccggcaagcacatcaccaagattctgaccatcgaggcgtccggcatcggcattgcgtgtgtggcggcccagcatttcggcaatgtgccggtggtgttcgccaagaaggcgcagtccatcaaccttgacggcgaccagtacaccaccacggtctattccttcaccaagcagaaggagttcccggtgatcgtggccaagaagtatctgaacgccggcgaccatgtgctgcttattgacgattttctggccaacggcaaggcgttgcgcggtctgattgacctgtgcgaggcggccggtgtcacggtcgagggcattggcatcgccgtggagaagggcttccagggcggcggtgacgcgctgcgtgccgaaggctacgatgtggattcgctggccatcgtcgagtccatgaatcccgagaccggcgaaatcacatttaggcactgagcacattgactgctcccgccagcgggagcaacagagagaagaaaagaatcatgtcagagaagaaaaccaagaattccgtatcctttgaggcgctgtcttcgctgaacgcgccagtatccttctggaagggcattccgttcggcctgcagcatgtgatggccatgttcgtggcgaacctcgccccgatcttcatcgtcgcctcggccgcgaaaatgaccccggcccaatcggccaccatcatccaggccggccttctggtggcgggcctgggcacctgcctgcaactgtacggcgcgtggctcatcggctcgcgtctgccgatggtcaccggcatctccttcacctacgtggcggccgccgtggcgatctgcgcagacaagggctatggcgcagtggccggcgcggtaatggtcggtggcctgctggaactcgtgctgggtttgacggccaagtattggcgtcggttcgtgccgcccatcgtctccgccatcgtggtcacgtcgatcggcttctcgctgcttaacgtgggtgccacgagcttcggcggcggcagcggagccaaggacttcggaagctggcagaacctgacgctcgggcttatatctttggtcgcctgcctggcgttccagctgttgatgaagggcacggccaagcagctgtccgtgctgttcggcctggtggtcggctatgtggcggccatctgcatgggcaaggtcgatttctccggtttccagaacctcgctattgtgtccgtgccgcagttcatgccgttcaagcctgagttcgactggggttcgatcatctccatcggcctgctctacgtcgtctcctcggtcgaggtgctgggtgacaccgccgcgctgaccaaggtgggcctgaaccgtacgcccaccgaacgcgagaccgcgggcgccatcgccggcgacggcctgatctccaccgtatccggcctgttcggatgcctgccgctgacctcgttcgcacagaacatcggattggtggccatgaccaaggtcgtcaaccgcaaggtgattctctccggcggactgattctggtgctggcgagcttcgtgccggccatcgccgaggtgttcaactcgctgccgcaggcggtgctcggcggctgcacgatcatgatgttcggcaacatcattctttcgggcttccagatgatcgccgaagcgggcttcacgcagcgcaacatcacgattgcggcgctttcgctgaccatcggcatcggcttcacccaggtgagcgacatcttcgcgcagttcccgacactgttccaacaaatcttcgcctcgaactgcatcgccgtgtcgttcgtggtggccgtaatcctgaacgccgtgctgcccagcgaggagcacttcctctccgcgcccaaggaggcaccggccgcggacgccgagtgataacaacgcgacatatcagctgcgcataatcacatgctgatgccctatcgtcttgcaggatgatagggcatcattgattttgagagagactacaagttgaaccatgagttcgagccggtggcgtgtcgatcaatcgacatcttcccattcgaggatgtctccgggttggcagtcgagtgccttgcagatggcgtccaatgtggtgaagcggacggctttggcacgtccgttcttcagaatggacacgttggcgggcgtgatgccaatttgttcggcgagctcgccgacgccaatcttgcgtttggccatcatgacgtcgagattgatgcgaatcgtcatctcaaatcacctgctcaagttcgcgcccgatccggacaaggagaacagtttccatacggccacgaacgccgcttcgatgcagagcaggaacagcacgcccataatgagatatgaccagtgcatcgacgtctggctcgggcagaggccggccagcgcgccgctcaatcccggtacggcgaatagttggccccataggcaggccagccagaccagaatcacgatggctttcaacgcgagcaacacccatcggttcatgtagtttttcatagcccggtcctttcaggtgccgacgtttttggcgacaccgcgaacatcgatatgactatatcgaaaaacgatataccttgcaaggcgtattgcgtcaaccggcattggtcgctcatatgcatataggcttcggcagactgtcagcagaccgtcagctcaacggaacgaacgccatatgagccacccattcgcgcacgagagtgatgacggcttcgggttggtcgatgtgcgcgttgtgaccggcattatccagagtcacgaaggtggcgttgggatagtgcggcaacagggcttgctggtcttcgtatccgacgatctggtcttgcttgccggtgacgatgagcaccggacccgcatatgtgccgagcatttcctcgggattatcggccagccaataacgctgatccagtcgttcgcatgccgcacggtcgcacaacgccacgccgggcaggatgaaccgttggtagcgccgccacgcgtcgaatgactggttgacgcccatggtaatgaaatcgaacacctgttcctgtggcaaggagtgcgtcagcttgggattgggctgtgcaaccacatgttcggccacatgccggccggcatgctgcgggtccacgaccggcgcgatcaatgccataccggccactcggcgaggttcgcgcgccaatacttcgcggacaagcgcaccgcccatcgagttgccgaccatggcgaatggagccgctttaccgacaaggccgtcaatggccgtttgcagccaatccgccatttccggcagcccgcaggcatgctcgggcaatgccggcgtacggccgaaaccgggcagatccagatatatacggcgaattgaatcattgccgtcaaacgccttgtcgagcatcatcagcgaacgatggtccacacccatgccatgcacgaacacgacgggcaatccatcatcattgccctcaatcgcgcagtacggctgcaattgtgccatgtgttcctctccttcaacccggtacaaatcgcctttcacacaatagcggcagcagctcccctggtgtcggagcaatcccgaccgccattctcggtttcgaggggctgatttcgtggtttggggacatccacttccgtttcaaggggctggtcattggccaaaacccaagtacgaatggcttcatgccaacgtcatttcaccgttttggagctgtcgctactcggccatcagcccctcgaaacggaagtggatgtctcggaacgagcaaatcagccccttgaaacgcaaatagacgattgcgaatcgacttatcagctgcgtcgaacttgcaatagagatgtcggtgtatcattccccggtctgattgcgcggatgtcaggaagcgtgaagaattgtcacaaagtcgcgtgatggcgcagccgccgttcaggtggatatgccacgctgtcatgatgacggccgagccggaacacgacaaatctcgcatgctgcataggccagccggtcacggtcagccatgacaccgaaatattggaggcgcaatgggacaacaggtgcggtgcggcagacgccgctcccatggcgcgggcgcgctgattgcagccgtcatacttgttgttgcggcgctgatcgcggcatggacgctgctgccacggctattcacgcctcacgagaccgcgcgcacggccgaggaagcatattgcgcggcggtgtcgcccgacggagcccgccgcaccttgacgcctgatcaggcgcagaacgcggcgctgattgcgaacatcgccgtcacgcgcggactgccggatcacgcggcgacggtggccatcgccacggccatgcaggagtcgaggctgacgaatctggactacggcgacttggattcgctcggcctgttccaacagcggcccagccaaggctggggcacggcggagcaggtgtccgacatgacctatgcgacaaacatcttctacgaccatctgctgcaggtgccggattgggagacgattccggtggaggacgccgcgcaggaggtgcagcgctcaggctacccggaactatatgccacatgggatgcgatggcacgcgcttgggcctcggggctgaccggtgaacggtcggcggacgtcacgtgcgcgttggagccagcaatctcctcggacgcggacgggttggttgccgccataggcggtacactgccgaatgtcagtgtctcggttgcgcccccgaatggcaaaaccggcacgaacaacggcgctgcgaccaatacggccagcacaacgttgacgatcacgctgccggacggcctgtccgccgacaaccgcactcgactttgctggcagacggcaggctggctggtcacgcatgcacgtcaatacggcattgacgcactgcacgcggacggcatgaattggaaccgcaaagccggtacatggaccggcaccgaaaccgccgagcagaccgtcaccgtcacgcttgcgtgatgtgacctataacgccgtcgcgaccacaaatccgactgactggagcctacgccgtcgatgccgcctgaggcacgatacggatatgatttttactcgttcgaatgagcccaatccacgacggcttcgatgttattgccatccgggtccagcacgaatgcggagtaatagccgggatggtacgggcgcggaccgggagcgccgttgtctcggccgccggcggcgagcgcggctgcatggaacgcctgcacggcttgctggctgtcagccaggaacgcgatgtgtgtgaccggcgtgaccggcgaagcctccgcctccggcccgtcaatcggtgacacgtagaaatcggagtgcagggttccgtcatccacgccgaatccgagcgtgggctcatgatgcgccttgacgatatagccgagcggtgcgagtgcctgtttgtagaatgtgatgctacggtcgatgtctttcacgtgcaacgtcagatggtccagcatggtcttggtcaccctcccctggttcttgtattcgattgctgcttgcagtgtaagcccgaacgtttcccacagggccgcgcatggctatgatgagagcaatcgcacgtcgagttcgagacaatattcaaaacgaatccaaggcaatagggggaatgatgatgaccaaggcactgattgtggtggatatgcagccgacgttctgtgaaggcggcgaactgggagtcgaaggcggcaacgcggtcgccgagcggatcgccgattatgtgaacgcgcatcgcagcgagtacgcgtatatcgcaaccacgcaggactggcatatcgagccgggcgcgcactggtcggcggaaccggatttcgtggacacgtggccgaagcatggtgcggccggcacgccgaacgccgaattgcatccggcgatcaaggcgctgattatccatcatcatttcaagaagggccagtattcggcggcatattccggttttgagggcatcgaggacaataccgaccgtatccagacccgtgaggaggttgcggccgagcaatccgccggcaagacgctggccaatgcgctgaaggccgccggcgtgagtcgcgtggatgtggtgggcatcgccgaatcgcattgcgtcaaggacaccgcgctcgatgccaggaagttcggtttcgaggtcaccgtgttcgaggacctgaccgtaccggtcagcgaggagctcggtgtcgcggcccgcaaacagatgacggcggccggcatcacattggccgagtcccgctgatcaggccggatatacccagagcgagcgcacgaacacttccgtatattcaaggccgacactgccgcatagtcgcctagtcgatatgtgaagaaggcttttatggttacgatgctgctgacttcgatattccgcaacgcctcgtccgccgtgcatgaagtcgaaccgcatccgcaaggcaagcgggtcgcgttcatcccgacggcgagcgccgtggaaccgtgggggccggttcactcggcgttgagcaaacacgcgctgcaacgcctcggtttcgaggtggagcaactggatgtggaagatgtgccgagcgggtccgccgaacgcgtcacgcgtagcatcgccgaggccgactgcatctatgtgggcggcggcaacacgttctttctcctgcaggagttgcgccgcaccggtgccgaccgggccatcatcgagcaggtgcgcgccggcacgccgtacatcggcgagtccgcgggctcggtcatcacggcacctgacatcggctatatcaagctcatggaccgcacggacaaagcccccgatctcaccgattacgcaggattgggcttggctgatttccgcgtggtcccccaccatcatgcagcggccatgggccacgccgcacaacgcattctcgaccagtatggcgccgatctcagtctcaagcccctcaccaaccggcaggccctgctcgtcaaggatggcaaaacccggctgctgcgatgatgcgggtcgtcggcccgtcgcccattcggcatcgccgtggtgtgtccggcctgacatgcctatcgagcggcatcaatcacacagcaatgtggctgggaacctcgccgaacgtcaacacctgcgtacatcagcacggcaagatctgccgaaaaacgcccggcgcacgagatgccagccggccccatccgtcacctcagtgccgtaccgggccaggcatggccttgagcaacgggatgaatccggcgcacagtaccagggccacgacggcgagtatctgccagtgggcggagccgagccagccgccccacgtgccgacggcaccgccgatcgcatacgcgaacctggcacggccgctgaatttggccaggtcaccaccgctcagcagcagttgtcgcgatacgatcacgccatgcgccagcaggccatagccgaggttgttgatgagccatccgacgcacaccgcggcaaactcgggaaccagtacggcggcaagggaaatcgccgtggcgattgccccgatggcggacacggcgcgcatgccgagttttgcggagagccgcatgtagacaaacgatccgacgatgctgcccacgccgccgaatgcgtagaccacggtcagcatatcgctgccgtaccgggagccgatgcccagcaacgcatagcttgcccacagcgacggaatcagcgcaagcagcagcgatgcgatcagcagtctgacccgggtcaagcgggtgaccggagtgcgctgcggcgtgtgtgacgtgtcggccgccgtggattcgtcggcggagccgtcgccgtcatcgccgcccgcaccatcgttgccgaatcccggcatgaactcgcgggtgcggaatcgcgtcagcgcgcaggcaaatgacagtgccgacgaggtgagcagcatggccatgatggaggcgttggccaaggccgatccggcaacctggcccagcaacgtaccggccacgctggcaatcacggcgacgtagccgctgtacttgacgagcatgtcatcgtcgtcgccggccgcatccacctcgaacacttcggaggccacgtcgatgacctgcccggtcatcagcagcaggcatgacagggccagcagcagccacttccaatacgtccaaccgttgggcaccagcgcgaccgccaggcacagtacgccttccacgccctccgtggtcgcaagcgaacggaacgagccgaaccgctgcacgatccatgcggatatcggagaagcgaagtcgatgaccagattgaacgtcttgcggaacgcgatcacccatgccggcagtccgacgatcagaatcgaaggaatcaccgacccctcgaaaatcgcgttggacagcatcgaaaacgtcatacccaccaacgcccatcgcaacgccctgctcaataccgataatcctcgcataccttagttccttgtccttgccagtgtaacggaattatgacttctcaatcgtccccccgctgtctaaatgaaagtgcaacaccctttcactggttatctggacaatctccaatctaaagggtgttgcactttcatttagacagcgccccccatatccgcatgtcactgctgccatcataatgagccagtagccgcctttaagcgttctgacaaccatggaatcgaaaatcgctatgcacatcatagaacagcactgccaaggcaagaggtctgaccagtcgctcaatgagaacgggctgatcatcaccgatggtttcgcggcagtggtggatggagtgaccagcaaaagtgtgcaccaccttgccggccttgttcttggccgcgtccagcaccggcgcgaggccggcggcccattcgcgcaccgaacggccggcgagcatgtcgttgccgcccacgcacacgatcagcacatccggccggtcattgatatcgccgatcatccggtagcgcacacgtcgagcggtcgcgccgagcttgccgaccgtacgccaggccaccggccgaccggtacgcttgcgacgcgcgcggcaagcagcggcataatgcctttcgactggtcgtccacgccacatccggccaccaatgaatcgccgaccatgacggcacgaatcggcttcacgccgttcgcgcctttccaatcggggccgatcggcgcctcgatatccaccccgcgacccttggcatcgaacaaaccgaaccgcttgcccttcggctcggacgccaacttcacccggcccttggcccacataccctcaatcggagcaacggcagcatcaatcacacgcaagattcccacggccacccaacatagtccgccctcctcgacctcgttagcggccagtagcaacccatattcgaaaactcgataaccatcgtcaattcgcataatttgaacgttttaggcgttttggtcgctttggacgttttatactgtgataaataaaaaggaggtcaccatggcagaatccgacaaactcaccattccacgaacaatccttccatccatcaacattgacgacatgacgacattggaggcattcaccgcacgatttcttgatgagcggatcttcatcaaagatgccagcggcgtggagactcccctaccttcgcagctttgcgacgccgtcaggcagacggccatccttctcgccgaaggcaaaagtgtaatgatcagtgccaccgaacaagatctgactaccgaacaggcggcggcaatgctcggcatttcgcggcaaacactgataagactgcttgataaaggacttattcctttttcacgtccgtccaatcaccgtcgcatccggctggaagacctacttgaatacaagcgagcctcgaaacacaccaaggattgtgccctgagccaaatgatcggcgtcggggaagacgccgaattgtacgacctgcccgagccgaccccgcaggaagccatgcatgcggtatcggaggtaaggagagtacgggccgatgctgtcggtgtttcttgatgccaatgtcatctattccatcaccttgaccgatgttctgctcaccttggccgagcatgacctttttcttcccctgtggtcgcctaacgtattacaagaagcacaggaagccacctcccgaacactgcctgacgccgcaccacaagccttccgaaaaaagactgataatgatggaccaggcattccccgaatcctccatacatgttgaggaatcggaatggagccaattcgatctgcctgacccggatgatcgtcatgtacttgcggctgcggcacagggacaagcagacgcactggccacgcgcaatatcaaggattttccccagaaactgcttgactctttctccattcaggtcatcacgccagatgatttgctctgtgtattacttagacgagatccggaagccacagctagcgccatacgtgagcttatcgattctcgacatcggccaccgataaacattcccgactttgctaaaagacttgaacgctctggcgcaacacagtttgcagccgctattgcgcatatacgacagcctttcggcaatcattcgtactttgaccagtaacccatgaattctggatgaattggggtgaaccggcgggtctggaggcgagcgggcggcggatcatggggcacaatggtgtcaaggaggccgccatggtcgatgactatactgccaaaatgactgagctgatcgaactcatgcgtctgatcggcaacgatacgcagcagtgcgaggtcaaggaatgcaagcgcaagatctcctcgaccatcaccgatacgctgtccgcgttctccaacggctccggcggctggatcatcctgggcctgtccgaaaagaacgggttcacgccggtcgagggattcgacgcgcgcgccatgcaggaggcgctgagccaggcgtgcgagaagatgacgccggtggtgcggcccgtaatcgtcacctgcccgttcgaaggcgcgaatctggtgttcgcgcgcatcgacgagatgctgccgcgcgacaagccctgcttcaccaccgcgctcggaccgcacggcggctcgttcatccgtaccggcgacggcgaccggcgcatgacctcctatgaggtcgaccggctcatcgaggagcatctgcagcccacatacgatctggatatcgtgcccgacgccacgaccgatgacctcgacccgcagcttgttgccggactgttggcacgcgtgcgcgaacagcatccgcgcgtgttcgccgaccgagacggcatcgatgtgctgctggatctgcaggtgttgcgccatgatgattccgacgagtcggaggtcggcggaatcctgcgccccaccttggccggactgctggcgttgggccgctatccgcagaagttctatccgcggctcggcatttcgattgccgtgtttccggggacgagccgggacgatgtgttccggggtgacgaacgattggtcgcctcgaagtcggtggtcggttcgattccggtgatgatcgacgatgcggtcgactcgttgatgcgttggattggcgcgaagaagcccgactatccgccgctcgtgttgcgcgaggcgattgcgaacgcgctcacccaccgtgattattcgcccgatgcgcgcggcacgcaggtgcatatcagcgtgttcaccgatcgcatcgagatcaccaatccgggtggcctgtacggcatggtgac

SEQ ID NO: 2590 - DNA, 18988 bp, Unknown
  R222_15m  MAG No. k141_6298
ccggccccactgccggaaccgacatgggtatgttcatgaccgccgaccgcaggaacgaacaggcccgtccgccacggaccgcatcttgcggttcaggcggacgggccttatgggagggatgggaacgggagatcagttcttgactgtctgcgtctcatcgccgacggctgcggcggcttcaacggccgccacgggctgcgcctcatcgtcgacgatctcgccggaagcgagcttggcttcgagctcgtcaacgatctgcgcgtgcatcttctcggtgatcttgaccttggagacgaacaccaccaggctgagcacgatcaggatgagcggggcatagaacgcgcagatcttgaagacgtggatattcgtcggggtcatatcggcggcggttgcgtcacccgtcatgccggccgcaagggcgatgaagccgacgatgccgttcgacagagcgccgccgatcttatcaagcatcgggcggatggaaagcgtaacggcctcgttgcgcttgccgttcttcagctggccgtactcgatggagtcggtcagggagaggatgaccgtcatcatgatgagcgtgccgggaacgtagaagagcaccagcgcgatgaagaccaggacgatgttgctggagaacagggcgagcatcacataagccacgatcatggagaccatgccgccgatgtacaggtagcggcgcggaatgtacctgttcagaatcgggtacagcggggacatgaccaggcccgcaatcatggcgatgacaccggtcgcggagaaagcggcctgattgtcaaggacgaacttgaacaggaagagaagcacaccggtggtggtcacgttcgcgatggcgtacagcaggtaggacagggcgacccacagcagctggtcgttctggaacacggccttgaacgcctgcaacggaccaccgttgtcttcggcgttggcgcgaagggcgctttggttttccctggtgccgaaggcgacggtccaggcggtcatgatgccgagcaccgcgacgatgatgccgaaagcggtccaacccgactggtgctcggcgttctcgccggtgaacacccagctgaaataggtgacgaccggaatcacgaggatggtgatggcgttgccgccgatggagccggtgaaggagccgagggcggtgtaggtggaacgttcgtgggagtcggaggacaatgccgggatcatgccccagtaggagatgtcacgcagggagtagaacacgtcaagcacgatgaacgtgatgacgaacacgacgatgaacaatgtggagttaacgttcaccaggccaaacatgccgctgaaaaccacggcaagcagcacggaggagaccagtccgccgaagaactgccacgggcggaaacggccccacttggtggtggtgttgtccacgaggttgcccagcagcggatcgacgaagatctcggcgatgcggatgatcaccacgaggctggtgatgacgccgatcagcttggccgcaagcgccttgtcaacgcccgagaacaggcagctggtgacatacacgatgaagtacgtgctcatcgcgttgtagaaggcggcctgaccgaggttgccgaacgcgtaggcgatgcgctggcctaacccactcttcctgcggacgtcaccgtccgcggcattttcgttgctcattaatcttctccttaagaacccagagcatggaatcactcattgattttgtaaagtaagcatacaagttttatcaccaaaagtaaaaagcattagtaaacaaggagataaacagcgtgtcgcaaggatgggataacatgggctgaaccgagacattgcatggacgcggcgtagcgtcgacggcaagcagtgccagtgatttggaagcggtaaacaggatttgcgttttatataaaaactgtttatccttttcggtaaaggaggccccgacctcctccataatatcattcacaacgaggtaatgacagaaagcaggagagcatgacagacgtcacacatgtcgatcgcgcatcgcaggcttggctgaccgacccgacggtgttcgaggtgaaccggactccggcccattccagccacaagtggtacgcccgcgacccccagagcggacaatggtccgatctcaagcagagccttgacggcgagtggcgggtcgaggtcgttcaggccgccgacatcaacctcgaagaggaacccgcgacggccgagtcgttcgacgactcctcgttcgagcgtatccaggttccgggccacctgcagacggccggtctgatgaaccacaagtacgtgaacgtccagtatccgtgggacggccacgagaacccgttggaaccgaacatcccggagaacaatcacgtcgcgctctaccgcaggaagttcaccgtctccgcccccgtagcaaacgccaagcaggccggcggatcggtgtcgatcgtgttccacggcatggccacggcgatctacgtgtgggtcaacggcgcgttcgtcggctatggcgaggacggcttcacgcccaatgagttcgacatcaccgaactgctgcacgacggggagaacgtcgtggccgtcgcctgctacgaatactccagcgcctcctggcttgaggatcaggacttctggcgtctgcacggcctgttccgctccgtcgaactcgccgcccgcccgcacgtgcacatcgagaacacgcaaatcgaagccgattgggatcccgaggccggcaccgcttccctcgacgccgcgctgaccgtgctcaacgcggccgacgcggccacggtccgcgcgaccctgaaggacgccgacggcaacacggtgtggcagacgacgggcgacgcggaggcgcagaccgcgatctccagcgagccgctgcagggcatcgaaccctggagcgccgaaagcccgacgctgtacgaacttgacgtcgacgtcatcgaccaagcgggagacgtcatcgaatgcacgtcccagaaggtcggtttccgccgcttccgcatcgaggacggcatcctgaccatcaacggcaagcgcatcgtgttcaagggcgccgaccgccacgagttcgacgccgaacgcggccgcgccatcaccgagcaggacatgatcgatgacgtggtcttctgcaagcgccacaacatcaactccatccgcacctcgcactacccgaaccaggaacgctggtacgaactgtgcgacgagtacggcatctacctgatcgacgaagccaacctcgaagcccacggcagctggtccctgcccggagacgtcctcaccgaggacaccatcgtgccgggcagcaagcgcgaatgggaaggcgcctgcgtcgaccgcgtcaacagcatgatgcgccgtgactacaaccacccgagcgtgctgatctggtcgctgggcaacgaatcctacgtgggcgacgtgttccgcgccatgtacaagcacgtgcacgacatcgacccgaaccgtccggtgcactacgagggcgtgacccacaaccgtgactacgatgacgtcaccgacatcgagacccgtatgtactcgcatgccgacgagatcgagaagtacctgaaggacgacccgaagaagccgtacctctcctgcgaatacatgcacgccatgggcaactccgtgggcaacatggacgaatacacggcgctcgaacgctacccgaagtatcagggcggcttcatctgggacttcatcgaccaggccatctacgccacccagcccgacggcaccaggagcctgcgctacggcggagacttcggcgaccgtccgtccgactacgagttctccggcgacggcctgctgttcgccgaccgcaagccgtcccccaaggcccaggaagtcaagcagctgtactcgaacgtccacatcgacgtgacgaaggactcggtgtccgtcaagaacgacaacctgttcaccgccaccggcgactacgtgttcgtcctgagcgttctcgccgacggcaagccggtctggcagtccacccggcgtttcgacgtgccggccggtgagacccgcacgttcgatgtcgcatggccggtggcggcgtaccgcgccgacgcccgcgaactggtgctgcaggtttcgcagcgtctcgccaaggcgaccgattgggccgagagcggctacgagcttgccttcggacaggcggtggtgcccgcggacgccaccgcgacgcccgacgcgaagccggccgatgggaccatcaccgtgggccgttggaacgctggcgtgcgaggcgccggacgcgaggtcctgctgtcgcgcacccagggcggcatggtctcctacaccttcgccggcaacgagttcgtgctgcgccgtcccgcaatcaccaccttccgtccgctgaccgacaacgatcgcggtgccggtcatggcttcgagcgcgtccagtggctgggcgccggccgctacgcccgctgcgtggacaacgtgctcgagcagatcgacgacagcacgctcaagggcacgtacacgtatgagctcgccaccgcgcagcgcaccaaggtgaccgtctcctacacggcccacaccgatggccgcgtgaacctgcacgtcgaataccctggagagcagggtgacctgcccaccatcccggcgttcggcatcgaatggacgctgcctgtgcagtacacgaacctgaggttcttcggcaccggcccggaggagacgtacctggaccgcaagcacgccaagctcggcgtgtggagcaccaacgccttcgccgatcatgcgccgtacctcatgccgcaggagacgggcaaccatgaggatgtgcgttgggccgagattaccgacgatcacggccacggcatgcgcgtcagccgcgccgatggtgccgcgccgttcgcggtaagcctgttgccgtactccagcttcatgcttgaggaggctcagcaccaggacgagctgccgaagccgaagcacatgttcctgcgcgtccttgccgcacagatgggcgttggcggcgatgattcctggatgtcgccggtgcacccccagtaccatatcccggcggacaagccgatcagcctcgatgtcgacctcgagctgatctgatcagaattgatccgatagtccaccgtgcaaacgatgtggcccccgacttcctcgcaggaagtcgggggccacatcgtttgcacggtccttgttagtccagcggatgcgccggatatcgatgcagatccaaacctagtcgttgtagagcatcaatgaataaagatgtcactcataagctatcaagagaatccagaacctttttgaattcacatgctcgacacgcaatgtatccagcgtcgtttacaatgattcattgtgccttaatggcgcatcgggctatagcgcagtttggtagcgcgcctgctttgggagcaggatgtcgccggttcaaatccggctagcccgaccagaaaccccgtaatctcaacgattccggggtttttccttttatccggttcaaaccgatttatccgattttatccgatgaccgcagaacctacgccgcctcgtccagttcctccgccctggcacggcccacagcatcggccacctcatccagcttctccggccacaaccgcgcatacgtgtcaagcgtgaccatagcgctcgaatgccccaactgggactgcaacgtcttcacgtcgcagccgttggcaatcgcgatgctcgcatacgtgtggcgcaggtcgtggatgcgcacgccggaatcctccatacccgcacgcctgacggccggactccaaatgcgcgacctccacgtgttgacccacagattgccgccacgggccgcacggaacacataatcatcaggatcacgcccatcgcactgacgttccaaaccagccacaagaaattcagggaacgccacccaacgcgccttcccgtttttcggggaaccgagaatcatcttcccgtccttatcctccgcccaggtgcggcggatgcgcgctcgccgacggggaaagtccatgtccttgacctgcagagcgaaggtctcgccgatgcgcggcccgacgtaggcctgccatcgaacgatgagcgtgtcctgcgggtcgttctttactctgccggcctcgatggccagatcctccacctcggaaatcgagagaaataccatgtcgtcgtcatcgtcgacgacgcgcggagtggcgacggactgcatgggattcgcggtgatatatccctgtttcagagcatggccgagcacaccgcccatgaccacgcgcacgatgttgcggatcgaccgtggcttcaacgcgcgagtgttttccgttccgcgttttctgtcggccggatagccgccctccgacagttggttcacccatttctgtatcgcttccgtcttgatgtcccctatgggggtgtcgccccattgggggttgatgtagattctaagttctcgcttgtagcggcgcagggtgccgggtttgatgtcggctttcgttgccgtccactcctcggcgacccgacggaatggcttctgcgcgagcttggggtcgtggtagcggccgcgcctgatgtcgtcctccatggcggctttgaactcctccgcgtccgacaggagccggaacgttttggacttctcggtcttcacgccctgtgcctcggcgtaccagcggcatcgccagcggtcgtactttccgtaggtgctgctgcggtgttcggcgggcaccttggccttcatggggtctttggcgttggcgagactgcgcttcatcgcagcagtcggcggattgccgttctcgtcgtttttgagccaacggtcaacgatgaacactcgtgccataggtatgctccatcttcatctcacgtgctcatagagcagcgccctgtagtcttcgatgatttggacggttatggtgagtacaatggtttgtgtggattgggagtacccggtcggcgaaggtttcggaagtgattccggagcctttcgttttactccggccattccggccagaatccgaccggccctgttgacgttggcgcgttagcagggcttttctttactgcttggcggttttgacggtgatggtggtgccgagcgcggtggtctcccagctcacgccgtcggcttcgctgtaggtgaagtccttggtggcgtcctgcgaggcgagcagggattgagccatggtttcggtgtcgccctggctggtccacttccagtcgccggccttggtcggggcctgataggtgcccttccaatagaggctcttggtgtcggtgccgatccagttgacctcgatggtgtcgccgctgatggtggcctccatgtacgagttcgggtcgttggagttggtttgcttccacgtgccggtcaggtcgtccagctggggtttgggctcttccttattggtctcggtctttgacgtgccatcggatttggccggcgcatcggaagcggcgttgctccctccgcaggcggtcagtccggcgagtaatagtgtggccgcgatcaatgcgactgacttcttcatggttctcttcttctttctcttagagggccacactgtcgtgcagccagtttttgtatgcctggattatccaaggcattacgttgagctcacgcgctatcgcgcattcatcgttgccgtataggatttcggcggtgatgtagtcggcttggcttatgagcattcgagcagcctccgcgtctgcgcgctgctccgtgtaggcgtcggccttgcatccaacgtcgtggtgcttggcgtggctgatctcgtgcgccagcacgcaccgacgctggatggacgagagcctgtcgctgagaatgatctcgttgcgttccacgtcgtatacgccctcaagcccatccggaagcggtcggtcacgtattcgactcgcccactgcagggcgatgtactccaaagcgtcctcgctcatggtatcctccagtatccatatgaacagcccagccgacactcgccgaatgtcgttggtactcaggattgggagcgcccggtcgacaaaggcttgggaacgatcctgagcccttttgtttcattctgtgcgtttctaatttgacttccttgacagtgcatggcagagtaaaaagtactcatccgcctaggtgcgtgaacgagtttcctgggtcgctacggcggcccttgtttattattttattggattatttttcccgcccttttcgcgcggtcgtatctgcgaagctgtccgttatagctgctctcgtaattgagatagtatgccgtgaccagcatgcagtatggcctttccttctccggatgcggctccagtataacgaggtatcgttcggggcgaacgagtatgtgtactcgcgttctgttgcgccaatcctcctcccatatcaacggtttctcgcattgcgtgtaggagcatgaaggacattcctcgcaatagtcgatgctgggacgggggtatctgatgcgctcgcaacggtccatatccgtcatgcgctgtcctgtttcatggtcttcctcggtagtgatatgcacgaaaccggcccatttgccatccgactcttcctcccgtcgtctcacatgcacgggcaattcacggtagtgagggtgggaaactatgaaatcgttctcgaacactgcgtacagtctgttctcgtaatgggagaaggtctcattgacgatttgagacatgagcggcggaacccagtgcggtgtcatgcgtggcctccagtccaggcaaagagattgaatttacgcgcgccaggagtcgtggattgggtgagcttcaacttggatcgattctgtatgcgccagatgatttccctttttgccccagccggtggcttgatgtctgtccgattcgccctgcacacggcaccattgatgacatccacgatttgcatcatctgcacttcatccgatcgtatcggctgtatctttttaatgcacttatgatcgaaatcataatggctgttcgcgcatatctcgttgagcttggcagccctttgcgcggaatgagtgtctttgacatccagatacacgttgtatgtgttcgatgaatcaaacaacctgttgagcatggtgaaatacatcttgtaataccaatcattatgcgattggttataatcttcatgccgcagatgggtcttgtcggcgacaagtaccctgaaccgcatatcgtcatcatcgaagaagtaatccacgagatcggtgtataggccgatttttggttcgctcgcttttgtccatttcacctcgacatgggcggagacgccatgcttcgctttgatgtctacgatcctgtccttgacctcttcttttttgtcctcgggcaggatgagcgcgcccaataccatcacattgctgttgtcccgctccaggtggcagctctcgtcgcaatacaggttgtattcggtcatggtcactcctttgcgattcgctcaatctgtatggaaattccggataactcgctcatggcatctcctcgtaggcttcctgttccgcctcgatgtcgccatgcttcgcggccatcgcatagtaatcacgagcgttcgcgtcatccgaatcggacgacaaattatattcgcccatctcagcaatgagcctccgatatgcggcatctataatgtcccgaggatcaacaccgattaactcgcacgtgttcagcaacgcttccataggcattgatggtttagcgttgagccatcgagagtaaccggacttcgaatgcccaagttttacggccacttcagcctgagaggtttcatgtctcgcaaaacttgctttaagctccagtccgacaagttgcgaaaacctgtggctgcgttcgtcctgaatattactcatgtgagtactttacatctcaaattaagcaattgcaattcacaaaacgcaataacgttgctcaaatgagacacgccgacgttgaccgtggttgtatcgagatatagcattgctcacatgagcaacgttaatgcatgggtcggccatcaagtcgaaacgaaaatacagcaaaaaggactgacgaaaaagttcgtatcagaaaaatctggtatgccatacagcagtcttaacagcaaaatcaagggctatcgaggatttgaccttgatgacatcgtggcaatcgctgaggctatcaacgaatctcccgctgcgttacttcctccccaattcactgctcctgcaatcgctagaggtgcggaatgagttttgaatcgtctttgaatctgaagctcaggctactgctcgacggcctgcgggtcggggaactccaccgcttggacaacgcgatgcttgacccgcaggcgctcgccgacgtgctcggcgcggacgacttcgcccagctggaacaggatatgaaccatgaggcccgactgctccaactcgacgccgtagcccgcttctgcctacaaatccttgactcggccctcatccgtcaaggcgaggatggtctcctgcgccccgtagccgatgaagtgcacggccttggcaagttcccttacctccgcgctctgtgcgctttccttgagccggacggcgatattcgttccggtggcgatgttattcagcgcgttcctgagcaattccctctgggatgcgaccatgatgcttctcctttgaatgcgcgccatgccctttacacggcgcttaccagcattctaggagaaaacgggggcgacagcttctccgccgcccccaccaacactccaacgctcactgctgagaacacccttccggcgctcgccgaaggaggtgcgaaatgagaaaaatgagcaagggcgatgtccgggagtggctgcccggtgagtctcttgaacgggttgacttcggcaacggcgttacgggaatggataaacgctgcccgaaggacgattccgactggggattgaaacaactcatgtggaaatgcgctgcaatcgcggcagacggcgggcctcacgtgaaagtggcattctgcgattattggatcgacggacaaaaggtaccgggacagttccaagtgagctggacgggacatacttcatccaccggcggattcgactcgacatggtcgtatctcaccggactgcagaacggctacctcatggcggatcatcactgttccggcttgtatgccactctccgaagcttcttcagcggcatgttcggctcgtcgtcccaacgccatgagaacaccactggaaccgggccgttggtcacgtactcgatggtctcggacggctcgaacgaatccggaatcttcgttcgcaaccgaagcacatatgaatcatcatcaagcgtcaccgactccacgtacaccctgcgagaaccggtgattgtcacacgtcgtatggatccgcgaacccattccgcctctccgaacggcggcttgtcgaactccgcccgttgcatggcggtctgctcgttcagactgtcggcctggtcgcgcagggcagctatctggcttttcagtaaatcgatgtcatcacgccggtcgtcgtcgcgttccttggagcttctgtgctccatgacccatccggcaatcgtcacgaccagggtcagcacgaatccggcaagctcgacgccatgttccgcaatccaattcatgaaccacacactacatcaatccaacatccttgttctcgctggaggtgcgaaatgagtggccagaatctcgtcgacgttctgcagtttgtcttgattgtcataatcgcgggagtacagattatgcatttctcctatatcaggcgtctttcggacgtgctggaatcttgcctctcccatacacggccatctccgattcctccggacgatattcgaactgattgccgatctccttggacaagagatatttacgggaacagcgtggatcgtgccgatacacgggtgagggacgaaacacgacctttacccagcaagtctcccaggacgcaaaagaaggcttcatcgtgaaaacgacatgttccccggccttgatgcatcccgcctcgaatgtctcccaacactcccactccttgcctgtatccggattgacgccattgcatctgatcagcctcacgtcatacgcatcggcatcaccggtgttccacaactcgagattaagcaccatgtctttcttctcgccggcgaagtacgtgggatgcgcttctccgacgaccagccattcgaccgttctgcgatcccatacacgcagaatcaccgtcaccgcgaaagacacgactgcggagaccagcgcggtcacaagaatctgtcccaaatcaatctgtcccaaaaccatgcagaaaagcgtagtcgctttcctgggcgtctggaacatcgtccaataccttgcaaaggaaggtacgaaatgagtggatataaggcaacccctgcggtgcaagcgcaggggtgtggtcacggcccgttctcagatctgttcgaagctgatggggcatccgggcgtccagtacgcagttacgtcgttcccggaatccgcgagcttgccgctgaagacgacccctccttgcgtcctggtcgacgtggtgagcttctgggagatcgcctgcgtttcggcgtcgtcgaacggtccgatcagctcgtcgttaaaacggatattccattgcgccatgtaatcacctcccttctttgcgtgggtgccctcattgtctcgctcgaactcgccggcaaggaggtgaagtgatgggaaccgtcagcacccgcattgaagaaggggacggtttcaaagtcctgagatacgggctcggaagcatcgttctcatcatcggctatccccagtcggaaagcgacctgatcgacgcgcgagatgccatcgccaaacagttcgattacgaaatcagcatgaacgggcgacggcacggcggacatcgttccgtccgcgccgccgccatgccggagtcagtcgtcgatctcaaccagcgaccaccacagggcggcacgcggattgagatagataagagacccctcggggacaccgagagcccgacctcgaaccgaaaccacgccacccgacgcggcggcgctctccaattcatcgagaatcttcgacggatactcttctcccgctaaatcgacaaaccgtcgcttatcggcggtcgtctcaaacacgagtcgatacgtcattattcttcacctcctctcattgctggtagttaggcaatgtccagcttaggggaggtgggccaacgcataaaaaggaagaaaaccaatgagcgagaaactcaccatcgcgaaccccgaggacgggaaccgtcccctctcctatcaggctctcagccacggcatcgacgaaatccgtttgggtgacatgggcatcacggacgcggtgtggcgcgggccgcacagcgagctcgtggcgttggcccgtcgaatcctcgacgcggaggccggacgatgaacgcccgggattacggacagcacgcgagcggctaccgcaggcccgagctcgacgaattgcctcgcggcttcatggtccggttgattctctgggccgtggttttcgccttctgcatcggctgggtgatgtcgcacgccggttgcgcgcatcccatcggcaatggtttggcctcccttgtgggattcggttgcgcgccattgcggctcctgtgccttgtgctgagcgaggcgggagtcgaataacaggcttgccggggttcctgttctttccttccccggcaatcgacaaggacagtcgttaacaccatcgcgccgcgctcggagcagcgggtgtggcgcatggggccggcaggttcgcccccgctggagatcacggtgtcatgtacgtggcaaacagcgggaagccgttcgattcggcacggtccacccccccatatccaccgacatcgaaggcccctcatacgggccggaaaggagaaccatggccgacgaaacagaacccgcgatgttcgacgcgttggaaaaggcgctgatgccgttgaacagcgcacgccagctggccgagctcagcggcatcggcgaatccacgctggccgaatggcgcggaacgcacacgggacccgcctacgtgaaatccggccgccgcgtcctctacccgaaggaggccgtgctcggcttcatgcgcgccaacctgcgcgaatgcaagaaggccaacgcatgaccggccagccgaacgactacgagcatcgcgccgagggcgagtccacgttcgaatggccgttggattccgcggggatgcgcatgagcgcgggcgaactattggacagcctgctcgccaccatccagcatctcaaccgcacggacgcatggccgctgaccatactgccgccccggttcggcgatgtgctggtcgaccgggaacgccgccagatctcggcggtctgcctgtggaaacgcaaaccagtcaaaacccataaggagggatagatgtgcgagaaacccgaaaccgaaaccgtgacgccgcgggtggccttcgccaccatattgcagtcgctggtggccgattcgccgaacaagccaacgctgcccgtgatgctgtccatgcttgaccaggcgatggatcataccgggctgcgactggagcgcgatgccacgccgacggactatgaggacgatgtggcggaagcgcgccgcggcctctcgcgcaaggcgtatgacgtggcgagcctgctggccgacgtcgcgtccggtgacggcgactgggaactgttcgacctggccgacgaggcacgttccgccgccgttgccctgctgcgcgcgttggacggtgatgcgtgatggccggggagagcgctctcacgatcatcggcaacctgaccgccgacccggagctgcgcaccacgggcggcggcgcgaccgtggcgagcttcacgatcgcttcgaccccgcgcaactggaaccggcagaccaaccagttcgaggacgggcaggcattattcatgcgctgctccgcgtggggcgacatggccggccattgcgtccagtccctgaagaagggcatgcgagtgatcgcccagggccgactgagacagcactcgtaccaggcgcaggacggctcccagcgcacggtcatcgacatgaccgtcgacgagataggcccctcattgaggtatgcgaccgccgctgtcaaccgtgtccaatccggtcgcggctattccggtggctcgacctatggggatccggccaaacccgccaaccagcaacaaggctggcagaacggttccccggcccagaaccccggcatgccggaaggtgacccgtgggctcagccggcacccgcctctcctggcgccacgttcggcgcttccaacgatttttcatcagacagccaagaccccgaattctaaggagattcaatgtcacgaaagaaaaagaccgatggcgtgcaggacgcgctgatacccgacgagatcacgccgctcatgctgctcgccctgacagccaaggcatcacgcatgaaggacgccgcggccgcgttccgcatcgcggccagcaagatgctcgacctggccaccaaggatgaatacatcgaaaaatacaagaacatcgaccccatcaccgacgccttgtacgacgcctgcgatctctcgcagcacatcttcgacgccgccaacgcggtcaacgacctcattaactatccggtcgaggcccgcgagcgcgtggtgaaggcggatatcgagcgcagtttgttggatccgtggcgtgatctgcccacgtctggtgtggatccggataccggtgaaatcaaggaggactgaatcatgagcaaacgcaagcacggacgccagcaactggagcatgagcgccaacgccggcgcaggaagcgcatgccgcacctgcccgtacaccagaatctatcgatcaaggagcagtgacccgattcagtggctatcagcatcatcgatatcaacgtaaagagcctcatcccgaacccgaacaatccccgcaaagacgtgggcgatgtcaccgaactcgccgacagcatcaaggagcagggcctgcagcaggcgcttgtggtaacccccgaccatgaggagcacggcgagcgcatgtttcgtgtggtgattggtcatcgtcgtttggcggcgtgcaagctggctggcattgagcgggtgccgtgtgttgtgcgtgagttggatgcgaagaccgagcgtgagctgatgctggtggagaactgccagcgttccgatttgacgccgttggaggaggctgacgggtatcagggtttgcttgacctgggtgccggtgtgggtgagcttgcggcgaagacgggccgttcggagtcgttcgtgcgtggccggttgcggatcgcgcgtatccccgccgatgtgcgttccgggtcggaggcgttcgctcagttgtcgctttcccagttgggtgatcttgcggagttcgaggcttatcccgacatgatggctgagttggcttcgatggcgggcaccaagaactgggattggaagcgtggccagctgcggtcgcgggttcgcgtcgaggcgtggcagcagagcatgagaacagcgcttgaagctctgggcctgactgtggatgtctcggcttcgacgtggacgacgccggagggctaccggttctacgacgtgtggagcggcgagcccgacgagttcgagaaatggtatgggcagtggcgcgagaagaacccgtacggcgggccggtgatccgattctctgagcgcaccgtattgtgcttcccgcaattgtcgcctgaggagatcgccgaacgtgacgccaagagcgagcggagggaacgggagcaggcggcattccaggaggcgctggccgcccgcaaggaattcgacaggctggcgtacacgctgcgcacggactggatcaggaagcacgccaccgggttcaacggcggccagttgcgcaaggccaccacgcgtctgagcctgctcgcgctgaccggcaccgaactctgccacggactgatcagcggcgcctcatggaacaacatcgacaacgtgctcgacgcatacaatctgctcgccgccacgccgctgccatacggcgacacgagcgatagggggctgtggtgcgaacagaacctcacggaactgcatcgccgccagcacgtcgagggagccgcgaacagggagctcctgctcatcctgtgcgcccagatcgaagcactcatcaaacccggcacatgggccaacaaggacgacatcaccatcgcccaagcctactaccacacgctcgcagacctcggataccccaccagcgacgaggaaaacaaggcgctcaacggagaatatctgcccggtgaggacgaagaggcggagtgattatgacgtggaatcccatgccaagcaaaagagccacgccttgcggcgtggctcttggaaggggaaggcgttcgctattcctcggattcgtccgaacgggcgggattgatgcgttcggcgtcgatgtaatccatgaagcccgtggcctctccgctgcgctcgtcgagagggacgaactcatcgtccgcgcggtctgcggtaagttccacgaaacgacgcagctcgccataggtgagctgttcgaaatcgatggagacgcacatgctgtaccgggttttttcctcgttgctcatgcgtcaattatcgcacggttgggaggtgtgtcatgtcggtgagtgtcgacagcaccttcgcgttcgacccgaacgtgcaagacagcggcatggccgcgcgcggcctgtacgtgacgatggtgacgtggtgcgaccaccagatgtacacgagacccgatgagttcgacggcactttcgacctgaaaagggtcaagaacgtgggcggaacgttgcgtctcgtgcgcgaactcgtggcaaacgggctcttcgaagaagtgtccgagggcgtgtacacggtcgtgacccgtcgcggattggccgtgttcggaagcttcaagaaccagaaaaagccattgaccccggaggaagcggccgaaattcacaacaagaaagtcaacgccggacatgcgggaggaaaagcatcaggccttgcaagacaagcgagagccgaagcaaaggcgaagcagaacgcttccgatgaaacgaagcagactgcttcaaccaacgtgaagcagaacgaagcagacgcgaagcagactgcttcaacatcagggaagcaaaacgcaagcactaccatacctaaccaaaccatatctatttcctcccctaacccctccgcgccgaaaaccgaagcagaaccgaaccgggtgaccctggcccagctcgaagaccggatgctcgccgacccgttcaccacggcgtggaacgcctacccaagccacaccggcagccgcaaggaagccgaaaccgcgttccacgccgccacccaaggcctgggcggcctgccgccatgccagcccaaagacctcatcggcgccgtcatcagctacgccaaaaccgtggaacgaccccaatacgcgcccaaaatgagccgatggctacgcaacggccaatacgtcgaccacctgcgcagcaaacccaaccgcaccgaatggggcggcatcacccgccaatggctcaaccagcacgccatcagccaagtcccctcaggcacgtggacggacagcgtcgaacaaacgttctgggcccacgtcaaaaccggcgaagagccggagaccgtggccgcaaggctcgtcaaggaaatcaacgaaaggagccaggcatgagcgaccagcccacatccgagaccctgcgcctcgtggaaggccgcgagtccaaccggtgcatcgtgtgcgaccgatacctgcgtgcgggaaactggcccggcatgagccaccaccacaggaaacgccgcagccagacatacggcgaccccgaacggcacgcgccatcgaacgtcatcgacgtgtgcggcacggacaacagcaccggatgccacggatggatacaccaacaccccgaacaagcccgagcattgggctacctgctcaaaagctacgaccccgagccaagccaagtgcccgtgtacagctgccggcgcggctggatactgctcgacaccgacggccaatggcattcatgcccgccacccgaagacctccccacccacatcaacatcaagaaaggcaacgaatgaacgacaccacgacaaccctcgccatcggccaccgga

SEQ ID NO: 2591 - DNA, 92425 bp, Unknown
  R222_15m  MAG No. k141_7097
ggcagcttcaaggtcatgcagattgacgcgacccgagtcgccggtccccaggagatcgtcctcgaatacctgctcgccaagaagttcggcgtcaaggtctgccctcacgcgggcggcgtcggcctgtgcgaagccgtcagccagctcgcgatgttcgactatgtgtccgtctccggcgagatggaggaccgcgtcgtcgaatacgtggacaaccagcatgaatacttcgtgcatccgaccgtcatcaagaacggacgatacgtcgctccgctcactccgggcaacggcacggagatgaagatcgacgaatgcatgaagtacctgcacaaggactgaccggtcgggaggacctgagatggacctgcatcttaaagacaaggtgatcattgtcaccggaggcttcaaaggcatcggcaagggcataacgctgcgcttggccgaggagggcgccattcctgtggtgctgaaccgtgatgacggcgccggcgacgaattccgacaggacattgaacggatcaccgactcgtatgacacgtatctgatcgacctgaacaacaccgacgacatcgcccccatcgtcaagtcggtcatggagaagcacggccatatcgatggcgtggtcaacaacgccggaagaaacgacaacctcgcgctcgagaccacgtcgtggcgtcagttcgaggagtcgattcacggcaacctgacccactactacgagctggtccatcagtgcgtgccggcgctcaaggccagcaagggctcggtggtcaatatcggttccaagaccgcattgaccggtcagggcaagaccagcgcctacgccgccgcgaagggcgcgattctgggactgacccgcgaatgggccgccgccctcgccccggacgaggtccgggtcaatgccgtcgttgtggccgaggcatggacaccgctgtacgcacagtggatcaagacgttcggcgacgagcaggcgcagcgcgcgcagcttgagaagatcaccagcaagatcccgctcggccaccgcatgaccgagacgtcggagatcgccgacaccgtggcgttcctgctgtccgacaggtcgtcgcacaccaccggacaatgggtcttccccgacggcggatacgtccacctcgatcgggcactcggctaggagataccgcacgggggatcatcggttcgcgttcgcgtgtccggatcccctgttttcgattcatcgctccaacaccgctcggcccgcggacatattcgccaccgcacgcggaacgcctaccatatcgtcgaaaggaaaaaatcatgacttgcaacgcccaattcgaaggcgtgttctgcccttccatcaccatcacgaacgcggatgggaccattgactacgataattggggcaagcacctcgatcatctcatcgacgcaggcatcgacggtgtgttgctgttcggcagtatcggagaattctacgccatcgacgtcaagacgaaggcagaagcggtgcgtttcgccgtctcgaaagtcgctggacgcatgaaggtgctcgttggcgtgggagacaccaacttggacaacgtgaaggcgttggcggcggaaagcgaagcggccggagtcgacgcgctgctcgccgtgtccccgtactacttcggcccgtccccggattgcgcgaagcgctacttctctgcggtggccaaggcgacgacgctgccggtcattctgtacaacttcccagccaggacgggcaacgacctcacgcccgaacttgtggcggacctcgcagcggagaaccagaacatcgtcggcatcaaagacaccgtcgacaccatcagccacaccaggaaggtcatcgcggccgtccgcaaggtgaatccatcgttcagcgtgctgtccggattcgacgagtactacaccgtcaaccgaatcagcggcggcaatggcgtgctgtgcggattgaccaatgtggagccggagacattcgtcagcctgcatcgtgcatggcagtccggtgattacgccacggccatcaagtcggctgagcgcatttcctatctgatgcgcctgtacgacactgccgacctgttcatcagcgccatcaagggcgcggtcaaggcgaagggactgccaatcgacacgtccatccatgaacccgccgtgcagctgaccgatgaacagtaccgcaatatccagagcattctaggcaagtaacaatcaaataagtctgaagacaagcaggagcagctatgctgaaagggataccgtcgatcatacagcccgatttattgaagattctcagtgaaatgggccatggcgatactatagttctcgcggacgcccactttcccgctgaatcattggggattcattcccatgtgatcagatatgacggtcagcccatcgaaccacttctcgatgcagtgatgcagcttataccgttggatcaatatacggagcatccggtgtttttgatggataaggttcctggagacaccgtcgacaccccgatatgggaacggtatcgtcaggtaatcaccaagcatgagcctgacaggcaaacggctatcggaatgctggaacggttcgccttttacgatgaggccgaaaaagcctactgcatcgttgcaacaggtgagcagtcacagtatgcgaacatcatcatcagaaaaggcgtcattcgctaataaccgaataggagcaatataatgagcaatcctgcagatgcgggcatcaacctgaactatctcgcaaacgtgcgcccatcgtcgcgccagcttgcctggcagcgcatggaaatgtatgccttcatacacttcggcatgaataccatgacagacagggaatggggtcttgggcatgaggatccggcgctgttcgatccacagaatgtagatgtggaacagtggatggatgcgctggtggctggtggaatgactggtgtcatcttgacatgcaagcatcatgatggattctgcctgtggccatcgcgttacacgcagcataccattgccgcctcgccatggaggggcgggaaaggggatctcgttcgtgaggtcagtgagtcagccagacgtcatggactgaagttcggcgtatacctgtctccgtgggatcgaaccgaagattcctatggcaaaggcaaggcatatgacgatttctacgttggacaattgactgagttgctcacccagtacggaccgattttctctgtatggctggatggtgccaatggtgagggcaagaacggcaagactcagtattacgactgggatcgttactacaacgtcattcgttcgcttcaacccaatgcggtgatatccgtatgcggtcccgacgttcgttgggctggaaatgaagccggacatgtgcgtgacaacgaatggagcgtcgtgccccgacgactgcgctcggcggagctgactatggaaaattcacagcaggaggacgatgcgtcctttgcctctacggttcgctctcaagatgacgaccttggaagccgtgaggcggtttccggatacggggatgacgtctgttggtatccggctgaggtcgatacctccattcgccctggatggttctaccacaagtatgaagacgacaaggtcatgaacgcagatcagctttttgacctctggctttccgcagtcggcggcaattcgtcgcttctgctcaatattcctccttccccagaaggactgttcgcagaaccggatgtggagtcactcaaggggttgggaagccgtatcaatgaattccgcaaagcattggcttcggcttgttgcgaagtcaagaccagtagcgcgaacgaagctgcaatgcgacttattgatgggaatcaagacacgtattggtctcctagcaccgatgacgtggcccctgctgtcacgctcactttcccgcaactgacgacgatcaatgccgttgtggtcgaagaggccatagagtgtgggcagcgcatcgaacatatgcgcgtcactggcgtgctatctgacggcactgagtgtgtactcggacagtccggcacagtgggataccgcaggatactccgtttcgacgatgtcgaagtatcttcggttacccttcatgtggatgattcaaggctcacgccaatgatcagccgtgcggctgcggtgcggatataaggcgggtatatcaccatgaaactcacattcgatggaatctcttcgtgctgggaagaaggcatcccgctcggcaacggacgcatgggagcggtcctgtgttccgaaccggaaaccgacgtgctgtatctcaacgatgacaccctttggtctggatatccacacgcggaaacctcgccggtgacgccggaaattgtggccaaggcacgtcaggcggcatccggcgacgattacaccgccgccacgcgaatcatcaaggaagccacactgcaggagaaggacgaacagatttacgagccgttcggaacggcccgtattcagtactcgacccctgcagacggccgtgagagcatgaaacgccagctggatcttgcaagggcgctcgccggtgaaacattccagatgggtgatgccaacgttcatgtcgacgcatggtgcagcgagcccgacgacctgttggtctacagaatgtcatcggatgcgccgattgatgtgaacgtcagtgtctccggcactttcctcaagcaatcacgcgcctcgttggaaacggtatccgacggccatcgggccaccctcatcgtcatgggccggatgcctggacttaacgtcggacttctgcctcacccttccgaacatccttgggaagatgaccaggacggaactggaatggcgtacgccggtgcattctcccttactgtcacaggtggcggcatcaatgtgggggacaacagtctgcaatgttcgaacatcaccggattatcgctccgcttccgcagtatgagcggattcaagggaagcgaccagcagccggaacgaagcatgacggttatcgccgaccatctggagaaaaccattgacgattggtcgactgatctgcagaccatgctcgaccgccatatcgcggactaccgcaaatatttcgacagggtgtctatccatctcggttcagcccatgatggtgatacggaactaccgttctcggcgatccttcgctcggatgagaaaaaggaaccgcatcgtctggagatgctggcggaagcgatgttcgatttcggccggtatctgcttatctcctcgtccaggccacacacccaacctgcgaatctgcaggggatttggaaccataaggatttcccgaactggtacagcgcctacacgacgaacatcaacgtcgagatgaactattggatgaccggcccctgcgcgctcaaggagctcatcgagccgctcgtctccatgaatgaggagctgctggcaccggggcacgatgccgctgacaggattctcggctgccgaggatcggctgtcttccataatgtcgatctctggcgtagggctcttccagcaaacggcgatccgatgtggtcgttctggccgttcggccaggcatggatgtgccggaacctgttcgatgaatatctgttcaaccaggatgcatcgtacctgtcccgcatctggccaatcatgcgggacaacgcgcgattctgcatggatttcctatcggagacagagcatggactggccccgtcccctgcaacatcaccggagaactgtttcctggtgaatggagaaccggtatccgttgcgcaaagcagtgagaatgccacggccatcgtgcgtaatctgcttgatgatttgattcaggcttctcacgatttggaaaaccttgacgaagaggacagcgctctggtccgtgaagcggaatccgtccgttcccaactggctgaaacgcgattgggagctgatggaagagtccttgaatggaacgacgaattcatcgaatccgatccacagcaccgtcatctgtcccacctttacgaactgcatcctggtgcaggcatcacgtctaagactccgcgtctggaggaagccgcgagaaaatccctcgaagtgcgtggcgatgatggttccggctggagcatcgtatggcgcatgatcatgtgggctcgtcagcgtgatgcggaacacgccaaacgaatcataggcatgttcctacggccggtggatgcgaacgctgaaaccaatctgctgggcggaggagtgtacgacagcggattatgcgcccacccgccgttccagatcgacgggaaccttggattcccggcggccttgtcggagatgcttgtccaaagccacgatggctggattcgcgttcttccggccctgccggaggattggcatgagggaagcttccatgcgctccgcgcaagaggtggaatccaagtggatgcgacctggacggatcagacagtggaatatacgttgcgctgttcgaagcctacggagattacgctgaacgttctggggactgatatgggacgtgtcgcattgtctccggataagccattcaagggaaccatccggcgttaacgtattgcgttatatccgttactaaatgttgcggaccgtctttcctaatagaggaggacggtccgcaatctttttttgatgggaaaggagattccgccattttccacgattggtatgcgcagatgaacctgtacagtgaaagctatgcgtgtaatttctggacgattcaagggtgtggcgcttgctacgccgaaaacgggtacccggcctaccacggatcgcaccaaagaggcgattttctcgcacctcgactcatggggagtgctggatgatgcccgtgtactggacctgttcgccggtactggtgcgttgggcatcgaagcgctgagccgtggcgcgcgagaactcgtggccgtggaaagttcccggcctgcggcggcgctgattaccaagaccttgtcgcagttacagaagaatcgttcgtgggatgcctcgctcaaggcccgtgtgttcaccaaaaaggccgagcaagtggctggcggctttggtgaatcctttgacgtgatattcattgatccgccctacgcctatgagaccgctgaatgcaatcagttgttggccaatctggcggtgggcagcgccaccaacgagaacaccgtgattatgctcgaacgctcggtacgctccgacatccccaccgcccccgaaggctggcaaatcactgaaagccgcaactacggcgaaaccgccgtcttctacatcgagcccgcggatgacgactcggatatagagcgttccgacgattccgccgcgtagtgaatctcccaccgtgtggtgaattaatcggcgagccggcgcggatgggtggcggagacctcccagcccaaggccatcagggtcttgcggtcggccttatccagcgccttgcaatccagtgccgcgataaggtctggccggatctcggcggtgcgggccagcgcttcgtcgcggcgaaaacggtccaccttgccgtggtcgccggacaacagcacgtccggcaccgcaataccacgccacacggccggcttggtgtactggcgatgttcaagcagtgcgtcctcgccggtgtaggattcctcgacaatcgaatctgggttgcccatgaatccgggcatcaggcgggtgatggcctcaagcatcaccgacaccgccacttcgccaccgttcagcacatagtcgccgatcgaatattcgcgtacgtcgacgccctgggagcggtagtagtccgggatgcgcgcatcgtagccctcataccggccgcagccgaacagcagatggtcggcatggctgagctcggtggcgtcgcgttgggtaaacaacggggccgatgggttcgggaagatgagcaccggtgtgccggatagggcggaggatttagacggccgcgagaatcccagcagttcgtccaggcattcgctccacacctcgggcttcatcaccatgccggccccgccgccgactggcgtatcatccaccgaatgatgcacatcgtgggtccagtcgcgcaggttgtacgctttgatctccaacaatcccttggcttgggctttgcccatcaggctgaggttcatcacctcaaagtattcggggaacacgctcacgatatcgatcttcatgttatccagcctaacggtagccccgcccgcattacacggccaccactacactattgcggtgatgaatacgacgatgaacctccccacccgcaaaaagcccgaagtgttgtccccggccggcaacctgaggggcctgaaaaccgcggtcgattatggtgccgacgccgtctactgcggcggcaaagccttcggcatgcgatcggcccccaaaaacctaagccttgaggactttgaggaaggctcgcgctacgcccatgaacgcggcgcccgcgtgtacgtgacctgcaacgtgctgccgcgcaacaacgagatcgaagccatgcgcgagtacgtcggccagctcaaggacaccggcgtggacgcgctgatcgtctctgacatcggcgtgatgatgatggcccgccaagtggctccgaacctggaattgcatgtctccacgcaggccggcgtcaccaattaccaagctgcgaacgccttctatgagcttggcgctcgccgtgtggtgttggcccgcgagatggacttgcaggccgtgcgtgatattcgcgccaacattcccggtgacctcgacatcgaatgcttcgtgcatggcgcgatgtgcatggcgttctccggccgttgcctgttctccaactatctgaccgggcgtgatggcaatcatggcgaatgcgcgcagccatgccgctggaagtattcgatcgtggaagagaagcgccccggccagtacttcccgatcgagcagaccgagaacggcgcctatctgttcaattcgcaggacatgaatatgctggggcacttggatgatttgattgactccggtgccaccagcctcaaaatcgaaggccgcgcgaaaagcgcctactatatcgccgccatgaccaacgcctacaaaaccgcggttaatgaatacatgattcaacgcggttttgaagacgctgatggcaatgttctgaagcctttccgtgaccgtgtgattcgcccgggcgaccccgattttggccaaggaaccgaagatcaagtgatgagcaatgccgatgccgcgttcgccggtgtggccgatgagggatatgaccgtggctctgatactgcggttgccgattcggtcaccggctcggttgccgcagaacgtgaccgcgtgacggttgctgatgccgccgactcaactgcctctggtacgtcggccggcaccgccgtcgaacccgacggcatgagctcccacgcccgctccacgcgccgcaagtccaacaccgcggtcgaacagatcgagaccgattggaagcatgcggccgttcgcccggccccgcacgtcgaactgcccgaatggctgctcgaggaaaccgacaaggtggcccaccgcgactactccaccggcttctattacccggagcacaaggtcacacagaacaccgaccgctccgcctacttccgctcatggctggtagtgggcgaagtgctgagctggagcgcggacgaaggcggacgtgtcacgctgatgagccgtaacaagatcgagcccggtcaacaggttgaattcctgctgcctggcgagagaccattggtctttaccgtgccggaaaccggcctgcgcgatgccgatggcgcgccagtacccgccatcaataatccggcgcacgtgttctcgatgccctgcccgcaccaggtgcccatcaacgccgccatccgctcgcgcaccaaaaagcccaccctcaaagccgaataacctaccactccgcccccgctgactgggggtggtcatgggaatcatgaacaccgcccgcacccaagaaagaatgccttatgcctgaatacagcgaagaaatcctcgattccaacagcatcagctctaccgataaagccggtcgccctattccggtgaccatccccatcgcactggcccccggcatcaaggtggtgtacaccacgcgactgggcggcctgagcgccggcgattacggcaacctgaacctcggcggcaagtccggcgacgaacctgaggccgtactgtcgaaccgcatcgcactcgccgaagcggtgcaagcccgcctatcgctggtctcccaagtacattccggcgtggctgtggacgtggacgactcgttcgtcatcaacacccccttcggcttcgacgtgtccggcacacatggtgagactgacactccgcacgtcatcgaggcggacggccaggtcaccgcacaatccggcatcgccctaggcatgttcgcggccgactgcctgccggtgctgctgggcgacccggtcactggcatcatcggtgcggcccactgcggccgtcgtggtctggagcgtggtgtgatcggcgccacggtagacctgatgaagagcaagggtgccgatccggcgaacatcgtggccacactcggcccgcgcatctgcggcgactgctatgaagtgggcgacgagatcgccgatcggttcatcaagcgcttcccgctgaccaagacgaagacccgtttcggtggtgccggcatcgacatcgccgaagccgcgatgattgacctcgccttcgccggcgtacaccaggtggtcgattcgatgccgcgcgtgcacgccgccacccagtaccttgaggaagacccggaactcgccgaactgtgccgtacggacggcgaaggcccggccgagctcgcggagcgcatcgacaacatcagccacagcatgtgcacgctcgaaaacccactgtggtactcgcaccgccgcgccgcgctcgccaacaaaacacacgaaggccgcctccttgccctcatcgtgcgtgactaaacggagaatgcgggcacattccgtggagaagatgtgatgcagttcacggacggccagccctcaccctacggtggtgcctatgactgagagagatttcgatacccccgtcgagacgcctaccgtccaaccagcccccgctcagggcgccaaaccggcacaaaccgtgccggtggtggccgtggtgctggccgccggcttcggtacgcgcttcgaccccgacaatcccaagcagcttgtctccgtgggcggcaagcccatcgtgtgctggagcattgatgcctttgaacattgcgatcgcgtcagcgacatcgtggtggtggtcaatcccaaggtgcgcggcgaagtggaaacgttggttggcgagatgggctacaccaaggtccgcgtcatcattgacggcggtgacgaacgtgtggacagtaccgccgccgcgctcgacatgctggctacggctggcattccggacgatgccaagattctgatccatgacgccgtccgtccgttcgtggaacagtccgccatcgacggttcgattgatgcgctcgaccagttcacggccgcgaccgtggcctacacctcaaccgacaccgtgctgttgaccgaggatctgggcgatttgaaagtggtcaagtcggtgccggaccgcccgaacaccttccgcgcgcagaccccgcaatccttccgcttcgcgacgattcgtcacgcttacgatctggctgccgccgacccggacttccatcccaccgacgacacgcgcgttgtggtcgattatctgcctgatgaacccgtcgccattgtctccggtgcggaaaccaacctgaagatcaccacgctggaggatattcccacagctgagcgtatcgccgaggagattctcggtcgtgatcccaaggaagaggcccgcgcccgcatgcacgccctgctggcccaagcggccggccagatgcatcgctagactggcattatgcgtgaactcaatgttgtgatctccggcttcgaccactatgacggcgtggaggtcaatcccgccgtcgaagtgcccaaggccatcgccgagcaggggttgggcgtctcctctgctccggacgatccgttggagcaggtcgtcgtcaccgtccatgccgtcagcatcccggtgagcttcgccaaagcctggcccacgctgaaagagacgattgaggccaccaagcccaatatcgtcatcgccaccgggctcaagcacgcagcccgaggcgtgatgctcgaacgatgcgccaccaacctgatggacgcgatcaagccggacgcggacaacgtgaccccacgccgcgaacccatcgaccccaatggcccggccgcctattggacccgcctgccgttgcgctcgatcctgaatgatttcacggacgattcgattccggccaccctgagctcggacgcaggcacgttcgtatgtaattcgctgttctacaacttgctgaactggaccgccacccaggagcgggtgctgggcggattcgtcagcttcccgccggtcgtgccggcggattccagccagcatggtctgccactcgaccagcagatcgccgctggccgtgatgtggtgcgcgaagccgtgcgctactatctcaagccctccagctccggcatcctcatcgcctagcacgctgcgcgccacgccggaatagaacatggttcgcacgcattgtaacgattgcgcgtcactcaacgcccagcgctagtgcgatgcgctacagtgcttcaaggatgtgccaagagctttatgcgtgtgcgaaaggaataaacagcgatggtggatcgtttcccggtggtgctgcgaggatatgacaaggagaaggtcgatgctgccttcgacgctactcaggagagtatgaagcgtgcgcagcagacgttggccagcatgcgtgagcagattgcggcggatgacgaccgtattctgcaactgcaggcccagcttcaggaagagaagaacaagaagccggaaggcaacagcttcgcttccctgggggcgaacgcccagcagatgcttgcctccgccgaacagacgagtaccgaactgctggaacgcgccaagcaggacgcgtcctccatccgtaccacggctcaggcgcaggccgaaacactgatcaacaacgccaagctggatgcccagcatattgttgacgacgccaatgccaaggccgcctcgattctgacgaacgccaacaatcaggccgaatcagtgaccacctccgccaacgaggacgccgcacaactgcgctccgaaaccgccaagaccatcaccgaacagcgtcagaccgtcgagcttgagctcagcaacgcgcgcgaagagcacaccaagaagatggcttccgaacgctccacccaagagcgcgaaatcgccgatatgaaggcggaagctacccagcaggttgccgcaatgcgcaaaagcgccaatgaggagatcaccaagcttaagtccgattccaacgatcagattgaggcggcactcgccgaggccaacaagaagctcgccgacgtgcgcgagcaagtgtccaagatgatgaccgaagcccagcgcaaggccagcgaaatcattgatgcggccaagaccaagggtcaggaaatcactgatgaggccgaggtcaagcgcaccagcacgatgagccaggtcaacgccgaagtcgagcagatccgtcacgacatcgccgctcagcaggatgaggccacgaagaaggtcaacgaactcctgcagcacctcgaagagcgtcgtgtggcggccaagcgggaagccgatgagttggtcggccaagccaagaacactcgcgaccaagccgattcatatgccgcgtccaagcgcgaggaggcggacatccaggccgccgcaatcgtgcataaggcgggcgaggaagccgatgcgcagatcgaggagcgtcgtgccgccgcccaaagcgagcttgacggtctgtccaagcgcatcgccgatctgcaggaacgcgagtccgtcatcacccagcgtgtttcggaactgcgttctatgttctcgcaggcgttctccggattcgctttcggtggtaatgcggcggcctctggtcagagtcaggaagccgctgccgtggcgtcattgccggtggtcgcgcccgtcccggaagtcaagcctgtacacaacgaggccgatgatcagccgggtgagttgagcggaaacgagtcggctgccgacgatcacaatgagacagatgcggcaccggctgattcggctgattcagctgcgcagaatgagcagtccgaatcgtctgagccgtccgagcaccagacacagggcgaaccggaggccccgactcaggagaatccagccgtatctgagcagaacggcgaatgacaggccttcgattagactactagcggtaagaattacggcacctgcgctttcgagccaggtgccgtattcgtttggatctgcgccacaagcgcaccatcacagaaggagtatgacatgagtgaattgacgcctctgaccggcgaagcattgaataccctgcgcggcgatttcgcacagagcggcaccaaccgtctggccatgaacgcggtgaccgccgccggcatcgacaaggtggctcgcaattatgaccgcgctcgtctgatgcagcgccgtttctccaccatcgttgacaatggcgaagccacccatcaggatcgctccggccgctgctggctgttcagctccctgaacgtggcccgtttcgtggccaagaagaacatgaacttgaaggagttcgagttctcccagaactacgcgatgtactacgacaagctggagcgcgtcaactacttccttaaggatgtggccgctctggtggctgccggagagccttccgactcccgcctgatgcagcacctgctcgccgacgtgatgggcgatggcggccagtggaccatggccatgaacgtgtacaagaagtacggcgctgtgcccaaggacctgttcccggagaccgaatcctccaagaacaccggtgaaatgaacacccagctgcgccacatgctgcacaccgccgtggcgcacatgtacgccgctgacggcgatgcctccaaggtcgaggcgattattgccgacgccactgctgccggccaccgtattctgaccatccacctgggcgagccgccggtctccttcgactgggaatggaccgacaaggatggcgaattccaccgcgacggcgagattacgccggttgagttctggaagaagtacgtgggtccggctggtcttgaggactacgtgtgcctggtggatgatccgcgcaccgagcacgccaagggcaagaagatcggcatcgagcacctcggcaatgtggctggcggcgacgccaccgagtacctcaacgtgccaaaccagttcatgaaggactgtgtcaagcagattctcgttgagcagggcatcccggtatggttcggtgccgactgccacccgttcatggaccgtgagaacggcgcttgggccaccgacctgttcgagtacggccgcgtgtacgacgtggacttcgatttggacaaggaagcccgcgtgcgcttcggtgactccgccatgaaccacgccatggctttcgccggcgttgacgtggccgacgacggcaccacccgccgctggcgagtggagaactcttggggcaccaagatcgccgacaagggctacttcaccatgtccgacgactggttcaccgaatacgtctacgaggtagccgtcccgaaggccctgttgccggaggaataccagaaggccctcgaagagccagccaccatgctccccgcatgggacccgatgggcgccttggcctgacttcgccagcctcccggaatcggcctgacggccgatgctgtgttttttcgcagcctgccggctgctagggtctctccctctgtcagcgcgaagccgctgacgggggggccgcggtcgcaggccgcacaacaacacagcatcgccgcaggcgagtccacgcaggcgagttcacccaaagtccataaccgccggcccaacaagcagtccccgtaacagactgctatagttgggcttttgcgtctatagcgccataccgacggtacgtatacaaggaaaggagtcgagcaatggcagcactacgtggtccggatagttccgaggatgaacgtcgtttgggggagcaggccgtctttcccgagaccgtcgatgtcaacattcgtcagcttgaccccattcccgcgccgcgtgccttcctcagggagcagccgctcaccgatgagatgagcgagctcgtgctccactcgcggcaggaaatccgcgacgtgctcaacggccgcgacgaccgactgctcgtcatcgtgggcccctgctcaatccacgacccgaaggccgcgcacgagtacgcagaaaagctggctgccgtcaagcgcgagctggaagaccgactcgtgatcgtgatgcgcgtgtacttcgagaagccacgcaccaccatcggctggaaaggcctcatcaacgaccccgatctggacggtcgcttcaatattcgtaagggcatgtggctggcccgcaaggtgctcaccgacgtgctgagcctcggcctgcccgccgccaccgaatggcttgaccccatcaccccgcagtacatctgcgacgcgatcagctggggtgccatcggcgcgcgtaacaccgaatcccaagtccaccgcgaactggccagtggcctgtccatgccggtgggcttcaagaactccaccgacggctccatcaaggccgccgccgattcctgcttcgcggccggcttcgagcatcacttcctgtccattaacttggacggtcgcgtgatttccgccgaaaccaaaggcaacccggattgccatctggttctgcgcggttccagccacggcccgaactacgatgccgaatccgtgcgtcaagctctggaagacctcaaggtttccaaagcgtccggcccgagccagcatggcctcgtcatcgatgccgcccacggcaactgcggcaaagacgaaaaccgcgaagccgaagtcatcgaagagatcgctgagcgtctggcgcacggcgaacaaggcatcaccggcgtaatgatggaaagcttcttggtcggcggtcaccaaaagccggccccgctcgaccagttggtctacggtcagtccgtcaccgactcttgcgtgccgtgggaacgcaccaacgagctgttgcacaccctagccgacgccgtcaccgctcgcagctcggctaaatagctttgtctttgtaaaaatgctcactgagacccactcagtgagcatttttgccaataacggtggtcatgtcagtttgttcccgtgacaccttatccttgggaaagatactgatccaaggagagatgttatgcagcagcaggaggaagcagcacattcgctgcatccgttgcaagtcggtccgcagccgttgaacaccccggaagagcttcgcgccattcgtcaggcgatgggggaggggaagaacccgctcgttgccactgatgtgccgcgctgggaagatcaggtgggtgtcagtcgcatcatcaaccgccgcgtattggagctggagccgctgcccacgcccgcgcaagtgctcgctgaactcccgctgaccgatcaggctcaggaaatcgtcgcctactcgcgtgatgagattcgcgcgtgcctgtacggccaagacgacaggttgttggtcatcgtcggcccctgttcggttcatgacccgaaggccgcgctggactacgcgcaccgattggccaagctgaaggacgagctcggtgagcagctgctcatcgtcatgcgcgtgtacttcgagaagccgcgcaccaccatcggctggaagggcctgatcaacgacccggatattgatggcagccacaatattcgcaaaggcctgttgcttgctcgcaaaaccttgcttggtgtgctgaaggaaggattggcggccgccacggaatttctggagcccaccagcccgcagttcatctcggacgcggtgagttggggcgccattggtgcgcgcaacacggaaagccagatccaccgccaattggccagcgggctttccatgccggtcggcttcaagaacgccactgacggctcggtgaaggcagcggtcaacggttgcttcgccgccgcccagcagcacacgttcttcggcattgaccatctggggcgtgcctgcgcagtcgagacccttggcaacccggactgccatgtggtgttgcgcggctcgattcacggcccgaactacgatgccgagtccgtggccaaagccatggaagacgtacgcgccgaaatgcccgccgaatccgcagcctcgcacggtctgattgttgattgctcgcacggtaactccggcaaggacgagcatcgtcaggccgaagtcgtgcgcaatattgccagcagaattgcagctggcgaacagggtattaccggcatcatgatggaaagctttattgaagggggcaatcagaaggccgcgccgcttgatcagctggtctatggcaagtcgattaccgacaagtgcatcagctgggaagaaaccgaggccttgctgcgcgagcttgcggaagccgtggccacgcggcgttggcactgagttgcgtcatcggctctctcggggggagcaatgcaacgaaacgtctctacccctcagcctgccattcggcggccacctcccctgacatgggagtcgaaagcgttgtgaaaggaacttacatatgggtatgaaaactgtagctattattggcgcattggatgaagaagtggcactgatcgccaaatcgctcacgcatgtgacgcacaccgccaagggcagccttgacatcgtgtccggcacggtcgactccttcggttctgacgtcatcaaggttgccgcaacggtaggcggcatgggactggtcaatgcggccgccaccacgcagctgctgattgacgagttcgccccggacgccgtgattttcagcggcatcgccggcaacctcaacacccacctgcacatcaacgacgtggtgctcggcggcaccctgcgctacctcgacactgacatgcggctcgtaggccagtggaagcccggcactgcggacactccggtggaggaattccactctgatgaccgtctgctggaagttgccgacgaggcgcttgccaatgcgggcattacccacatcaccggcatcatcgcctctggcaactacttcgtggacacgccccaaaaggtcgaggaggtcatccgactcaccggggctgacgctgtggagatggaaggcgccgccgtggcacaggtcgccgcccgcaatgacgtgccggcactggtgattcgtgccctttccgacaacgccgacaccgattacgaggtattcaaggagttcgacatctccgagtacgccgataccgccgcccgtctggctgtcgacatcgtcaagcgcctgtagtcggcgggctggcccatctcaccatccacgttttgggtatgatgaccacaatatgagcgttttcaaactattgcttataacctgagccatactcggtgttcggcacagcgatgtgcggggttcatcgctggggccacaagccgtaccagttcttctcccgcatgccggtcgctgtgctcaattcgttaagcgacgacaacaccgtcgcgaagcattgaatacacaatgcgcacgctgcactggggtttatctgcagcatgaggagagaaaaaatgactgcaagcgcaaccgcggctgtgaccaaaccggtgaagaaggattcggttcctgagatcatcgccgcttccatggtcggtacggccatcgaattctacgacaactactgctattccattgccgctgctagctacttcggcatgatcttcttcacggacgtcgccaagtccaaccagaccctcgccacgctgatggccttcgtgaccttcgccgtttcgttcctcgcccgtccgttcggctccatgctgttcggccacttcggtgacaagctcggccgtaagaagacgctggttatcgccctgatgaccatgggtatcgccaccttcctggtcggctgcctgcccggttatgagcagattggcgcatggtccgtcgtgattctgtgcatctgccgtgcctgccagggcgtgggcctcgccggcgaatggtccggtgccgcgctggtcgccactgaaaacgctccggccgacaagcgcgccctgtacggttccttcccgaaccttggcgccccgattggcttcttctgcgcttacggcctgaacctgctactcgaatccaacctgagcaaggaacagatgattgccttcggctggcgtatcccgttcctgtgctccgccgtgctggtgatcattggcctgtacgtgcgtgcccgcatgtctgagaccccagtgttccagaaggccactgaagagaagcgcacctccaagcacccgctgcgcgacctgctgccgtactggaaggaagtcgtgctcggcaccgtagccatgggtatcacctataccctgttctacgtactcggcacttggtcgctggcctacggcgtcaagggcttgggcttccagcagggcgagtacctgctcatgcagatgtgctccgtggtgttcttcgccatcttcatcgtggtctcctgcgtgtacgccgacaaggtgggccgcaagaaggtcatgattgccgtgaccgccgccgccttggtgttcagcttcttcgtgccgatgctgctcgtgcactccgccgcccatatcatgatcttcctgtgcgtcggcttcatgatcatgggtggtttgttcggcccctgcggcgcctacctgcctgagctgttcccggtgcacgtgcgttactccggcgccggcctgagctacaacctcgccgccatcttcggtggcgcattcgctccgaccatcgcccaggccctggtcgcctccaagttcggcgttgccggtgtgggctggtacatggccatcatggccgccctcgctctgctcgctctgttcctgattaaggaaagcaaggacaaggactacgagctgtaaatagagctccccatattatgctcccgctggcgggagctgtccacgaaagcggactgagggtggccaatgggatttcggttctttgaccaccctcagtctcactgcgttcgacagctcccgccagcgggagcattttgttatgtcgtcccaccaaaaatgaacaatagacgaacttacgtagtttgggcatctcactacgccttgcacgttttactctggaaatcatggatatctggcagatcgtcgtgattgtggtgctcgccgcgctgatactggcgtgggttgccgtcatcgcctacaacaaaggccgcgtttcaggtcggctcgccgccgaacaggacctgtccggcgacgaggatacgcgttctctattcggtgatgatgcgcccgtgcgccccaccgagcgtcgcctgattgaagtcctgcccgaagccctgattgttaccgaccgcaacggcttggtccaatattcaagccccggctcagtgccattcggcctggtctccggcgaccgactcaactcgcgcgaagtcgaggacatcctcactcaggccgccgccgacggtggcgtgcgtgagcgtgaggttcagctgccggtcaatcgcaattcctatccgtcctctaatggccgaggactggaggccggccagtcacgcccgtccaacatgctgtatttgcgtgtgcgcattggcgatatcggcgatgacctgtacgccatcttcatcaacgacatgtccgagcagcgccgtttcgaggccgttcgccgtgactttgtgaccaacgtttcgcacgaactcaagactccggccggtgccatctcgctactggccgaaaccgtgaccgacgccgccgatgatccggacgccgtacggtatttttccggccgtatctccaaggaatccgcgcgcctgaccgaactggtacatcatcttatcgacttgcagaaagcccaaagcccgcaaagtgtgattgatgcgcggcgcatttccgcgctggatgtggcacgcgctgccatcgccgccaatcagacccaagccgactcccgccatgtggatattcgactgagtgtcaacggacagtcagtgcccacgaaggtcgaggagctggccgatggcgaaggttccttggaagaatcaggcagcccggccacgagcggtccggtgatcaaggccgacaaagaggccatgcaaaccgccgtcaagaacctcgtagagaacgccatccattactcgcccgaacacaccactgtggcggtcggcgtgggggagcgcgatggcaaagtcaccattcgcgtggtcgatcagggcatcggcatccccgccaaatcactggaccgcattttcgagcggttctaccgggtcgacccggcccgttcgcgcgaaaccggcggttcgggactcggcttggccatcaccaagcactgcgtgcaggagaacggcggtcggatttcggtctggtcgcgtacgggggaggggtcgacgttcaccatcgagctgccggccgccccggatgaggatgacgacgaggcccggccggacgagtcgacacaagcgtagggccttggttggtgcccgatatggtgccattccattgccgcacaatcacacagtgggcgaggtgcgcacaccgtgcgtagcacaattacgcaattacgtactttcaggaaacagcaggctaacggagaacaaatggttacgatagtatcggaaaactttgcgcctatgcgcacgggaacatacccaagaaaggctactatggcacgcattcttatcgtcgaagacgaggaatcctatcgcgagccgctggtataccagctcacacgcgaggggtacgacgtgtccgccgccgccactggcgaggaaggtctggaactgttcaccaagggcggcatcgatttggtgctgcttgatttgatgctgccgggcattgacggcactgcactgtgccgtcgcattcgtgagcagagccgtgtgccgattattatgctcaccgccaagagcgccgaaatcgataaggtcgttggccttgagattggtgcggacgattatgtgaccaagccgtactctttccgtgagctgctggcccgcatccgtgccgtgatgcgtcgcaatcaggccacggcccaggcttccggcactgtggatgacgatattccgctggtgtgcggcgatatcgccatgcaggtaggccagcatcaggtcaccgtacgcggcgaaaccgtgttcttcccgctcaaggaattcgaactgctcgaatacctgatgcagaacaagggccgtgtgatgacgcgtcaccagctgatcgaccgcatctggggttcggattatgtgggcgacaccaagacgctcgacgtgcatgtcaagcgcgtgcgctccaagatcgaggaagatccggcgcaccccaagtatctgactaccgtgcgcggtctcggatacaagatcgatactcccgcggagtaaatggaaggcggccttcgggccgccttttttgttgtggattgtgggctcgccgcaggcgagtccactccaaaaactacgtagcctcaacgtagcccacaaacatccaagtgttcatcttctgtttactgatttcggttttgggcccttgaaaccaccaatacgcttgtagttgtcatgaattgaccgggcagcgctgagccgcccgcgaatagttgatagagggattaagtaataatcatgcagaagaacatcctcattcgctccattgccgctctgtccggcattgtgatgctcgcttccgtggccgcctgcggcgataacaccgccaccacgaccgacaacagctcctcctccgattccacttccaagtccaccccggtctccggcaacttctcgggcgccggcgcctcctctcagcaggccgccgttgaagcctggatcgccggcttccagggcaccaaccctgaagccaagatcgcctacaacccgtccggttccggcgctggcgtgcagaccttcctgaccggtgccaccgcttgggccggctccgataaggcccttgccgatgacgaagttgagcagtccaagtccgtgtgcactgaaggcaccgccttcgatgtcccggtctacatctccccgatcgccgtggtcttcaacctcaagggcgtttccgatgccggcaagcacatcaacatggacgctgccaccatcgccaagatcttcgacggcaagatcaccaagtggaacgatccggccatcgccgatcagaacaaggacctgaagctgcccgacaccgccatcaccgtcgtgcaccgctccgataagtccggcaccacccagaacttcgtctcctacttcaaggacgtcacccctgacaactggacctacgacctctccgagaactggccgaacgaggttggccagggcgccaagggcacttccggcgtgatctccaccgtcaagcaggccgacggcaccatcggctacgctgacttctcccaggtcggcgacctgggcaccgtggccgtcaaggtcggcgacaagtacaacgagatttccgccgaggccggctccaaggtcatcgaggactccaagcaggacgacaccgttaagggcgacaaccgcatcgtcatcaagatcaaccacgccaccgaggccgagggtgcctacccgatcgtcttggtctcctacgacatcgtctgcccggcctacaaggacaccaagcaggctgagttcgccaaggcttggctgacctacgtgacctccgacgagggccagaaggccgctcaggatgccgccggcaccgctccgctgccctcctccctgaagtctaagatcaccaagtccatcgaggccatcaagaccaagtgatgacgtcggcccgcaagggtcgtgtggactggacctgacaactgaacgatagactgtagtagtaagagcagtcgccgccaactttaagccgcagtcgtaaaccatacggctgcggcttaagcgggtcaggacccgaacggtttggcaaagtcacagacgaaaaccgcaccacttgaatacttgataaccaccctatataaggagaatccgtgagttcgcaagacaaaacggctgtgcagccagttggaggcaagaccgccgacaaggtgtttcgcggtgtggcatacgcctgcggcatcctgatcctggttgtacttgccgctgtgttcctgttcctgtttttccgcgcctggccactcatcggtggcgatcaggccgccaacagcgacaccgtgtccagctttaccggcggcaaggccagcagcttctggggctacgtgctcccgctgttgttcggtactgtgctcgtgtctttgctggcactgctgattgccttcttcgtgtccatcggcattgcgctgttcatttcgcactatgcacctaagaagctcgccaccgcgctgagctatgtggtcgatctgctggctgccatcccgtccgttatctacggtttgtggggcggcctgattctggtgccggccatctacccgttctggaactgggttgccaaccacttgggcttcattccactgttcgagggcccggccgccaacccgtcgcgcaccgtcgccaccgtggctgtggtgctcgccgttatgattttgccgattatcacctccatgtcccgcgatatcttcatgcagaccccgcgcctgcacgaagaggccgcgctggcgctcggcgccaccaagtgggagatgattcgtctggccgtgctgcctttcggcaagtccggtattgtgtccgcctccatgctggctctcggccgcgcgcttggtgagacgatggccgtgttgatgatcctgtccccgggcctcaactactccatcaagctgctgcaggcctcgcagaaccagaccatcgccgcgaatattgccgcacagtaccctgaagccaacgatctgggcgtctccacgctgattggaaccggtctgattctgttcctgatcacgttcgtggtcaacttcatcgcccgtaagcttaccgagaaagcgactgcgtgatgactgctgctgagaacactgaaaagactccgatggacggcacgcccgaaatcgacttcgatcgtttccgcccgacccgttccgccatccagcgccgtaatatcatggaccgcttcatgtgggccctgatcgcggtggcgtttgtgatcgcctgcatcccgctgatctccctgctgtggaccactatcgtcaacggcatcaagcgcctgaacctgaacttcctgagctacaacatgaccggtgtggtcggtggtagccagaccccgtccggtggttacggcggtgtgctgcacgccatcatcggtactctcgaaatcaccgctggcgctatggttatctccattccgatcggtttgatgtgcgccgtgtacctggtcgaatactcgaaccgcggcaagctcgccaccacgatctccctgctcgtcgacgtgatgagcggcatcccgtccatcgtggccggcctgttcgccttctcgatgttcacgattctgctgggccccggtaccatcaacggtttcgaaggctccgtggctctctccctgctgatgctgcccaccgtggtcaagtccagcgaggaaatgctgaagatcgtgccgaacgatttgcgtgaggcctccttggctctgggcgttaccaagcagcgcacgattaccaagatcgtgctgcgcaccgctctgccgggcatcgtctccggtgccattctggccatcgcccgcgtgattggtgagaccgcaccgttgctgatgaccgccggctacatctccagcaccaacgtgaacctgttctctggccagatgaccaccctgccggtgttcgtctaccaggagtactcgaagctcagcgcgaactgcccgcccaacgccgacgccacctgcgtgaccacgattccgatggaacgtgcgtgggctgcggctctcgtgctgatcgtcatcgtgctgctgctgaacctcattggccgaatcgtggcgaaggtcttcgccgtcaagaccgagcgctaagccagtcgctaagcctaagccttaagaacacaaggaaatataaggaaacatcatgggacaacgtattgacgtcaaccacgagaacatctattacggcgactttctggccgtggaagatgtgaacatcaacatcgagccgaacaaggtcaccgccttcatcggcccgtccggctgcggcaagtccaccgtgctgcgcaccttggaccgtatgcacgagatcatccccggcgctcacgtcgagggcgaggtgctgctcgaaggcaagaacctgtacgacaaggacgtggatccggtggccgtgcgccgcgacgtcggcatggtcttccagcgcccgaacccgttcccgaccatgtccatccgtgagaacgtgctggccggtgtgcgcctgaacaaccaccacctggccaagtccgacgccgacgatctggtcgagtgggctctgcgcggtgccaacctctgggaagaggtcaaggaccgtcttgacaaccctggcatcggcttgtccggtggccagcagcagcgtctgtgcatcgcccgcgccgtggccgtccacccgcaggtgctgctcatggatgagccctgctccgccttggacccgatttcgaccttggctgtcgaggatctgatcaacgagctcaagagcgactacaccatcgtgatcgtgacccacaacatgcagcaggccgcccgtatcgccgactacaccgccttcttcaacctgaaggcagtgggccagcccggtcacctcgagtacttcgcggacaccatcacgatgttcaacaacccgcaaaacgaagaagccgagcgctacatctccggtcgcttcggctgatcgtttcctgcgcgcagcgtaatgatttgtgcgtaggagaaacggcaaagcccgccgcaaggcgggctttcgcatattgagggcgagtattgccgagtattaccgttctcgcaacggagcgagctggaatacttcgtcggactgggcggcgacttcccgcttcggtcgatcgacgggagaacggcgggtaaagcggtacaagacaagtccgcacgatgaacactctgtgatgaatcttctgtttacggtgcgagtgtggaagaatggtcacagcaaggtccagcaaaggagcataggtgagtactggtctgatcgtcggcattgtcgttgtcgttattatcgttgtcttgattggttggggcgtcagcgcctataacaacctggtgacgctgaagaaccgtgtgaagaacggttgggcgcaaatcgacgtgcagttgaagcagcgcgccgacctcatcccgaacctggtgaataccgtcaaggggtacgcatcccacgagtctgaagtcttcactcaggtgaccgccgcccgcgccggcgtagtggctgtggccagcaacccgagcacgaccactgctcagcgcgccgccgccgaaaaccagctgtcccgcgccctgttcaacctgcaagccacggctgaggcatatccgcagctgcaagccaaccagaacttcatggatctgcagaaccagctcaaggaactggagaacaagatcgcctacgcccgtcagttctacaacgacgtggtcctgaagctcaacaccgccatcgaaaccgtgccgacgaacatcatcgccggtctgttccactttgagcaggcgcaatacttcgaggccgatgacgcttcccgtcaggtgccacaggtccagttctgacccgcttcaggcccgtccggtaagccgccggccgggcccgtattgtcttaagagagggaagatatgcggatacgattcattcgcgccggaatcatcagcattgttgccacggtggtgttggcagttatcaccttggcgataatcgggacttccgcgttcggcgattcggccgacctcagctaccgcacgctggactatgacgtgaccgccaccgcgaacggtgatttgaaggtcacgcagcatatcgacgtcaagatgcgtgagcgtaccgacagtgacgacaacaccaagccgtggaagcagctgttccagcaatacacgctgaactccggcaccttgactgatatcagcgatatcagcgtgcgcaacgtcaccgacggcatcgactacgcacaacagagcgagcccaagctgcccagtgacgtctcttccgacaaggaatggaacagcgactacgccaaccattggtatgtcgccgatgtgagcgatggcagcgaccatccaaaggcatacacgcccggtaccgatggcctcaagcccagcgcctccgccaccgaagatgacacaaccgtggagatcggctggaatattccggtcaccaccgaggccgacagcatgaagttcgatgtaagcttcaccatgcacgatgtggccaccaaatggaaagacgtggcctccttccagtgggagccgttcggcaagaagaaccaagtgcctatcggcacggtcaccggcaccgtccatttccccaacggcatcaccggcaaaacctcatggacatggctgcacaccgagcgcacctcggaaaccaagcgcaacagcgacggcagctacacgttcacggcctacaacatccacaatggcgactacctcgatgtggtcgcggcgttcgatgccgccaaagccaagggcatcgcccgcaagggaaccggcaatcatctcaaggacctgaaacaggacgaatataagcaacagcagcgctggctcgacaagcaacgattcgctgccagagctcgtctcgtgttctggattgtcagcatcgtgctcggcatcgcgttgtgcgcgtggggtatctgggctgtgatctccagcaaccggcgtgcgcaatacagtggcagcgtcgaatactggcgcgaccagcccggcatcagtccggcttccgcagcccgtctgattcgcgtggtcgatccgtcgacgcgccaatccgatgaagaccgccagctgaccgccaccatgctgtcgctcgccgtcaagaaggccatcgccatttatccggggccgtcggacatgtatcgcggcatcgacatgagccaggccacgccggtgggcttgagccaaatgattgccgccgaccaaggcaagcagtatgcggcaggcatcaccagcaccatcgtgattctgccgctcgccattgatgaggcacccaacgcgcaacagttgggattgagcgaatcggaagatgcgctgctgaacctgctcatcgtcatttctcagcgcgtgggcagcccggtattcgacctgaaccagatgaaggcgacctgccagaactggcaagacggctatattgagctcggcaaattcaccggtgcatgcagcatggaataccagcggctgggtgccacgcgctctgtgggctggcaatggatcctacccggcgtattggccgccgtgctgggatttggttcgctgctggccaacagctttatcggatacccggtggctggtcttatcgggctgccgatattcctggtcggactgttctgctcgatggccggcgcgatgaccgtgctcactgatcaagggcaggatatcgccggccggactctgggccttaagcgttatatggaagacttctccaacttcaccgaccggggtaccgccgatttggccttgtgggattggtatatggtctacgccgccgcgtttggcatttccgatcgcgtgatgcgtgaactggccaaagcatatcctcaggtcaacgacccgacttggctggatgccaacgcctccaactcgttgttctactggaactaccgcccgtatggctggtacagtcaccgtcataatggtccattcgaccacgatgctgccgggcagatggacctaggcgttggcggcccagctccggcttacggaggcacgtcgtttgccggcggattctccgacctcggctcgcagctgaactccggtctggcggacatcagctcgaccatcagcgcggcagcaccatccgccgattccggtggcgatttctccagcttcggttcgggcggcggctccggtttcggcggctcgttcggtggctcaggtggcggctcgttcggcgggcggtagcgcatgcctatgtcgaaacgcattgttcgtgccctgggcttaagccttgtcggtgcgctgattcttgccgcactctgtgccggtgccttgattctcggcacagatggtgccgacctgagctgccgcacgcttgattacgatgtgaccgccaccgccgacggcgatcttaaagcacggagcatatcgatatcaagttgcgcaaacgcaaggatgacgatggcaagaccaaaccgtggagatcggctggaatattcccaccaccgtaaaaaccaacagcatcaagttcacggtgagcttcaccatgcatgacgtggccaccaagtggaaggacgtggcgaccttccaatgggagccattcggtgagaacaatcaggtgccgattggtacggtcaccggcacggtgcatttccccaaaggtgtgaccgcgagcaactcgtggacttggctgcacactgaacaaacctcggaaaccggccgaaccaaggatggcagcttcaccttcaccgtaaatgatgtgaaaagcggcgagtacctagacgtggtggccgctttcgacgcggccaaggcgggagatatggctcgtgtcgagaccgacgatcatctgcaggagttgaaggaagacgaagccgacgacgaacggttctgacgcaatctggaacgccaacgcgccacaaggcgcctgaacaactggatgaccaccatatcggccggcctgatattcgggattattggtgttgttgcagccttacgctcctccggacgttcacgttaccgtggctccatcgaatattggcgcgatcgccccgagctgagccccgcatcggcggccaaactcatcgatatcgtgactttcggcgacaaacccgacatttccgagcgccaactcgtcgcgaccttgctttctctggccgtgaagaaagtcattgctgtgttccccggttcggcggacctgtatatcggcgtggatctgaaacaagtttctccggtggagctcagtcagcgaatcgggtccgatccatacaagcgcaataatgcgcgtaccaatagcacgattgtgatgctgtggcagtccgattacggcgtatctgagggatttgatgaatcagtattcgtcgaatccgtatttgatggatctggatctggcggatctggatctgccgcatctagcgtgtccgatgcacaccagcccgatctcagtgcttctgagcgggcattgctctatctgctcaccgtgatttccgagcgcgtaggtcgtacggcatttgacatggatgacatcaaagacgcctgcaaggattggaaagacggctacaaggaactcgaaaagttcaccaatgcgtgcaagaccgaattcgcggcggcggatatcgcgccgaaaaccgagaacggatggctcattcccggggcaatcaccgtgctgatcggtggcgccagcatattcatcaacggtttggccggatatctggtggccggggccctcatcggcattcccctgatgacggtcggcatattctgcttcctgatggggaattcctacgtgctgaccgatcatggtcagcagatggccgggcaatgcttgggtctcaaacgatatatgcaaggcttctcgaacttcaagtaccgtggagtcgcggatttgacgctgtgggattggtatatggtctacgctgccgcatttggcatatccgaccgggtgatgcgggagctggccatggcctatccgcaagtatccgatccggaatggcttgatgccaatgcctccgacacggtgttctattggaattatcgtccgtacgactggtatgggttgcgtttctacaatggctcggcgttcgcggattccgtggctgacagcggattggccggagcggtgccagcgttcgggggcacgtcgttcgcggctgggttctctgacctcggcacgcaattgtcgtacggatttgcggatatcaccgcgacaatcaatgcggcctcgccatccggtggctcaggcggctttggcggtagcagcggcggttccggcggcggttcgttcggcgggcggtaagcggtgtgcttctgaaagtccctatagctctgaaagtaaaaggcccggtgtcataagacatcgggcctttctctcaaaatcgaggtgaggagacctcaacagtcaggtccaacggggcgaaagtctgtggcgccgccgagaagattgcctcgaagctagcgtgacctttctgctacaacacagcataccagcctccaccgaagctcaccagtacactggactgaccaaaccaaggtctactagcgtgccactttggcgcggtgtcgttgtgtcaaccggcataatgacgtctcaaaattcaagaggaggttctcatggtaggcaacaaccatgacaaccgtccgagacaagaccggcaataccgggaaggtctgatgaccggcctgttgatcgccctggccaatcaagttggacaggggcggtcgacggccatcatcattgccgcactggtattgctgggaatgagtctcagacgaggccactgatctatcagcggaacagccggaatccatggggttccggcccctcgttttcactgaactgggtatgagtaagttgcgttttctattccgtgaagttgcggaaatttcatagattgattgtgcgggcaggccgagagtgtgaaatccaacgggatgcttaggcttaatcgtggatatcgagtttccataagtttcacgaagggaatcaccatggcattgttccgtaacctcggaccgttctccaccaccgccatcggccacggcgaaatgccgctgaccatcgaaaacaaccgcggccatgaggtcggcatcgaaaccctgcatgcctcgctggacgccggctgccgccacatcgacaccgcttgggcctactactgctccggcggcgaggagcagaccggtgaaaagctggtgcgcgaggcccttgagacctggaaggggccgaaggacgaggtgctggtggccaccaaggtgggccacttccgcaacttcaccgacggccgccccacgtgggatgtggacggtcgcccggagaacctgattcggcgcggcaaggagagcgcactggcgctcggcgtggacaccatcgacctgctgtacttccaccgcccggacccgaaggtgccgtacaacgagtccgtcgaagccatcaagcagctggtggacgcgggcgtggcgcaggaggccggtatctccaacgcctccatcgagcaaatcgacattgcgcgcggcattctgggcgacaagctcgtggccgtgcagaaccagtactcgccgattcacctggagacccaggacacgctcgactactgcgccaaggtcggtctggccttcgtgtgctggagcccgctcggcggctaccgtcacccctatgatgagaccaagttcgacccgttccgcgaggtcgcggcggcccacggcgtgagctaccagcaggtcgtgctggcatgggagctcgccaagggcgaccacatgttcgtgattcccggcgcccaccaccccgagaccatcctcgactccctcaaggccgaccagctcgaactcacccccgaagaactcgccaagctcggctgattgcccattccccatcctcccgaatttgtgccgctgacgttggcttaacgtcacaaattcgggaggattgattcgtcttgaaggaaccgccatgcgcaaaaaactcatcctcgacctcgataccggcatcgatgacgcgctcgccatcgcatatgccctaggcagtgccgacgagatcgatctgatcggtatcacggccacctacggcaatgtcgcggtgccgcttgccgtgcgcaacgcgctggcggtggtgcacttgttcggccgtgacgacgttccggtctatcccggagtcgaccatcccatcgccccggcaacattgccgaaaatgcgtggcaccacaccagacgagcggacccaggcctacgcgcgctggcagaacggcggcgcggacggctggcaaacggacgcttcgtgggcaccaactcccggctcggtggcggtccaccatcccaacggcatcggcggcgcaatcatccccgactccccgcgcgctccggaagcaccaggctcggcggtcgatttcatcatcgccgccgcgcgcgaatacggcccggacctgaccatcgtacctacgggcgcgatgaccaccatggccaccgtgttccgtaatgccccggatctgaaggattccggcatcaacgtaacgttgatgggtggttcgctgacactaccgggcaatgtaagtcctgctgccgaagcgaacatctcccaggatcccgaggccgctgattacctgttcaagtgcggtgcccgcaccacgatgattggcctcgacgtgacccaccagaccgcgctcacccgtgagaaagcctatgaatgggcgtctctggggacgccggccggcgacttcctcgtcaccatgaccgactactacatcgacttctacctgaagaaccagccggagattcgcggatgtggactgcacgacccgctggccgtggccgccgcgctcgacccatcgctggtcacgaccttcgggttcaacttgcaagtcgatctcgagggcccgttccgaggccgtaccatcggcgatcgttcacggctccaggaccccgacaaacacacccaagtcgcattgggcgtcaacgtgccggaattcctcgaccgtttcatgacccgcgtcaccgccgccgcgcgcgggtgaacgattacgcttcggcagggaatagggttctgcgtcaagtgcgtctgcgactcgcatgatggtgttgaacgagggctgcgaattcgggcgaagcgccttatataaggattcgcggccgaggccggattttcgggccacattggtcatgcctcgtgcgcgtgcgaccacaccgaacgcatcttgcacaaatgcgggatcatcctcttcgagtgcgccattgagatatgcgatggcatcctcgtccaaattgatgtatgagaatcaccaaaactcaaccacctatttcacatacccgaaaaaacagaaaaagaatcagatggtcgctggattttccctgctcttttcgatctgacgtttgagatattcgcccagcccatccacgcaccaaagtgggatgttcgtcagccaagattgcttcctatagcctatttctcctatacggataccgtggagcccgtatctgttgcagacatacgagagacttctcgcacgaatattggaagaggacttcacttcgatgggaaaaacctcgtctccctgttccattacgaaatctatttccgcatttccttgaggatttgggttagcccaatagcggggtctgattccttgagctaccagctgctgacatacgtattgttctacgaacgcgcccttgaattcggaaaagagcttcgacttgttcaccagagtattcacgtcgagaccggacagtgcgcccagtatgcccgtgtcttccagatagatcttgaacgtgttaagactctcatatccgggcagaggaatatgcagagcatcgaggcgggggactttggtaatgatcccgtagtccgtcagccaagtgagcgcttcctcatattcgcgggcgcgggctccttgcctgacaacaccgtaaacgaatttgcggttctccttggcgagttgtgatggcagtgtgttccatacaagccggatacgctcgcccagcgtatatgcggcatgcttggaaaaatcaagatcgtaggcgttgagaatatcttgttggacagttcgcacatcctgcggaatcccgttatccaggtgagcgcttaatgctgctggcatgccgccgacccacatatatgttttgagtaggtcattcatctgaggttcgagagcttgtggaatgtcctcgaaccggccttcacgtatggtgtcggcgatcatgtcttgtccgatgctgtccagatactcggcgaaggagagcggatgtaggttcatcatggtgacttttcctacaggaaaagaggttttgccgtgcttggatattcccatgtaggagccggtggcgatgatgtcatagtcaggtgtctgctcggtgaagtatttgagagaggtcaacgcgagcggactttcctgtatctcgtcaaagaagagcagtgttctgccggggagtatccgttgattggcggcgagttcgagctgacggattattcgttgcgggtcaagatcctgctcgaatatcccggatagggatggccgctgcatgaaatcaaccgagacgatgttgtcgtattgtccattcgcgaactcgttgacaagccatgtcttgcctgtctgccgtgcgccacggatcaggagaggcttatggtcaggtgtggtcttccactgcttgagcgttttcagtgcttttcgctggagcttcatgacgaatatcctatgataaatgtgtgacgcttacacatttatcatatcataaatgtgtaagcatcacacattttttatagtttattgcagtcgcagtagttctagcgcaacggataccagccgatcggtacgggtcttgatcgcttcggcatcctatttggttatctgtgaggctcagccatcttacgcggtataaacgttaaggagcaatcaaagggcggtctttctgagactaatctcagaaagaccgccctttgcgatggaataaattgagtgtggaactcggtattggtttgaaagactgtttacagcccgggaatcagaccgccgggcggatcgagcgtgaggtattgctcctccagatcgatgtcggggaccaaggcctccacgaacgggaccaatgcggtcttttcgaccacatcctcgcccttggaattctggccggttaccaccggctcggtcaaacgaatcttgagcagggactgagcgggggagtcgaccacatccaccactttgccgaccacttggccggcgggcagtcccagaccgttgccctcgactagacgggcctcaaggccaataagatccttgggataccattcgtcggcttcgagcatatcttctgcgtcgtcgacctcgccgtagagttcgacaccgtttagggcctcggcggcattgcggtcgtcgacgccctcaagcttgagaatccaacgatccttgaacgtgcgcgagccctcgacgatgtactcggtctcgccatcctggctgtagagcacggagtccggctcgaagcgccactcgggatcatcggtgtacaggcgcacggtgacttcgcccttcaggccctgtgcgcggccaatacgagcgaccctcagcaactcgagctgctgagggtcgccgtgcatgtcttgctgtgccatgctgtgaatcgttccttatcggttatcgacggacgtccatgatgtcaacgcggaccttgtggtcagacagtgcctggatcacggtgcgaatcgcgttggcggtgcggccgccacggccgatcacacggccgatgtcttccgggttcacgcgtacgcgaagcagttcgccacgcgcgttctcatgggacttgacggaaacatcgtcgggaaaatcaacgatgttcttgatgaggtgttccacagcctgtgcaagcatagctagcctttcgtttccgctcaggcctcggccggagcttcttcggcggcctcttcagccggggcttcctcagcggcggcagcggcttcggcttcagccttggccttggcggcagcttcggccttggcggccttcagcttctgagcctggttctcaacggccgcgatgcgggcctcggcgtccgggccagcctcaacggtcttcagggtgccttcggcaccttcaaggcccttgtacttctgccagtcgccggtgatgttcagcagcttgaagacgggctcggacggctgagcgccgacgccgagccagtactgagcgcggtcagacttgatctggatggtcgagggctgggtgttggggttgtaggtaccgatctcctcgatgaccttgccgtcacgcttcttgcgggaatcgacgaccaccacacggtagaaggcgtagaacttcttgccctgtcgcttcagacgaatcttggttgccaaaatggctctccttgtaatgctaggtgtgcgggttctcggtttgccatgtggggcatgaccggccggaatccacgtgtcctcgcggctcggggtgtagagggcgccacgcgcgcgcgaataaccgtactagtgtaacgcggaagccggatattgcgcatcggtccggtcgtgacgcacggaatcgccggacggacggcgtgtcggcggcgcacctaccgtcttcatgactgatagcctgattgatggcagtgcgagacgggaaagggggcgctgatcgatgggtgagtgcgtgatcggccccggtgcccgggcgcgtgtggatgcggatgacggattcttcttcggcatgggggccttcgagaccatcgcggtatccggcggcgcgcccgtgttgttggacgaccatctgacgcgtttgggtgagacgttgcgatacctcggcattgaggcgcgtcgcgccgatctggagacgatggtgctccgcgcatgcgccggactcggcgcatcggacgattcggccctcaagctcacggtcaccgagcgcaaccgcgtcgtctcgttgagacgcaacccgtatgccgcgccgggggcgaagcgcgtcttccgttgcgacttcgccgatgtgcgcaggaacgaatcctcccccctcgcgcgcatgaagacgctggcgtatgccgaaaacatcatggagaagcgtcgcgcccgtgaccgcgccgtcgacgagccgttgttcctcaatacgcggggcgaggtcgccgaaggggccgtctccaatatcttcgccgtcatcgggggagacgtcgtgacgcctcccgtctcctgcggtctgctgcccggggtcatgcgccatgccgtgatcgggttcacgggggccgtcgaacgcccgatcatgcccgacgagctgcttcgggccgacgaggtgttcctcaccaactccctgatgggtgccatgcccgtggccggtatcggcggcgtggaattcgaaccggggagcgtgtcgcgcgacgtgaacgacgcctatgcccgcatggtggcgcggacgcgggcccgggcgcagacgaaggagtcccggtgagcgcgcaggtattcaagctcaggacgttccgaccgcttgccgacatcgtggagtgcgtgcgcggcgaggaacgcttcgcgttcctggactcctcgatgccgggggcgcaggggcgctactcgattctgggactcttcccctatcttgtgatcgaacatgggcggggcggatgcctcgtcgacggcgttgccgtggagggtgatttcttcgatgtcgtgaagaagcggcttggaccctgcgatggcgcgcgcgatccgcgtctgcccctcacgggaggcgcgatcgggtatctgggatacgatttcggccgcgaatcgtgcggcgtgccgaccaggcacgattccgtcgcggccacaccggaggcgagcatggtcttctacgacctgctactcatcgaggacgtccggtcgcgggtgttgttctgttgctgccaggggcggacgatgacggccgcccacgccctgacatgggcgcaggacctggtggattcatgcccgcccgcccctcatcccgcgcgccgacattcgctcgccccatgctcctccgatttcacgcgggccgggtacggcgacgccctggcccgtctcgtcgatcatctgcgcgccggcgacgcctacgtcgtcaacatggcgcagcgcctgcgcctggagacgtccgagagcccctatgccatctaccgttatctgcgcacccacaacccggccccgttttccgcctatctgcgcgcaccgggtctcgacgtgtgctgttcgagcatggaacggttcatggagattcgctcggggcatgtggtgacgcggcccatcaagggaacccggccacgcggcggcacgccggacgaggatcgggcgaaccgcgaggaactcgcccgcagcgagaaggaccacagcgaactgctgatggtcgtggacctcgaacgcaacgacctgtcgatcgtctgcgaaccgggttccgtcggcacggaccccgactttgccatcgagacgtatccttccgtattccatctcgtcgcgaccgtcgaggggacgctgcgcaaggatcgttgcgccgtggacgcggttcgcgccgcgttccccaccggttcgatcaccggcgccccgaaggttcgcgccatgcagatcatcgacgagctcgaacgtgcgccccggggattgtacacgggcagcatcgggtatttctccgatacgggcgattgcgatttcaacgtcgtgatccgcaccatcgtgcgggagggaggcgagacgtcgctcggcgtgggcggaggcatcaccgtggaatccgatttcgacttcgagtacgacgagacgatgcagaaggcccgggcgctgcgtgaggccgcttccgttgacagggggagcgtcggcgagtacaatcacgggcaaaacgaataactatcttcagggcagggtgcgattccctaccggtggtacagcccacgagccgcaaggcatgatttggtgagattccaaagccgacagtacagtctggatgagagaagatgaaagtacgttcatgctttgtcgtacgccctgaaatgatgccatatcatttcagggcgttttcgtgttcgcatgaaccttcttttgtatgccttggatagcgtatgggcgcaacatgcttggaggcgtacatggacgatgcgcagtacatgggactcgcgatcgagctggcgaagcgaggggccggatacgtgaaccccaatcccatggtcggcgcggtgatcgtcaaggacgatcggatcatcgggcaggggtatcacgaggagttcggcggattgcacgccgagaggaacgcgttgcggcattgcacgcagtcgcccgccggggcgacgttgtacgtcacgcttgagccgtgctgccattacggcaaaacgccgccatgcacggaggcgatcgtggaaagcggcatcgcaagggtcgtcgtcggaaccttggactgcaatcccgtggtgtccggcaagggcgtgcgcatgctcgaggaccacggcatacgggtcgatgtgggggtgctggccgacgagtgccggcatctgatacgggtgttcagcaaatacatcaccacgcatacgccgtatgtcatcatgaaatacgccatgacgatggacgggaagatagcgacccataccaatcaatcacggtggatcagcggcgaggagtcgaggcgtcgggtccatcagctccgtcgatccgtcgcggcggtcatggtgggggtgaacacggtgatcgaggacgacccgttgctgacatgccgcatggcacacggaaggaacccggttcgcgtcgtctgcgatacgcgattgaggacgcccctcacctcgcggatcgtgcagacggcgaatgacgtcaggacctatatcgccaccgcctgcgatgacgaacgcaaggcggaggactaccggcggcacggctgcgaaatactcgccgtcggaaggaagggcgaccacgtcgatctgacggacgtggtgcggcgcctgggggatatgcagatggacagcgtgctgctggaaggcgggagcgcgatgaattggagcgccctcgaacagcggatcgtcgatgaggcgcacgtgtacatcgcgccgaagatattcggcggcaccgcgaaaagcccggtgggcggccaaggagtcgccctgccttccgacgccgtcatgctccggccccgcgcctgctcccgagtgggagaggattatctggtggaaagcgaggtggtgtattcatgttcacgggaatagtggaggaagtcggaacggtggcggacatacggaggagcgccgccaactgcacgctgtcggtcgatgccacgaacgtgatggaggacctccatatcggcgacagcatggcggtgaacggcatctgtctgacggtcgtcgatttcgaccggcgacgcttcaccgtcgacgtgatgaatgagacgtggcgcagaacctcgcttggcgtattgcgccacgggagcggcgtcaacctggaacgggccctgccggtgaacggaaggttcggtggccatatcgtcaccgggcacatcgacggcacgggcagcatatcctccgtgcggcgcgaaggcaatgccgtgtggtaccggatcgcggcgcggaacgagatactcgaaggcatcgtcgagaaaggctcaatcgccgtcgacggcatcagcctgacggtcgcggaggtcacgggaagggacttctcggtatcgatcatcccgcacaccttggcgcagacggtgctgggcgagaaacgggtcggcggcgtggtcaatctcgaaaacgacgtattgggaaaatacgtgcggaacatgatgacgacccggacgggactgacgcaggatctgctgtcccggtgcgggttctgagaaaggatgtatgaatcatgaaccatcagtcggtgcaagcggcgttgcaggcgctgcgggaagggaagctcgttctggtcatcgatgacgaggaccgggagaacgagggggatctcatctgtgccgcgcagtcggccaccacatggaacgtcaatttcatggcaacccacgccaagggattgatctgcatgcccatgagcgagcaactggcccacaagctgatgcttccgcccatggtcgagcacaacaccgataaccatgaaaccgcttttacggtgtccatcgattaccgtggcaccacgaccggcatctccgccgaagaacggggattgacggctcgcatgtgcgtctccgatgacgtggaacccctcgatttccgcagaccggggcatatgttccccctggtggcgaagaagggcggcgtcctggaacggaacgggcacacggaggcgacagtcgacctcatgcggttggcgggattgcgtgaatgcggcctgtgctgcgagatcatggacgacgatggccggatgatgaggacccccgacctgacccggttcgcccaggagcatcagatcccgctcctgaccatcaaggaactgcagaaatacaggaaagcgcacgatacgctcgtcgaatgcgtctcgaccgtggcgatgcccacgcgatacggggaattcacggcgcactgctatgtgaacaggttgaacggcgagcatcatgtcgcgctggtcatgggggatctgggcgatgggaccgatgtgttgtgccgggtgcattcggaatgtctgaccggtgacgtcttcggctcgttgcgttgcgattgcggtcagcagttggacgcggcgatgcggacgatcgcggagcatggctcgggcgtgctgctgtacatgcgtcaggaagggcggggcatcggtctggtcaacaagctgaaggcctaccgtctgcaggacgagggcatggacacgctcgacgccaatctcgcgttgggattccccggtgacgcgagggagtactacatcggagcgcagattctcagggatttggggatacggtccatgctcctgctgaccaacaatcccgacaaagtgtatcaattggaagactatggaatggagatccgcgacagaataccaatcgaaatcgaagccaatgcttacgacagtttctatctcaaaaccaagaaaaaccgcatgggacatatcctgaacatggaggaggaataaatgcacacgttcgaaggcgatctggtagccgaaaacatcacgataggcatcgttgtggcgaggttcaacgagttcatcacctcaaaactgctggcaggggcgctggacaccctgaaaagggagaatgtccgcgaacaggacatagcggtggcctgggtgccgggcgcctttgagatacccctgatcgcgtcgaagatggccaagagcaagcgctacgatgcgatcatctgcctgggcgcggtcattcggggcagcaccagccactacgattacgtgtgcaacgaggtctcgaagggaatcgcgcagaccagcctcgacaccggtgtgccggtgctgttcggcgtgctgacgacggattccatcgaacaggcgatcgaacgggccggcaccaaagcggggaacaagggttccgagtgcgcgcagggcgcgatcgaaatggtgaatctgatccgctccatggacctctgacggcgaaccacccggctgcgggcgggggtcttccagacgttcccgcccgcttcgcgccacacggccaaggcccgatcgatcgccgcgcccgctaccgcagggtgagcgttgcggccaaagccagatggtcggtgtccggcacttcgaaggacgtcacgccggacggtctgagcccttgggtgaacagaatatggtccagttcgatgcgcggccacttgagccagcgcgggaaggtgagattcgggccggcggcttgaatcagacttgcgtccttgaatccggacttgagcaacgcacggaagctcgggtgatcggtgctcgagttgagatcgcccataacgacgacgatgttgcgattgctgacggattttgcacgggcgagttctcgcagacccagaatgccggccgaccaatccgcgcagccgcgcatcggcgatttcgggtgagccgaacaaagcgtcaccgtgcgattaccggaggttttgagggtgatggcgggaacgtcggcggcagggatggagaccacgttgggcaccgctgcgctcggctcgtagcgggaatagatcacgttgaatccgccgttatcggtctctttggcgtctccgaactgatggtaggggaggagttcgttgatgtcggcttcggtaagacgtgtgatgaggtcgtcggtgacttcctgcaaggccaatacgctgatattgcgttcgcgaatattgcgaatgatttcagcggcgtcggcgcgtccgtatcgacaattcatcgtcataaccgagaactggggcgagagtgtttcacgcgttgtttcccggtgcccatcggggactgtttcgggtccttccttcggagtgtttgaggtgctcgatgtattgctgttatggctttttgacagcgtcggcgaagttgtttcacgggctgtttcacggtgggattctctgcgtttgccggctgggtcgattgacgtaccccagtagttgatgcgctgtgagctggcaatcagcgcgaccacaataagcgacgacatcgcagtccattcatgttgccatgcggcgaccgcggccagaatcatcaaaggaacccacagcagcggagtcagggcaatcatgtacggaagcggcatacgggcctcgagaccggcgggcagcgcgcttaaggccgtccataacagtgcgatgattgccaccgcgctgaagattgtcgtcatggaagttcctttcgaaatataaattgaaccgagatataacttggctcccctctgcgaggggagccaagttgtgagatcagcggccgaacagtccgccaaggcctccgccgaggttcggcggcagttcagtgccaccatcgacgttgcccatcatctgttcaaggccggcgggcagggccgggttctgcggcttcttggcgaaggcggaaccgccggtcgaaccggaggatttgccggccagcttgtcgcgcaatgccttctcctcggcctcgcgcttcatcggattgccggatttgccgcctttcttcttgttcttgcccttcttcttgccgccgcccatagccgggccgccgaagccggggatgccgccgcccatgccgccacgattggacatgcgcttcatcatctttgcggcctgctcgaaacgctgcagcaaagcgttcacctgagaaaccgtcacgccggaaccataggcgatacgggcgcggcgggaaccattgataatcgacggatcgcggcgctcggccggggtcatcgagcgaatgatcgcctcggtgcggtcgatttccttctcatcgaactgctcgagttccttgcggtgctgggccatgcccggaatcatgccgagcagcgacttcatcgagcccagcttgcgtacctgctgcagctgatcgaggaagtcgtccaggccgaaggagccttcggagattttctcggcggccttgcgggcctcttcctcatcgaactgcttctgcgcctgctcgatgagcgtcatgatgtcgcccatgtcgaggatgcgcgaagccatgcggtccgggtggaagacctcgaaatccttcaggccctcaccgttggaggcgaacaggatcggcttgccggtcacggacgccacggacagcgcggcaccaccgcgggcgtcgccatcgagcttggagagcaccacgccggtgaagtccacgccctcgtcaaaggccttggcggtcttgacggcgtcctggccgatcatcgcgtcgatgacgaacaggatttcgttggggtgcacggcatcgcgaatgtcgcgggcctgcttcatcagctcctcgtccacgcccagacgaccggcggtatcgatgatcaccgtgtcgtagagcttctgcctggcgagttcgatggaatcgcgggccaccttcaccgggtcgccggaggtctggcccggagctgcgacggcctcgccgccatcggattggacgcccttttcgggagcatagacgggcacgccggcgcgttcgccgaccacctgcagctgcgtcaccgcgttcggacgctgcaaatcggccgccaccagcagcggcgtgtggccggaatccttgagccagtagccgagcttgccggccagcgtggtcttaccggcaccctgaaggccggcgagcatgatgatcgtcggcgggttctttgcgaagttcagcggacgatcgaccccttggccgagcacgtcggtgagctcctcgttgacgattttcaccacctgttgggcggggttgagtgcgtcggacacctcggttcccagtgcgcgctcacgcaccttgccggtgaaggaacgcaccacgtcgagcgccacgtcggcgtcgagcagcgcgcggcggatttcacggatcgtaccgtcgatatccgcctcggaaagcttgcccttgctcttcagatgcttgaacgcattcgagagtctgtctgtcaaagatgaaaaagctgccataatgggcaacagtctagccgccacgcgggaaattgcggtgttggggacgactctttccggggaatgcgtcgcggagtagtcagggatgttgggcattcagacggcaaatgccgtgccgtccgctcgtggcgaagccaatcgagtgcttccgataccatggaaaccgtaaagaatcctgtgttttttggaatgcttacgctgttttgaaaatcgctggacaccgcttatacgcagactgccgtgcgctccgaaccatgacgttcgggccaacgcagacatgccgtgcaataaggaaggcccactgatgcccacccaaaaactactcgaacgcaaagccctgatcgttggtatcgtcatcaacgtgctgcaggtcttagccggcatggccgtgttcttcatgaccggcctcaaggccatgttcctcgacttctccttcaccgcgatttccgtcctgtccggaatggtggcggtgtatctctcgtcgcgcacggtgcgaaccaccgagcgcttccccaatggcatgttcgcactggaacccatctacgcgatctgcaaggccattttcaccatgtcgttgttggtgtattcgctgattgacgtgtgccgagtagcgtacgactacttcgtgttcgggtccggcgaacgcattgaaaccggcccggtggtcatctacgagatcctgaccgtaatcgtgtgcttcagcctatacacgtattaccggcgttccaaccgctccatcggcgattccagcaccatgctcaccgccgagtgcaagagcacgttggtcgacggatcgatgtcgttcggcatcggcgtggttgtcatcttcctgatgctgctaccggccggcggtccgcttgacttcctgcactacaccggcgatttcttcatcaccgtggctttggtggcattgaccatcaaggagccgttcagcgtgctcaaagaggcgttcgtggaattggtcggcggcgtgcatgacgacgatgagaccaacgcctacgtggaggccgaggcacagcgccatctgcctgccaacaccgactacgagcagacgctgatcttcaagaccggcatgaactacaccgttgacgtgtatctgagcggcatcggcgaaaccattgatgtagctgacctcatcgaatgcaagcgctcgctggagaaggagctcgccaagcgcctgcacatcgtggacgtggacttcgtgtttgactgattgatgggtttgaagcggctacttcaggctccaagtggaaccctgcgggccgtcttcgatggcgatgccggcctcggtcagggcgtcgcgaatctggtcggccttggcgaagtccttggccttgcgggcctcggcgcgggcgttgagctgctcggcaatcagtgcctccagcgccgcatgttcgggcgactcggccgtgccatcagcggcaccgccagcagacacccacggctcggccagcgggtcgagacccaaggtgtcgagcatggcacgcacggcgagcagcgcctcacgcacctcggccttggcggtttcggaatcggcgcggtcagccagctgtgaaagcaacgtattgccggaacggatggcggtgaagatcgcggcggttgcaccagacacattgacgtcgtcattcatggcggccacgaaatcggcgggcaaatcgtcggcggagacggcagcaacctcctcgcgagaaggctgaccgcccagtgccacaccggcgcgctcgatgaagttcgagacacggtcgtatgcggcctgcgcctcgaccaacgcctgatcggaccattcgagcatcgaccggtactgcacggagcccaaagcgtaacgcaccacccaagcggaatgctcggccagcacgctcggcacggacaggccggtgcccagcgacttcgacatcttctcgcccttggcggtcacccatgccgaatgcatccagcgcgcagcagaggggtagccggccgcgcaggtctgcgccatctcgttttcgtggtgggggaagcgcagatccaaaccgccgccgtgaatgtcgaagccatcgcccaggtaacggtgggacatggcggagcattcgatgtgccagccagggcgacccacgccgaacggcgtcgaccaacgggcatcctcgggatcggtgtccttgggggccttccacagggcgaaatcacgcgggtcgtgcttgtcgggggaggcgtcggccgggtcgaccggattgtacttgtcggcaccggtggcgtccacggacgggcccatgcggtcggccacggcagcggcctcatcgacttcggaggtctgcttctggtgggtgagttcgccgtaatgcggccaggatgccacatcgaagtacacgttgccggtgggcttgccgtccgcatccgtgaccacatagccgtggccgttgtcgagaatgcgctgaatcaggtcgatcatgtccgacatgtggccggtggcgcgaggttccacggtgggcggcagcacgccgagcgtgttgtacgcctcggtgaattcgcgctcgtagtaataggcgcgggcccaccaacgctggccggcggccgcggccttatcgaggatcttatcgtcgatatcggtcacattacgcacaaaagtgactttgtaaccgagcttcaaaaaccagcggcgcacgatgtcgaacgccacggcggcacggatatggccgatatgcggtgacgactgcacggtggcgccacacacataaatgccgacttcgcccggtttgagcggcacgaaatggctgacctggtgcgaggcggtgtcatacagattcaggccttctgcggccttggcgacatgcaccggcgtcaggcttgaaggcatgacggaaatgttgaaatcctgcggttcttggctgtttcccataacgctcaagcgtagggtccgaaccagacatgctgaatcgttactcgaagagtttgatgaacgcttcacaggcggggcccgaacgaggtgacagacggatgagaagcgggacaacagtctcgcgagaacacgtctttgaccgctgcggaaactgcgagattcatggatttgccctgctcgttacgcaaacggggaacgctcgtgccacaatagaagtcatggccacaccacaagtgctcattttgcaacatgtcccatgggaacgtccgggacgcatattgtcgaacctcgaggacatcggtcttgagacggtgacgatgaatatcgtcgacaaaaagaaaccggacttgcctgatttcggcgaactggctggcgtggtaatcatgggtgggcctatgggcgcgcttgattacgacaagtatccggggctgaaggcagaagccaagttggcgcgtgccgccgtggcttcaggcaagccgattctcggtgtatgcctggggcatcagattatcgccactgcgcttggtgcgcagctgcgcaagggtgatgcgccggagattgggttcgcgccgatcaagcgtgtggacaagcatgacttcttctccatgtgggataagcagctgacggtgctgcactggcataacgacgtggtgggcttgcccgagggaggccagctgctggcacgttcgtcttccaccaaggtgcaggcattccgactgggatccgcgctgggcatgcagttccatcttgaggtgtgcggctcgctgctggacgaatggctggatgagccgagcatggtcaaggatctcaaggccgcgggtgggtccaagtcccaattgcgcgagcaattcgcccaatacgatcagctactgcatccgctcgccgagcaagtgttctccggttttgcggcccgctgcaactcctacgctcagacgctgaacaaataacgtttgtgggccgccgctgggcaagcgtggcgctacattggtgagtcatgccgacttatgacattggactggaacacgtttcgctcgctttcgccaccaaaaccatcttcactgatgtgacgcagggtgttttcgagggcgaccgcatcggcatcgtcggcaagaacggcgacggcaaatccacgttgctgcacctgttccgcggcacccaggagccggattccggccgcgtgacgaagcgcggcggactcacgttcggcatgcttgaccagcgcgatccgctcgacgacaacgccaccatccgtcaggccgcgctcgaaggccgcgccgactacgaatgggcgtccgacaacacctcccgtgaaatcgtcgaggtattgctcggcggcatgagcctggatgccaaggtcggctccttgtccggcggccagcgtcgccgcgccgatttggcccgacttctgctcaaggattgggatattctcgcgcttgacgagcccaccaaccatctcgacgtggtcaccatccactggcttgccgagcatctgaagaaccgctggtccaaaggccagggcgctctgttgctcgtgacccacgatcgctggttcttggacgaggtctgcgaatcgatgtgggaagtccacgatggcgtgatcgagccgttcgagggcgggtattcggcgtatatgctgcagcgcgtggaacgcgaccgccaggctgatgtgcgtgaaacgaagcgccgcaatctggcccgcaaggagctcgcatggctttcgcgcggtgcccgtgcccgttccaccaagcagaagttccacgtcaaggccgcgcgcgagcttattgccgacgtgccgccgatgcgtaacacacttgaactgaagcaaatggccacctcccgtctcggcaaacaggtggtcgatttggtcgacgtgacgcagattttcgaaaaaccgcagggcatggccgatatcgacccggatgtggcggcgctctccgcgtccgcttcccgcgtggatgtggtcaacgccatgtacgccgagccgcagctgcacggttccgttgaggtggcggtcaccgacatgactgacctgcgcctggtggacgccggcgtgccggaagccgtcgaggccgctgaggaagcgcgtaagaaggccgaggctgagagcggcaatccgcagcttgctgacgatcgcgaggttcgtcgcatgaacacgggtggtgaaaccatcggcggtgacactgctgcaacgaattcggatgatggcactgctgcggctggtgtcacctcggctgcacgcaaggtgacggtttccggccgcgagattcttgacgatgtgacttggctgattggccccggcgatcgtttcggcatcgtcggtgcgaacggtgccggcaagtccacattgctgaagttgattgacggttcgattactccgaccgtgggccatgtgaacatcggcaaaaccgtgaagttcgccgtactctcgcagcgtcttgatgagctggagaaactgggccagtacaagatcaaggaagtgctttcccgctataagccgagctacattgtggatggcaaggaagtaacgccgggacagttgatggagcgtctcggctttgaatccgcccagttgatgacgccgattcgcgacctctccggcggacagaagcgccgcatgcagttgctgctgattctgcttgacgagccgaacgtgctcatcatggacgagcccggcaacgatctggacactgatatgctcgccgtcatggaggatttgctcgatacttggccgggcacgttgatcgtcgtatcccacgaccggtacctgctggagcgcgtcaccgatcagcagttcgcgctgattggcggcaaggtacgccatctgcccggtggtgtgcaggattacctcgatatggttgaggctattaagaacggcaagggattgccggctgacacgcctggcttcgcgggcaccggtagcagctcggcgaagtctggtaggggtaaggcggccgccgtcaatgttgctgcatctctccctcagtccacttcgcggacagctccctcgtcagagggagccaataacggtgaggactccacctcgaagctcaccggcaaggccttccacgaggcatccaagcgcgtgaatgccatcgagcgcaagcttgccaaactggaagagcggaagaccgaacttgaggcacagatggccgcccatgacccgagcgactacgagggtctcaacaagctcaatgaacaactcaccgccgtcaatactgaaagcgataatctcgaagccgaatggctcgaactctccgaacaattggagtagcgggagaaaccgtaacgttcacaaggcctcggtagtttgccggggcctaccgctatgcaaactcccacggattaatcaattccacgtcggtaccttcgaagtccttgatattgcgcgtggctatggccgcatcccaggaacaggcaattgccgcaatcatggcgtcttgaatactggtaggtgtgcccctgcgttcgcgttcgacaaggatatgggcataatccgcagctgcctgggtgtcaaatgcgaacgtcctgtcctctaatgtcataagcgccagcttgacggtcgtatctgtgtactttcgtcgtttgccttcaggcatgcgacatattccgaccaacaactcggcgacggtgatggcggtggttgccagattgcttgtatcttggttcctcagccaattggcaacgtgttcgtctggctgtttcttgatgatttcgctgatgacgttggtgtccagaataatcatggccgattcctattcaaaagatactggcggttgggaatcggcggaatttcgctcggatagtgggagttcccccttgtcgagtccctcaaaatccatgttcttcatgaattcgcggatctcgtcgtagaaattggtctttcgtgtgatttcatgcgccaccgtgccggccagccattcttcaagaatggatcgcacctgagattccatggagcggttgtttttctcagccacttctttgagctgttgaatctgctcatcgggtatttttcggatggtcaatgttgccatgatgcacctccttgttgctgtcataatgctagcataaggtgctgtcattttgcttgcagcacgggtgatgaggtatgcacgcatgaaaaaggcggatatgcatcatgcacatccgccctttgagcttggactgggtctccctgcagtcgccgaatcagcgcccggtaacctcggaaccgacgaccttttcgctcagggcgcgcgggccgcgggtcacggctacggcaccggagcgcaccagctcaatcacaccgtaatgctccaaaagccccagcagcgcatcgatcttaccttcggcaccggtggcctcaatggtcagcgattccggattcacgtccaccacacgcacgcggaagaggcgcacgatctccagcacgtcggaacggttggattcgtcggcggccaccttgatgagcaccagttcgcgttccacggtggagttcgggtcgagctccacgatcttcagcacgtgcagcagcttgttgagctgcttgatgatctgctccagtggcacggcctccacgtcggcggtcaccgtgacgcgtgagatgtccggacgctcggtgggggagacggacagtgagttgatgttgaacgcacgacgggcgaacaggccggcgatacgcgccagcacgcctgggcggttctccaccagcacggacagcgtatgacgctgggaaccaggctgggatgcaggatagttagccatgagtgttctcctctcctcagtgctcgctcgcagcggcagcggcggtctcgtgctcgaacacgccggtcgcatgctcgtccggaccggttcccggagccggggtgccgccggtcagcggcttgatgccgggcttgtacgtcacctcgtcgttggaagcgccggcggctaccatcggccacaccatcgcatccttccacacgcggaaatcaatcagtaccgggcggtcgttgatctggttcgccttttcgatggcggcaatcgcctcttcctcggtgaacgcgcggatacccacgcagccgtatgcctcggccaacttgatgaaatcaggcacttcgagcggcgcatcgccgtcgaccagtgccgccgcaccatcggcaccgtgcgcctcgccatcgagcaggttggtctgcgagtagtggtgctcgtagaacagcgtctgccactgacggaccatgccgtacacggagttgttcagaatcgcgatcttcaccggagcgtggtccaggaacgcggcggccagctcctcagaggtcatctggaaggaaccgtcaccatcgatcagccacaccggcttcttgccctcgaactcgcgggccgagcccacggatgcgccgatggcggctggcagaccgtagcccatcgtgccgaggcctccggaggagatccaagcgtgctggttctcgaaatcgatgaactgcgaagcccacatctggtgctgtcccacaccggtcacccagatggtggacggatcggccatctcagagagctttttgatgacccactgcggggccattgatccgtcggtcggctcatcccacgtcatcgggtattcctcgcgccagccgtcgatcgccttccaccagggggccagattcggcttgccctgaatggcctgcgtgcgctggatttcgggaatcaagtcgtcgagcacggtagccgcatcgcccacgatcggcacgtcgggctgacggttcttgccgatttcagccgggtcgatgtcaatatgaatcacgcgggcggtcggtgcgaaggcgtcgagcttgccggtcacgcggtcgtcgaaacgtgcaccgatggccacaagcaggtcagcgcgctgcacggcaccggttgcggcaatcgtaccgtgcatgcccagcatgccgaggttcttcgggtcggagtcgggaatgatgccgcgtgcgggcagggtcgtgaccacgggggcgccggtcaggtcggccagagccttgacctgtgcgccggcgttggagcgggcggcgccgccacccacatacagcaccgggcggtacgactgagagaacagcttcgccgcgtcggacagcacacggccgtgcgccttggtggtggggttgtagccgggcagaatcatgcgctgcggccatgagtagtacatgtcgccggtctgtgcggtcttggtcagatccacgaccaccgggccggggcggccggtgttggcgatgtagtacgcctcggaaagcacgcgaggaatgtcctgcgcgcgggtcacgaggaaggagtgcttggacaccgggtaggtgatgcccacgatatccgcctcctggaaggcgtcagtgccgatggcctgcacgcccacctgaccggtaatcacgaccatgggcacggagtccatattcgcgtccgcaatggccgtgaccacgttcgtggcacccgggccggaagtcacgatgcacacgcccaccttgccagtggccagtgcgtagccttcggcggcgtggccggcggcctgctcgtggcgcataagcacgaagcggaacttcgtgttgtctttgatctcgtggtagacgggcagaatcgcgccgccaggaatgccgaagacgtcctcgacgccgagatcctccagcgaacgcaccagcgcttgggcgccagtcatcttctcgccatcgacgatggtctgcttatcgggggccgcgttgattttcggcacgccgctgaatgcctgcaaaggcgtgggtaaagccatgattcctctcacctcatagattttgccgcgaacctgcccgaccttgggatggggccgggtgcccgcgtgtctgattccagtcgcttctccgagacttgtggccccggcacgactcgtcgctcatgttggtatcagtctattcgcaaatctgacagcgggcttacttagtccgcgtcttgagcgagtccagtgacttccagcccgcttcggcggccgccagctgcgccttacgcttgctggagcccttaccgatgccgatgatgtcgccgttctcgcccaatgagacgcgcgcggtgaagatctgcgcgtactccgggccggagacctccatatggtagaccggctcatccttgccgaggccgtgcgccttgacggtcagcgaggtcttccagtcaagtgccgggccctcggtggccacttcggcgagcgtgtcgtcaataagccggtgaatcaccttgcgtgcctcgtcgatgccgtgttccaggaaggtcgcgccgatgagcgattccacgatgtcgcacagaatggagttcttctccgcgccgccctgctcggtttccccgtgacccagcagaatgtaggggcccaccttgagcttggttttggcgatggcgctcagcgcgtcttcggagacggccttggcgcgcatcttggccagttgcccctcggtcatatccgggtgaatggtgaacagcgtttcagtggagaccagttcgagcaccgcgtctcccaggaattcgaggcgttcgtaattggccacgccggggtgctcatgcgagaaggagcggtgggtgagtgcctgcacgagcagatccgggctgagagtggtgcccaacgcttcaagaagctcgttggccggcgtcggctgctgtggggtttcattactcatgattgttgtatggtccttcacgcgatggtgatgtgttgtgtgttgtgttgtgttgtttgcgatgcgatggtgtacgtaatggtgcacttatgcgaagaccccgccacccgtcgatggcagggccttcattcaagccgttatcgcaggactcacttggtgtgagccggctggatggcggagcggtaggtgcggccgcggtagttaccgcagctcgggcaagccatgtgcggcagggccggagcgccacagttcgggcagttcacggtcgcagcagcggtggccttccagttcgcgcgacgcgagtgcgtgttggcgcgcgaggtcttgtacttaggcagtgccatttgagtatcctctatttcgttcgaacaattgagcttaagcgtccgttatcttaacgcacggctcgtacaaactccgttcaggcgcgcgtcactcggcctgctcgccgttctgctcggcctcgagctgggctttgagccccgccaatccggcaaaacggatatccgtcacatcgtgatgatggtcgggatcctcgttcagatcggcaccgcactgcgagcacaggcccttgcaatccggtcggcacagtggctgcaacggcagcgattcgaccagcgtgtcgcggatcatcgcctcgatgtccgcgaatgcgccgttctccagcagcggatacgtgtcttccgactcgtcctcgccggcgatgatgtcgatctcgtcgtccttcttgttcttgccgcccttgccgttggccttgtcctgacccgactcatacgggaagaacaccgtcacatcaaccggccggtcctcgtcaatcggcttcaggcagcgcgtgcactcgctgacgaatggcgcgaccaggcggccggtgaagatcaggccgtccacaatcgaatcgaactgcccgctcacatgtacgggctcaccatccttgatgccgacgatgctgtcgccaatgccggaaggggccgggaaatcggcgtcaatcggcttggattgaccggcgcgcgaagcaatctgcgctaccggaatggcccacggggaatcttcaactcgtgccatggtatgttcttggtgcctttcgtatgttggctggagttattcgttactggcgttattcgcgttactgatgttgctggtgctgctggcgttactgggcttcgggatagtcgttcagcgtcaggtgcggcatctgttcgccggccgcacgctggcgctcttccagcacgttaagaccggcctgcacatcccgactgagtttgccgagctgctgggacagccctttcatcaccgtagtgcagtactggtccgcgccttgggtcagatggtcggctctggtctgtgcctggtcaagaatcgcgcgcgctttctgccgtgcaagctcggtgacgttctcttggccggccaggaactgtgcctgttcgttggcgtccttgatcatgtcggctgcgcggctttgtgcggaggcgacgatggcgttggactgggtctgtgccgattccagacggcgctcggcctcgcgcatgagggcggaggcgcgctccaactgcaccggcagcattttcttcaactcggaaagctggtcggtgaattcgtcgcggtcaaccttcaccatgccgggggcgaatatgctggacttcgcttcgcccagtgccgcctcgagctggtcgatgatgtcatacaccgtggtgaattcctcgcggctcttgaccgtggccgggtcgtcgtccgtggtttctcgcaggtcgggcatttcgttcatgaacgaggggcgagtgccggcggcctgagcggtccgagcttgtgcccgggtctgctgagctgcttgggcctgcgctttggcctgcatctgtgccggagtaggggtaggcgcggcgggcggcgatccggcgagaacatcggcctcttcggtgggtgccggcgcggcttgcgtagacgcgggcggttccggggcggacggctccggagtggacgatgcggcgtccgcattcggtttggtcagatcgacgtatccagtggggtggtcatcgctcatagtcattagtgcatcagtccttccgctgacgttcctcggccagggcatcggccagcatcggcacgacacaatcgggcaccatgccggtcacgtcgcctccatggcgggccacgtccttgacgatggaactggagatgtgttcaagaatcggatcggccggcaaaaacagggtttcgatgccggcgagcttgcgattgaccagcgccatgccgagctcggcttcatagtcgccgttctggcgcagacccttgacgataacggtggcgccgaccttcttgcagtagtcggtgatcaggccgtcggtggaagaaacagtgacgttcttgcaaccggctttgtcaagggcacggcggatcacgtcgactctggtggcttcggaaaacatcggtgttttcgcggcgttgacggccaccaccacatgcacctcgtcgaaaaaccgcgccgagcgctcgattacatccaagtgtccggcggtaacggggtcatacgagccggggcatactgcgatagtcatgccttatagcctaccgcgaatggtgtgcttcgtgctgccgagcgtgcattgttgtcgcgtcggcgtatgaggcagtgtgtgcggtgccgtatgtggcgtcggtgcggcgttgtgtgcggcattgttatgtggcattgtatgtggcggggtggcgtgatgcgcgacatgggtgtgtggaggtgtgcggattacgcgccaatgggtttcgcgggtaacgacgggaatctatgatggagtgcagtcgaatcgttgaatacgaggaaagaagtgcaccatgacttttgccgagatgttcgttgatgatgccgaaccgctgcgcaacccggaccaaggtgccggcacgtcggtgctggaacgcccggaaaccaaggagtctccggttcgtgacgatggcggcgacgcggatcgattcgcacattatgtttctaaggaccgtatcgccgaatcacgcgcgaccggtcgtccggtggtcgccctgtgcggcaaggtctgggtgcccaagcacgatccgtccaagtacccggtttgccccgattgcaagcgcatctacgaagaaatgacgcgctaaaggtggtacttggctcccctcagcgagggaagccaaaatggtcaccgagccgaaatctcgtcgatcagcttgagctcctcgtcgctgaagtgggtgttcttcagcgcgccgatgttgtcgagaatctgctgaggcttggaggctccggtcagcacggaggtcaccttaccatcgtgcagcagccatgccaggctcatctcggccagcgtctggccgcgttcggcggccagattgttcaggtccacgacctgcttgtgcagtttctcggtcagggcggaatcgttgaggaatcgcggatcgtgagccatgcggctgtcggccggaatgccgttgagatagcggttggtcagcaggccctgtgccagcgggcagaaggtgatgaggcccttgcccagcttgaaggcggtctccttcagaccgttctcctcgacggtgcggtcgaggatgttgtatttgttctggttgatgatgaacggcacgtgcaggtcggcgagaatcgcggcggccttctccatcgtcggaccatcgtagttggacagacccacgtacagggccttgccggagttcacggcctgagccagcgcgcccatcgtctcctcaagcggggtttccgggtccgggtggtgatggtagaagatgtccacataatccaggcccaggcgttcgagcgactggtcgaggctggcgagcaggtacttgcggctgccgaggtcgccataggggccggcccacatttcgtagccggccttggtggagatgacgagttcgtcgcggtggtgcctgaagtacttggcgagcagcaggccgcagttcttctcggcctggccgggttcggggccatagttgttggccagatcgaagtgggtgatgccgttgtcgaaggcggtgaagaccagggacttcatctggtcgaatggcgtgatgtcgccgaagttgtgccagaagccgagtgagacggccggcaacttgaggccggaggtgccggcacggttgtaggtcatcgtgtcgtaacggtgcgggttgggagcgtaggtggtggttggctcgaacattgagtctccttacaatgtcatttttgttcttacggatgctggtctgcgatgggcaaaccgacgccgatcgagtggtattcgtaagtgttcttggatactaaggttccagttcaagtgaacttgaatgcaaacggctgcgacgcttcggcgtgtcgccgcagtaaggagtcatgatgtcctacaccattcgtcaggtggccacgcagttccatatgcagccctctacgccggtgaagactggccggattggcgcgagtacaaaaaccgcgcctattccattgaatgctgaggccatcgagtgccgagctggatgccggctgggcactaagaccgatgtgcgtcgatcgtgggcgcgtctatccgagtaaggccttgctcggcagtgcgcggtcgagcagccagacaacgagcgatatcacgaagaacgctatggccagcttgccgcagctaatgccgaacccttgccagccgagtgcgtcgaggttgatgaagtcgtacggatacggactgccgctggccgccggtccggaccccggccaaatcgtcgcacgggccagcacgaagaccaagtatgcagggaagtacgccagccacgagaacatgtaatgccagcggaaacgccggtgcgggtcgaatagcacgaaatcgataaccgccataatcggggcgattttgtgcagcatcgtattggtcatgatgccaataacctgtggcacgtatgccgggtcgtccggaggcatcaggaagaacgccaccagtgcggtgactatggcgtacacagtcaggcatcccttaggccatgcaggcggctgaatacctttgagcagtgtggccgcgccggcccacagcatcacgatgcccagcacgaaaccggtctggaacgtgaaatacacccagaactgcggtttggaccatgcctcatatgtgcccacgaagcagaaaccggcgatcgcaaagcgccacaacgccacgatgaatctcatgcatcgagtctaccgcttcgccagtgggctgtatggctttgcccggactacacttaggtgcaacttcaccacttatgtaggaaaggccttgcaatggtcgattattcgccggctctgatgaccgacatgtatgaatacacgatgctcgacgccgctctgaaagacggtaccgccgaccgcaaatgcgtgttcgaggtgttcacgcgtcgcctgcccgaaggccgtcgctatggcgtggtggccggcaccggccgcattctggatgcgctggaacatttccacttggacgaagcggacctgaagttcctggccgaccgtcacgtggtaagccccgagaccatcaagtggctggagaacttccacttctccggtacgattcgcggttaccgcgaaggtgagatgttcttcccgaactccccgattttgcaggtcgaaggcacgttcggcgaatgcacgctactggagacgttgattctatccgtgctgaactacgattccgcagtggcctccgccgcctcacgtatggcgtcggcagccaaggatcgtccttgcatggatatgggcggacgccgcactaacgagtgggccgccgtggccgccgctcgagccgccgtagtgggcggattcaagggtaccgccaatctgctggccgcccagctgtatggtctgaaggccattggcaccgccgcgcattgcttcacgttggtgcatgattccgagcgtgacgccttcgaatcgcagatcgaggcattgggcaagaacaccacgctgctggtggacacctacaacatcgaggaagccgtgaaaaccgccgtcgaggtggccggtcccgaactgggtggcgtgcgcatcgactccggcgacctagccgccatggcccagcgtgtgcgcaaccagctggacgccctgggcgccacgaacaccaccattaccgtgaccaacgatttggatgagtacgcgctcgccgcattgcagaccgcgccggtcgactcctatggtgtgggcaccatgctggtcaccggctccggcgctcccacttgtgcgatggtgtacaagctcaccgaacgtgaaggcgctgacggcacgatggttccggtcatgaagaaatccaaggacaaggccacagtgcccggtcgcaaactggcattccgctcctacgaatacgcgttagccgaagccgaacacgtgatttccggctcggaggagaagctggccggtttcacgcctgaaccgacgtggaagaacctgctggtcgactttgtggatcatgggcagatcgacgctcagtggcagggccatgacgccatcatggccgctcacgactaccacgccaaggcgttgtccgaactgcccatcaccgcgcagagcctcatgaagggcgagccagtgattcctacggagactcaggttctctgaccgtatctcactggccgcatccctttggttacattggctactcttccctctgtctgtgcccctctgtctgtgttggccgcactcctgtgatcgccgccgaggcggggagatccaaccccggtcgcacccccgtgtttgcaccccctgtggctgtgtcccggggctgtattggccgcgtcccctcgggctgaactgcgtcccggttcgccggacgtggttccagctgagggtggccccccttgtttttttttggggggggggtactgttcaccggggaaatatgtatatgtgcatgctgttgcaatgtacattttgttgtcaggtgacaacgtcttgattcagatgaattggcgggaaatggccatttgtcttatccaattgatttgaagaacgttgtcagttgacaacgttttgtacatggtgcggaacgacacatattcctatcctggtcaggatgccgacgaggtggagtgaaaaaaccaaaccatttcagaggatattgcaccgagacgttgtgggattgccgtgttgtcggtgatgttacagagatggcgcagtgttgcgtgaggggtgttgcgtgaggggtgttgcgtgaggggtgttgcgtgtgatgttgcgtgtgatgttgcgttgggctgattgggaggaatagtgtgccgatagaatgccgtgatgcgtgcagagcaatcgtttgcggagcaatcgttgaagaatcgtgtgaactgatgcgatacgaatcataccgtctctgaattgtgggatatgacgaatcgtatcgtcatgggattgtgggatatgatgattgcggtttgatgaaatgaccgggaaatcggccgaggcaaggtgacttcgatgagtgaaactctcaatgatgagaacgcggcgggcaacgatgacgtatcagagcggcgcgctgtagagcatcgagcgttagaacagtgcgatgtcgtgcatcacggtgtggtatctggttgccctgttaattcgtgtgcggctgtgctgaatgaagtgatgtcgcagactggttggaatgcctatgagcttgcacagcgtactggtttggatcggtctgcaattggtcgcgtattgcgtgggcaaagaggtatgttgtttgatgttttggccgaggggcttgagcgggctggttttggtcttcacctagaagccgtggccccctcgcaaacgattccggaagacgaattgcacatgttgttggcgcaactgcgtaggcctcctgatttcgatgcaatagaaagcggagcgacctggtctacgttgaagatgctctgcgtcaatctgattcatgctcggaatgttcaacatcaacgtatatcgttcgtccgagcggttgcacgggtgaacgatgcgtgctggattgcgtttctcgctggtttataccgttttctgcgttgggatatcaacccaaggaacagacgcttgacattggttcctccgtaccggtatggcttggatggatggtggtccccactgccgagcgcggcaattatgcacgtgcttcatcgatatgaagagccgttgcatgacatggactatacatatttgccgttaatcgattacgaactcaacgctatgcagcgcaagcaattcaaccaagatttcatggaatatggcattcttattccagcggacgatctttcccaatcctcatcaggtacgcaggcattgactctgtaagcgagtggtgcataagaaaatagtggcgtgcagccaagtgtcatggaatggatatgtaagcagggaatgacattgcgctggggtttgatgatggttgacgagttgctatccaggcatagagcggatggcgtatgctggggcgcatggttgaaatcaaagacatgcttggcaatcaccaaataattcgtgccgacggccgcaaggtcgacgagctgcgccccgtgcgcatcacccgccacttcaccgacgcccccgaaggctccgtgctcatcgaatgcggtaacacgcgcgtgatgtgcaccgccacttttacccccggtgtgccgcgttggcgcaaggactccggcctcggctgggtcaccgccgaatactcgatgctgccgcgtgccaccgccgaacgcaccgaccgtgaatccgtacgtggcaaaatcggtggccgtacccacgaaatcagccgactgattggccgctgcctgcgtggcgtcatcgatatgaaggcgctcggcgaaaatcagattcagcttgactgcgatgtgcttcaggccgatggcggcactcgcacggcttccgtaaccggtgcgtacgtggctttggtcgacgcagtcaattgggcggagaagcaccgccatatcaagtccgccagccgcgtgcttaaggactatgtgtccgccgtatcggtgggcgtgatcaacggcactccgatgcttgacctgccatacattgaagacagtcaggccatgaccgacatgaacgtggccatgaccggttccggcaccttcatcgagattcagggcaccgcagaacaccgtccgttcaaccgtgccgaactcggcaccctgcttgacttggccgaaaagggcaacaaggaactgcaagccgcccagcgtgccgctttgtccctagactaagccagctccccttcctttaggggaggttgtcggctggaagccgtacggtctgcaatgtccagctcccctgacaaggggagccttcttaaaggagaacccatgcaaatcgtcgtcgcaacccataacgaaggcaagcttgtggaaatccgccgcattctcgaagaggatcttggcgcggatgccgaaaacatcgaactggtgtccgctggcagccttcacctgccggacccggtggaaaccggcgtcaccttccaggagaacgcgctgctcaaggcccgcgccgtggccatccgtatcggtctgcccgctgtagcggatgattcaggtctcatcgtcgatgtgatgggtaacgctccgggcattctgtctgctcgctgggcgggtgctcacggccacgacaaggccaataatgcgctgctgctcgcccaaatcgaagatattccggatggcaagcgtaccgcgcgcttccgctgcgccgccgcgctggtggtcccggacaccgaggccagtgccgacgtgaccggtggagtggctgccgacggcatcaccgtttacaccacggctgcagatgggagccctgccccggtgcatgcccggtacgccatcaagtcggagacagtggaactcggcgacatgccaggtcgtatcatccgcgaggctcgtggtgaacacggtttcggttacgatccgctgttcgtcccggacgaccagcctgccggtcgcgtcagcactgagcctgaccatgaaggcgagccgctgaccagcgccgaaatgactccggccgagaagaatgcgatttcccaccgaggcaaggcgctgaaagccttggtccccgctatcgaggcgctgctgcactaagtcgtctaggctgtctaactgcactgagccgcgactaagccacagttgagtcgcggctcagcaactcagcccctcccgaatcgggcaagtgtctagcaagcgcctatgacctagcaagggcgatacgaaagaaggccggcgcttagtgcgtcggccttcttgatgaacaagagccacccgatagaatcgaactaccgaccttcccacgaacgagggggatgctctaccactgagctaaggtggcgtggctccaagagccaagtagagaatatagcactgcgtttgattcaacgcaagccggacgttcagcatcttcgggccattgttctttgagccattgtggaggcaatagtgcgaacgatgtgcacacctcatctgctcggaccccattcgtcgtgtgcgcgttatgctagcatggtgagcctgattgactcggaggcagagggaagcatgcgtgattttgtgctggtgaagttgacagacgaagagttcgatgatttctccgccaggcatccacaaggcaatttccaacaaacctcggcgatgggacgccttcgcgccgcgcaggggatcgacgtcgaatatctggccctcaaggagggcgagaagatcgtcgcggcggcgctgttcgaaactcaccgctctcgattctctacatttgcggccatccatgatggcccgatgtgcgactatcacgacaccgaagcattgaccttcttcatggatgcgctgaaacgccatgccaaggcaaagggtgcttcacagctggaaatcacccctgaatccccgtatcggtttcgcgacaccaatggagcttctttgccggatgaccagaacggcgctcccgacaataagctgatagaacggctcgaggcgatcggcttcactcatggcggtttcaccgtgggctacacggcggttccacgttggcgctacctcaaggatctgaccggcattaccgatgagaaaagtctgctgaagtcctatgacaagcgcacccagtggagcgtgaagcgtgcccaatcgatgggtgtgcatgtgcgtgagctgtcggacgacgagttgggggtattcgcacgaatcgagcggcaaaccgccgaacgtcgtagcttcgaataccgtggcgaagcatatttccaccgtttcaaggaagcgtttggcaacaaggcgcattttatggttgccgagatccacatcgacgaatatgtagcggacatgacggccaagcgtgaagcactttcggccaaggtggcggcattgaccgccaaaaacgccgaacaccccaccaccaaaaccgaacgtcagctgggggaggagacccgcaatctggcggcagccgaaaaacgcctgaacgaggcggccgagttcgccaaagacggggatgtgctgccggctgcggcatcactattcgtggagcatccgcgcgaggtcatctacctgttctccggtagcgtcgagcagtacaagcccttctacgcctccgcgctgattcagcatgacgcgatgctgcatttctgcgtggaacacgggctgtctcgctacaacttctacggcatcgacggcgtctttgatgatcccgatgacgagggtcgtggtgtactggagttcaagcagggcttcaacggatatgtcgaggaacttccgggcgagttcgtactgccggtcaaaccggtcgcctatgccatgaagcaatttgcgcacaagctgctgtcgcggtaaacggacgcagcacacaggccgttccagagcccagagtaacgatcagagtaacgacaagtaagaaggttcgattatgacgcaatccgatgcaggcgtcgcctcactcacccctaccaagatcactcctgccgagctggatgcgttctccgcagctcaagtgcaaggtagtttccagcagacctcgcagatggccgccatgggtgcgttcaacggtccggtggactatgtgggtgtcaagcgcggtgacaagctgattgccgcctgctacgtggtgtacacgcagtcccgtttcggtttggaaggctcggtctggtgcggaccgctgtgcgattatgacaatccacaggtggttgaggcgatgaccgaagccctgcgtcgttcggccaaggcccatcacgccatcagcgtatcctgctggccggccgcagtctaccgtctgcatgatctggacggcaagccgaccagcgacccggacaccacgatgatggacaacatggcccgcttcggttggaaacatggcggcttcaccgtgggctacgaatccgtggtgaaccgctggaacttcgtcaaggggcttgacggcattcataatgagaaggaactgctggcctcgttctccaagtaccgccgtaagaacatccgcatcgcccaggattccggtctgcgcgtgcgccggctggaacgcggcgaactgagcactttcgtcaagctgtgcgatatgagcgccgcacgtcaaggcttcaagagccgcgatctggcctactatgagcgtctgttcgataccttcggcgacctgatcgagttcaaggtggtcgaaacccatttcgacgaatatctggacaccctgcaatccaagctgaatgcggcctccaaagacaagcgcaacctcgaacgcctgctccagcgcgcgcaacagcggccggaaggcacggccaaaaagggtgcctccgacccggcaacgctggaaaagcgcatcgccaccgcagacaagaagatcacggcgctggaaaagaccatcggcgaagtcaatggcatcatcgcctcggacggcccggtcattccggtggaagccggtgtctacttctggcatccgaacgaggtcgtctgcctgtccagcggcgaggacgatcgtttcatggattactacccgtcttccctaatccacttcgaggcgatgcttgactgcatcgcccgtggcgtggagcgcttcaacttctacggcatttccggcattttcgacgccaacgatccttcctacggcgtctggcagttcaagactcgcttcggcggattcgtggaagagcttccgggcaagttcacgctgccggtggacggactgcgcttcggtgtatccgaagccgcacacaagctgctgcatcgctgacaaacagtggcgagcacggacacagaaataaggcacaggtgacgacgagatgagcgcgactgcgaatcgaacagatacgacgtatacgtttggcgtgattacgcccgaagagttcgaccggctttccgaagccacaagccagggcagctttcagcaatggtccgggcaggtccgtcttgccaagattcgtgggcatgaagccgaatgcgttggcgtgtgcgacgcatccggcaatctggtagccggctgcgtgattctgtacctcaatggtcgtttcggtgcagatggctccgtatatttcggccccatcggcattagcgatgatccggctctgctgcgggccataaccgaggcgattcgtgaatcggcccgtcgccaccatgctgtttccgtggcatgctggcctaacgtcgcctaccgtctgtattcctcggacgggcagcccgacggcgagccgaacgatgcactgctgaccggattcgccgatgccggctggacgcatggcggattccataccggttatgacgtggtctgccagtggatgtacgtcaaggatctcaccggcatcaccaacggcaaggaactgctggcatcattcggcaaacgcgctcaatggagcgtcaagcgggcgcagtcgatgggcgtgcacgttcgcgaaatcggccccgacgagttcgacgtgttcgccgatatcgaacggcggaccggtgaacgccgcgggttcgcgacgcgcggcgcggactatttccgccagttcaagcaggcgtatggcgcggatgcgcatttcatgctcgcggaaatccacatcgccgaatatgtggcggatatgaccgccaagcgcgaggccttgcagaccaaggtcgcacagctgcagacgaaatacgatgaacgtccgaccacgcgcatcgaacgtcagctgggggaggaatcgcgcaatctcgcggccgccgacaagcgtctggctgaggtggagggatatgccaagaagggcgatgtgctgccggcagcggcttcaatgttcgtcagtcaccccaatgaggtggtctatcagtattccggttcgttggaggagtacaagccgttctacgcctcggcgctgattcagtacgaagcgatgctgcacctgtgtgtggaacagggtgtgagccgctacaacttctacggcatttccggcgtgttcgacgatccgaacgacgagggccgcggcgtgctggaattcaagcagggcttcaacggctacgtcgagcagatggtaggcaaattcacgttgccggtggacaagttccgcttcggcgtgagcaatctggcgcacaagctgctgcaccggtagcagctggcggccgggggacgaacctatgtgggctgcgtctcgcctgaccgtgtgcccgccgtgcgcccgtcgtgtgcctactcgcgcatttgctcacacgcccatcagcacgtgagcaaatgccatcatcaccagtgaaatcatcgcggtgattgccagcgagaagccggccagtttggcgttgccgagtactttgtcggtgaacagcgtggagaaaatggcgattggagccaacgcgcagatcaccatcacggcgcgaatcgaagccgagaacggcagcaggaaccacgagatcaacgcgaaggcgacactgaacggtatacgccaagcgatgacggccatgacttccttcacatcatgcttggactggggcaaatccatgagcatgcccaccatcagcatcgacaccagcgcgttggcaccgctcaacggctgggttatagaggcgatccaatcgggaatcttcacgttggcgacggtcaacgcgatcatgagcagatacgtgtcgaacggcaccgagccgaagaagctcttgccgatggtgcgcagcaatgcgcggcgggcaagccgtttggcgtcgcgatccttgggcttttcgtacggcaaggtgggaaccgaaccggcgtgttgttcggcaagtgtcttgccgggctgaatatgcagcagttgctgggtgagcacattggtgccggcggccaccatcacgcagttgccgatatcgaacatcgcagccggcaccaccgcgcccgcaccccagaatgactggacgaccgggaaagagaaacaaccgagattgaagccggcgccattgagcatcaggaaggcgcggtcggtcacattgcgcttgcgggtggccagaaagatgaacacgatcgggataaaagcaaacaggaatgcgaataccgaaataagcagcagcgagatgtcatgcggattggtggcgaacgagtatacgatggcaccgggtagcacgatgttgaattccgcggtttgcaacacgcgataatccttctgcccgaacaggccgaaccgcttgaacagatagccggcgagaatgatcagcaataggccaaccggcgtaagaatggcggacatacacttctctccttgactcacacaggctcacggcgcacaggctcagacccacaatgctgtgaccattatatttgccgccttggcattgccatatgtagaggcgtccgcaagggcttgcaattgcctcacgcatatacgaagagcctcccggaatcgttggcgatccaatgtttccaggaggctcaagccggtgcgcgagatgggacttgaacccacacgtcaaagacacaggaacctaaatcctgcgcgtctaccaattccgccactcgcgcgtgcatatccgcgtttccacaggtgtggaagatatacaaaaccctaggccggacagccattacagaccagccagcctagggcatccgagccacttgtcagaatcgaactgacgacctgctcattacgagtgagccgctctaccgactgagctaaagtggcttggttcgcggaaggcatttcgccagccgcgcacaagaaattaagtataagacatctccgcgaaaagtccaatcggcggcttggcagttgtgtcgtgaccgctcggttgaagatgacggttgtgccgcgccacgaactgttcgataatgcaaacgatggcaatccgacatcgctgactgatttttgttctgttcatgtccgaatttgtgagtattctgtttggtgatacggagcgcatccgagccgtgagcgaaggcgctccagtcactgatgaaaggaatggaatcctatggccatcaatccgcccgttgacgccacccagacccctgagtgggctgccctgcagaagcactatgacgagcttcaggccgaaggcgtgagcctcaagaagtggttcgctgaagacgccgagcgtgtcgacaagctgtccttcgacgccggcgacctgcacttcgatctgtccaagaacctgatcaagccggaaaccctccagctgttcgccaaccttgccaaggccgtcaagctcgatgagcgcaccaaggctatgtacaccggcgtgcacatcaacaacaccgaagaccgcgccgtgctgcacaccgcgctgcgccgcccggtcgaagacgagggcaagtacatcgttgacggtcaggacaccgtcaaggacgtgcgcgaggtgctcgaccgcatctacgccttcgccgacaaggtccgttccggcgagtggaccggtgtgaccggcaagaagatcgaaaccgtggtcaacatcggcatcggcggctccgacctgggtcccgtcatggtgtacgaggccctcaagccgtacgccgacgcgggcatctccgcccgctacatctccaacatcgaccccaacgacctggccgagaagaccaagggcctcgatccggagaccaccctgttcatcatcgtctccaagaccttcaccaccctggagaccctgaccaacgcccgtgaagcccgcacctggctgctcgaagagctcaaggccaagggcgccatcgacggctccgacgagaagaacgccgaagccatcaagaagcacttcgtcgccgtctccaccaacctggagaaggtcgccgaattcggcatcgacccgaacaacgcgttcggcttctggaactgggtcggcggccgttactccgtcgactccgccgtcggcacctccctggctgtggtcttcggcccggctcgtttcgaggagttcctgcacggcttccacgagatcgatgagtacttcgccaacaccccgttcgagaagaacgtcgtggtgctgctcggtatgctgaacgtctggtaccgcaacttcttcaaggtcgcctcccacgccgtgctgccgtacgaccagtacctgcaccgcttcccggcctacctgcagcagctgaccatggaatccaacggcaagtccgtgcgttgggacggcacccccgtcacctccgagaccggcgagatcttctggggcgagccgggcaccaacggccagcacgccttctaccagctgatccaccagggcacccagctcatcccggccgacttcatcgcgttcgtcaacaccccgaacccgaccaaggacggcgaccaggacgtacacgagctgttcctgggcaactacttcgcccagaccaaggccctggcgttcggcaagaccgccgacgaagtgcgcgccgaaggcaccccggaggagatcgtcccggcccgcgtgttcaccggcaaccgtccgaccacctccatcttcggtgtggccctgaccccgttcgcggtcggcgagctcatcgccctgtacgagcacatcaccttcgtcgaaggcaccgtgtggggcctcgactcctacgatcagtggggcgtcgagctcggcaagcagctggccaagcagatcaccccggccatctcccaggacgacgacgccctcgccgcccaggacgcctccacccagagcctgatcaagttctaccgcgcaaatcgcgaattctgattcgctttgctcggtcagaattcgtgattcgcgcgaccgcggctgtgctgtctggtgggcagcctggcgactgcccacgtcgcgagttctgattcgctttgctcggtcagaatttgtgattcgcgcgaccgcggctgtgctgtctggtgggcagcctggcgactgcccacgtcgcgagttctgattcgttcctctggtgccccctcgggtgagaggaggtgtcagtgtagctgactgagggagtctctctcacgactagtgcccgacatcttcggatgccgggcactttgcatatacggattgctgtcagtcagatgagtcgaacatggtcatattccgcttcggcatctgtttgcaggcataaaggcactatctggccaactcacgtggctgattcgcttattcgcccttattcgcctcatccaagctcagcagatcgtcatcggcatcgtaatcgaagagttcgccgtaacggccccactccacggcgatggcgaactgctgatgcgcctcgtcgttggagtaacgggcgcgcagcaggtccagcatgagctcgccgcggagcttgccttccgcagacttccgcagtgcatgctcaatgttgcgcaccagcggcgcgtgttccatcgccagtgaggcgaacacctgcttggcccgcagaatgtccgccttatgccaggcgtcgcccgcttcggtgatctgcacatggccgtcgcgtaccacgatgacgcgcagcatcgtaccggcatccaccagcgggaacaggtcgtccacctcgaacgaaagagccgaggccaaatctgccaagtcgatgccgtgaggatgctcggcaaccacatccagcagaccggcaagcccgcccggcgtggcgttgggcagcggatgctccttgattttctcgatggtcttggcgggctgaaggtctgatgcgtccgtgacagatgcgtccgtgacgggtgcgttcgtgagcgatgccgatggcgatagagcctcggcttgttgcgtaggctgcgaggcctgtccggtcaaaatcgcgtacagtcggtccaccatcgcctcgaattcgacactgtgacggtcgcgcggacgctgcagatcaacccgcacatcggcaatcagatgccccgggtgcgagcccaacaccaccactcggtcggccatctccacggcttcctcgatgttatgcgtgaccataagcaccgacttgatgctgcgctgttcgctcgaccacagcttgagcacttcctgacgcaggttttcggcggtcagcacgtccagggcggagaacggctcatccatgaacagcgcgtccggccgcagcaccaaggcgcgtgcaatgcccacgcgctgcctcatgccgccggacagttccttcggatacgccgattcgaagccgtccaggccgatcatgtcgatggcatccagagccagtttggtgcgttccgcacgtggtacgccgcgcgccttcagaccgagttccacattgtcttgcacggtgagccacggcatcagcgcgaaggtctggaacacgagtgcgatgccgggattcgggccggtcagggccttgccgcgatacttgaccgtgccgctggtcggcttgaccagtccggccagcgcacgcaggaatgtggacttgccggcacccgaacggcccagaatggccacgatctcgccctcgtacaggttgaacgatatgttgtcgaacacggtgagttcggtgccgttgtcggccgtgaagcgctggccgacgtgctgggcttcgatgatggtgttctgcggggtcaccgcccgcagcgaacgaatggtttccattgcaacagtcatattattctccttaagtctttagttcagtgtgaaacggcgctcggccatgcgctgcagcgggttccagaacaagcggttgacggccaccacgaacacgctcatcacggtcacgccgatgatggtcttcacggtgttgccgctttcggtggcctcggcgatatacgcgcccaagccggaggcggtcagcgtatgccgtccataacttacgatttccgagacaatcgaggcattccacgccccaccggccgccgtaatgccgcccgtgacccacgagccgaataccgccggcaaaatcaaatcgcgccaccgctgccggcgccccagctggaagctgcgcgtcatctcacgcagatcgtcgggaatctggctggccccggcgatcacattgaacaggatgtaccactgcgtgcccaacgccatcagcagaatactgccccagttgatatccacgctgcatgccacgaaccagagcgtgacgaacgggaacgtgaagttcgaggggaagctggccagcacctgcacaatcggctgcataaaccgcgaaacgcgcggattcatgccgatcatcgcgccaatcggcacccaaatcaccgagcagacgagcgtaagcagcgccacgcgcaggaacgtcaccatgcccaacacgaacgcctgcccgagctcgccgaatcccgcatcgcgatgaatcaccagcataagctgcaccagtccgaacgcacacgctgccaacaccagtactgtgaacaccacgtcaagcgcgcggctgcgtgcggacttcacgtccgccgcccaacgtccaccggtccgacccaacgggcgggtcagcgtgtcgaacaggtcgccgacaggcctgaacagccaggccaccatctcatcgatatgtgactgacgaatgatggtcagcaccacactggtcttgcgcaccgccgactcgctttgcgtaatgcggaacttctccgcccacgcggtcaacggcttccacagcagtacgtcgataagcagcaccaccagcaccatcgtcacgatggcccagcagatggccgcgagattctcctcggccgccgcctgtgccacgaagctgccgatgccgggcaacgcataggtgcgattgttcaccgagatcatctcggaggcggtcaggaagaaccatccgccgcccacgctcatcatgcagttccacagcagcggaatcatcgcgttcggcacgtccagtgtccagaatcgttgccagcgtgtgagctgtagtgagcgggccgcctcgtcgagttcagttggttcgctggtcagggaccgggtgaacgagaacgccatgttccaggcctgactggtgaagattgcgaaaatcgacgcggcctccacgcccagcatcgagccggggaacagcaccatccagatggtgatggtggccgaaagaaagcccagaatcggtaccgactgcagaatatccaacagaggaatcagcacgcggctcaggcggcggcagcgcgcggccgccgtgccgtagatgaacgtgaacaccagtgagaagaacagtgccacgagcatgcggaacaccgagcgcagcgcgtaatacggcaggtcggcgagattcgtactgacttgtgatggcactcctttcgggccgatcggttcgccgatcgccggcagaatccaagcgatcagaccgaacagcgccagaataccggccgcgaccagtacgtcggaggccaggcgcacggcgaatggttggcggtcggacgcggcggtggaagggttgcgggccgacgcatttggacgcgcaccgacgcgattgaatgaaaacatggtcatgaaaagacctccctatgcataggaaagacgaattatgcaagggttatccggggagccaaggaacactacaggcgagagcccgacttccggataacggaatataagaaaacatggtcatcaccaccgcaactatgactgttgccggcggcggaactactggaataatcaccgtccatcggactctcacctccttcaagccgtgcgctgaaacgccagatcaataccatcgtcggtatccatgcgaccagcaggaggggcggaaagtattcgaatccgccgattcgagccatcgttcaagcttcagcatcgcagggcggtggaattgcgttagttcatgccttgatccgacaagaactgctgacctgcgtgcagtgtctccactgttagcggcagcaacccatatccctgcggtagcctcgcctaccgacgctcccaagataaagcccgcctgcaggtctgtcaactacgtcgcagtgccttggtgttggaatgccatcaggcagccattctgtccgcaataatccgtacaattgacgattgctgtgtcgagaagtgggccgccgcataagcccacgtctccatgggtccagtccgaatggccgcaaggcctgactttcggcggatcggcaggcttcccaagggcaaacccgagggataacgagaacaggccaacgcacgtgatgcgcaatcgcgtggatggccccagatctgtggctgatatgcggcagcactgaaggaaaacaatggttaacgctgttgaggcttttgacgccaagcacatgaagccggctgaggaaatcccggccttccgtcccggcgacaccgtcgacgtgaacgtgaagatccaggaaggcaacaactcccgtatccagaccttcaccggcgtggtgatcgctcgtaagggcgctggcgtgcgtgagaccttcgtggtccgcaagatcagcttcggcactggtgtggagcgtcgcttcccggtgcactccccgtccatcgactccatcaagctcgtgcgtaagggccgtgtgcgccgcgccaagctgtactacctgcgcgctctgcgcggtaaggccgctcgtattgccgagcgccgcgacaactccgctaagtgagtcgattcgcgggtgcaatcgtgggcctgatgatgcaggtgcgcgaataaaccgtgaaattcagcccggaaccgtttcggtttcgggctgtttccgtattttccacgtatgatggacgggcgccggcacccctcatatccggcagtatgaatcgcgaggagatggtatgcaggacgatcaggataacggcgaattcccggtttccgacaatccggagagcaatcagacctcgtatgatgacgaggccgatgcccgcgattcccgcacgttccaagtcgccgaccatggcatcgccctgtccccggttcccccggcaccggcgcgcccggcgcacgccgcttcttccgctggcgcgaatgccgcggcagcatcatcgatggatgatgaccacttcaccctacgcgactttttcctgtggtgcggcgttcccgtgcttatcgtgctgctgattcgcattttcgccgtcggcttttacgagattccttcgcgctcgatgatggacaccatggtgcccggcgatcgcgtggtgaccagcaagctcacccccaagatcttcgatctgcagcgcggcgacgtcgtggtattcaaagatcccaacaactggttgaacgaggagcagagcagcgctcccggtggcgggtacctcatcaagcgactgatcggcctgcccggtgacgtggtcgaatgcaagggcgcgggccagccggtgaccatcaacggcgtggccatcaatgagacctcctacattcgccccggcgtggacccgagcgctttcccgttctcggtgaccgtgaccgaaggccacgtgttcgtcatgggcgacaatcgcgccaattccgccgactcccgctatcatcaggatgacggcgatcgcggcttggttcccatctccgatgtggtcggagtcggaatcgcgaaatactggccgcttgaccggcttggtgcgattgatgaccaccacgaagtcttcaaggacgtgtctgacgcttccggctcgaattcctgagtcttttttgaaccgtgtgagtctttgaactgattgagttccgggccgtctgaatcctgaaccatttgaacctggaccgtctgaatcctaaccattgtgagacgatgggagccgcgcatgattaccccgacacttgacttggaacgcagccttgcggcccagggctatgaccttattactggattcgatgaagtcggccgcggcgcgctcgccggtccggtgatggtcgggtgcgccgccatctgggcctgtgatttggcgccgcttgacggcgatgattccgccgaactgtccgggcggacctacctcggcgtaccggacggcgtggccgactccaagatgctcaccgaacataggcgcgaggcgattttcgacgaactgcgcgactggtgcgcggcctacgccgtaggccaggccagcaacaccgagatcgacgaatggggcatcacctatgcgctcggcgtggccgccctgcgcgcgctcagccaagtcgaacgcgaacttggcttacggcttggagggggattgacggcaaaaaaggctgcgggggagattgtggaaggtcgtccgggagactccgtaggggaatccattggaaattgtggggaaagcgttcgcgccctgcctaaagtcgccggaattctcgacgggccgagcgattacatcaccaaggcgctcaacacgttcgacgcgccggacgtgccgattccagccgatataacgaccaaagtcaaaggcgaccagcattgcgccaccgtcgccaccgcggcggtcatcgccaaagtgacccgagaccggctgatggtcgacctcgcgcaaagcaacccacgttacgccgcctacgaatgggctcataacaagggctatggttccgccgcacaccgtgccgccatcgccgaacacgggccgactccgctccatcgtgtctcatggcacctgacctgagccgcgtgcgacacgatagtgtgagcgctaacgcaaaactgttgtggacgcgctaaagtcagtattgattaaggtacaagcctggccgcgcatgggtgccggccgccagcggggaggttaggtagcatggtgaccagccgcaagccaagcaaacgtccgtccatgttcgaagtggccaagctcgccggagtcagccaccaaaccgtctcccgtgtgatcaatgactcgccggacgtttccgacgccacccgtgcgcgagtccaggccgccattgaccaactcggctaccgcccctccaactccgcgcgcgcactggcttcccgccgttcgcgcaccatagggctgatcgccggaggcctcaaattcttcggcccgatttcctccatctcatccatcgaatccatggcccgcgaacacggtctgttcatgagcgtgatgatggtccacgaggccttgtgcatgcagtccgaattcgacaacctgtgcgacaccttcaacgagcagaacgtcgacgccttcatcttcctgaccccgaccgacgtgatgttcgccgccgcctgccgtgcgcgagtcactcagccgcgcgtcatcgtcaccgccacccacggccaaatgaccgtgcgtgagggattgggccttatctccaccgaaaacaagcgtcgcactgcactggtcggtatcgaccagtggggtgcaatggccaaagtggtggccttgctgggcgaatacgggcacaaatcggctctgtattttgccggtcccaacgaatggcgcgacgcccacacccgactggatgcgtggcgcaagctcgccgcctcccgatccatcgattcacagatcgtgcgctgccatacgtgggatgcctctgaggcatatgcgcacatgaatcatctcattgatgagtatgggcgtcggggcatggcgttgcccactgcggtcgtcgccgcgaacgacaatcaggccgtcggcgtcatgcgcgcgttgcatgagcatgggcttcggattccgcaagacatcagcgtggtcggattcgacgacatgtctggcgtggataacatgtacccaccgctgaccaccgtgcatcccgatttcgaggggctcggcgtggccgccatgcgcgagacgctgcgtttgctgggggagggcggcgagccgaccttcctgaccacccagcacggcatggggctgattcccgccgaggtgcgtgctcggcggtccttggggccggctcctcggcggtaaattggcgctgttatcaaaccgttatgatgcgtgacacggtataagttgtgtcgaatgcaggttatcggtacaatgtttttttgaaattgtgagcgctaacatcctccccaaggaaggggataacaacgccggcgctccaaggcaaaggaaagatatggcagcaaccgacaacgcggccgagcaggccgcccacatcgccgagaagattcgcgctggcaagaccacgctgggcatcgaattcggctccacccgcatcaaggccgtcctcatcgacgacaacttccagaccatcgcctccggcgactacagctgggcctcccacttggaggatggtctgtggagctacgccaccgaggagatctggggcggtttgcagtccgcttacgcctccatggccaacgacgtcgagaccgcctatggcgagaagctcacgcacgtcggccacatcggcttctccgccatgatgcacggttacctcgcattcgacgaggccggcgaactgctggtgccgttccgcacctggcagaacaccaacacctccgaagctcacaagaagctctccgagctgttccagtacaacatccccgagcgttggtccatcgctcacctgtaccaggccgtgctcaacaaggaagagcacgtctccgaggtggcttacttcaccacactcgccggttacgtgcactggaagctcaccggtgagaaggtcctcggtgtgggcgatgcctccggcatgttcccgattgacccgaccactcacacttacgaaaccgcattcatcgagaagttcgacgctctgcctgaggtcgcagcccagccgtggaagctggagaacctgcttcctgagccgctcgtggccggcactccggctggcgagctgaccgaggaaggcgccaagctgctcgatccgtccggtgccctgaatcccggcatcgtgctcgccccgcctgagggcgacgccggtactggcatggtagccaccaactccgtgcgcgtacgcactggtaacgtctccgccggcacctccatcttcgccatggtggttctggagcacaagctcaaggccctccaccctgaggttgacttggtcaccaccccggccggcgatctggccggtatgagccacgccaacaacttcacctccgacctcaacgcttgggtcggcctgttcggccagttcgccaaggccatcggccagtcggttgatgccggtatgctgtacggcaccttgttccgcgcggccatcgccgacgacgtggacgccaactgcggcggcctgctgaactatccgttccgttccggcgaattcctggccggtctgcctgaaggccgcccgctgttcgcccgcagccccgaagccaacatgaccctcggcaacttcatgcgcgcccagctgttctccgcgttctccccggtcaagatcggcatggacgtgatgaccaagcaggagcacgtgcaggtcgactctctcgtgggccacggcggcatcttcaccactccgaaggtggctcagaagattctcgccgctgccttcaacaccccgatcaaggtcatgtccaccgccgccgaaggtggtgcctggggtatggccgtgctcgccaactacctgtggaacaccaacgaggatcacagcaacctcgctgacttccttgatggtttcgtgttcaaggacgcccagtccaccactgagaagccggtggcttccgatgtggttggtttcgaggacttcttcgcccgcttcaccaagggcctgcccatcgagcacgctgccatcgaaaccatcaacctcgaagataagtaagcctttctgacctccctctattgagagaggtccttgagattttgaaaaaacgtccatccatcacagtggaaaggaaaaccaataatggcaactttggctgattacggccccgaggttcgcgccgaggtcaagcaggttcgtgaggtcgtctccaacctgcaccagcagctgatcaagtggaacctggtcgtgtggaccgcgggcaacgtttcccagcgtctgcacaccgccgacctgttcgtcatcaagccctccggcctgcgctacgagtacctgaccccgtcctccatggtcgtgtgcgaccttgacggcaacgtggtcgacggtgccgaagccccgtcctcggacaccgcttcccacgcctacatctaccgcaacatgcccgacgtctacggtgtcgtgcacacccattccacctacgccaccgcttgggctgccactggtcagaacatcccgtgcggcctgacgatgatgggcgacgagttcggcggcccggtgccggtcggcccgttccgtctgatcggctcggaggcgatcggcaagggtgtcgtcgagaccctcaagaagtacccgaagtccccggccgtcctcatgcagaaccatggccccttcaccatcggcaaggatgctgaaggcgccgtcaaggccgctgccatgaccgaggaagtcgctcacaccatgtgggccgcccgtcagctcggtgacatcatcgagatcgaccaggccgacatcgataagctcaacgaccgctaccagaacgtctacggccagcactgatttgatggagtgtccgccgcgttgcggaaggctcgacgtaccttcgtacgccttcgccttccgcgtcttgcgggcacacacatcaaatcagcgctgactccgccagcacggtggtgccttggctcccctctctgaggggagcctcggtcggcgaatgaaacttaaacaaacccccataaacaaagaagtaaaggaagtaaccctatggttatggaaaaccccttcgagggcaaggaaatctggttcggcgttggttcgcaggacctgtacggcgaggaagccctgcgccaggtcgccattcactccgctgaaatggtcgactacctgaacaacaccggcaagattccggccaagatcgtcctcaagcccaccctgaagtcctccgacggtgtcaaggagttcatggtcgaggcttccgccaacccgaacgtcatcggcgtcatcacctggtgccacaccttctccccggccaagatgtggattcgcggcctcgaagtgctgaccaagccgctgctgcagctggccacccagcaccacaaggaaatcccgtgggagaccatcgacatggacttcatgaacctgaaccaggccgcccacggcgaccgtgagttcggttacatcgtctcccgcctcggcatcaagcgcaaggttgtcgtcggccactacaccgatcctgaggtcgtcgagaaggtcggcacctgggcccgcgcctgcgccggctgggatgcctccaacaacatgaaggtcatgcgctggggcgacaacatgcgtaacgtcgccgtcaccgagggcgacaagaccgaggccgagcgcgtgttcggcgcctccatcaacacttgggccgtcaacgagctcgtcgctgcgtacgacgccgtcaaggacgaccaggtcaaggagatcatcgaggactacaaggccaagtacgacgtcgacccggctctgctggacgccaagtacgactccctgttcatcgccgccaaggaagaggccgcgatggtcaacatgatgcgcgccaacggctgcaccgccggcgtcgacaatttcgaggacctcggcgctctgccacagctgccgggcgttggcccacagcgcttcccgtccgagtacggctggggcttttccgctgaaggcgactggaagaccgccgtcctcgtgcgcatcggcgccgtcatgggctacggccttgagggtggcgcctccctcatggaggactactcctacaacttcaccgagggcgacgagctcgacatgggctcccacatgctcgaggtttccccgtccatcggcaccatcgccaagccgaagctggagatccacccgctgggcatcggcggcaaggccgacccggtccgcctggtcttctccggcaagcccaccaaggacgccgtcgtggtctccatgtccgacgttcgcgaacgcttccgcctgctcatggacgtcgtcgacgtcgttgagccgcagggctccctcaaggagcttccgtgcgcccgcgccgtctgggagccgaagccgagcctgaagaccgccgttgagtgctggatcaccgccggtggttctcaccacacctgcatgaccacctccgtcggtcgtgaggcttgggaagacttcgcacgcatcgccggtgttgagctcgccgtcatcgacgagaacaccaccgctcgccagttcgagaaggaactggagctgtccgagatgtaccaccgtctcaacaaccagcactgattggcggagcgtataccgcctttcctcaggttcgacgtaccttcgtacgcccctcgccttcggacggcggtctccgcacgcgccaatcagcgctggcaagccagcaccgatgactaaatcagtctgctgactgctaccgctgaaaaagggctgttccggaaaaccggagcagccccttttgctgttatcggcaactccccacaaacgtatcaaaaatcgcctgcgagcatggatctaccttgtagagaaactcgggatgccactgcacggcccacaggaagtggcttgccggccggtacagggcctcgatcacgccgtcgggcgcaacggccatgacttcgagaccgggggccacatcacgaaccgcctgatgatggtagctgtttactgcaatctcagtctgccccgcgaacaatgaagccaggggagtgccggacaccaaggaaacgctgtgcccgaacgcatcgtacggcggattcatatggtgttcgatatcgctcggatgctggcttggcagatcctgccacaacgtgccgcccagtgccgcgttgatgaactgaatgccacggcagatgcccagaatcggcttgtcccaagccattacagctggcagcagaatcgattccattcggtcgcgctcaggagagagcacctcgctacggccggtggcggaggccactgcaccaaccatcggtcccacatccggcccgcccgtaaacagaaacgcgtcaaaccgttcggcacattgcgcaagaatgtcggcgtcatcggtcagcggcaacatgatgggcgtaccgccggcccgcattatcgcctccatatatccgggcagcatccacagactatcgcgcccgtaatccatcagcggagtcaccgcaatgagcggtcgattcgtagtcatgcctgcctcttttcgcccaagtgtcgctttcgtcgttctgccgcaaatcgcttgatccagtggccaataatgccgtcactgtaccgaaccaatgtaaccggtcggccaacattatttcgtcagccagccacgacgagatcgcacaatgtgccaatgatgggggctcggtgcgaccttgtcaatgttcgggccattgcacgttcggcggggaaagcatgccccgtccgcgcatcgtgatgaacgagtaaggttgacggggagggagaatcacatgaaccaggcatgcgtacgcaacgacaccatcgacgcgggcaaccatcatggccgaccgcaataccggtcgttcctgcgatttctgacatcgcaggaacgcaacgtcatttggctgttgctggccgtcgcttttcttccggtggacggcaccacgcttggcctgtacgcgccgttctggtcgccaatcagtccggcgctgttcgccgtgtactgcctatgcaattggcggcaactgcgcatcgcagccaaccggtacctgccaatgttcctcctaccggtggtctgtataatcctgtccatcccgggatggctgaagttcggcatccacctcaacgccgcgttcatgagcatcaccagattgctgggcgtgctcgccactttgggtgcgatcgcccttgcgttcgacatcaaacgcattccgtggcgtacgccattgcggattctcatcgcatcatactgggtttccttcggagtgggcgtcgtgcaatggctgtccatccgtctgcgcgccaaaccgttgaccgactatttctcgcacctcatgtaccggcaatacatcagcgacaactcggtgtggggcggcggccgtccgcagttcctgttcgccgagcccagctatatcggcatgcacctgttcggcatactgcttccgctcatgtggctcatgcgcgggcgcgaccgcatctacgccaaacggctgcgtgacctcatcgtcacgtatgccgtcggcgcggtgctcatgcaagccggcaccagaatcgtcatcgattccgtcgtggcgttgctgatcgcccttgtggcgcgcaccgattggcatgacggcgcacgccgcgtccggggcatgctgcagattctcggcgcatgcgcactgggcctgctgggtgtgctggcggattccagactctccgccatcgcggagaacggggccgagggagacggctcgttcttcgcgcggatctaccaaagcctcgatccgatatgcggattgctcacccatccgtggacgctgctcaccggttatggcgcgggcaacatcatcaatgcggtgtgggccggcgcggccaaagccggacggctgctggacggtcttggtatgaacggcggcgcggccacgggattcgcggccggcgtgaacgcggacacggtgtggacgatgtgcgcgtataccagcgtcatcgccgaatacgggctgatcgggctggccatgctggtcggagcctcgatggtctgcatgacgcgcgggaggacggtatgccgtggcggtgcggatggcgcatcgtccgacgggctggcgcacggtgtttgtgtcaccgacgttgccgacgttgctgatgttgccgggggcaatagtggtgatggcgttgccggcgcgggttcgggcgaatccggcgtctggcacaagaccgtcatctgctggctcgtcctggtcgcatacctgtacatccaatgcgagaactatgcgttcgccgctctgccgctcctcgtgttcgccgcctcgaaggtgaggcgcgagcgctgattcctctcgggccgacgcatcgacgcggcccgagatggaccaaaatccagaataaacgacatttgccgctgttccgtttttcgcccaaggcgtatctcttcccgtatcttgaggtgcatcatgtattgtcgcggctaactaaccggcgaaacgcggcatgtttcgcattttgggcgaaaagcccaaggcccacaggaggtattgatgacgttcgttgcacggtcggtgcgctatgtgctcagaaaacgagtacgaaccatagtgctccttatagtattgaccatcataacggcgagcatgctatccacgatcgcggtttctcgggcagctcaacaggccgccggacgaatcgagaaggaagcggtcggcgggttcgtgctggccagcaacctgcagggcagcatgctcacgcctcgcggaggtggcatggtgcgtcccgccgacgtgcgcaggatcgcccaactgcccggggtcgattcgtatatggtccgtcagaacgccaccgctgatctcgtgggggcgaatgtggcgaaggtccccggcggcgatgattacgatgcgaccaaggagcagcaattcggcaacgccgccaacgtcataggcacgaatgattcgtcgaaactcaacgtgttcacgtcgcgcacgctcggcatggccgaaggacggcatctgaaggcctccgacaagtacacgtcgatgatccatgaggatctcgccaaagccaacgggctcaaagtcggagacacgctcacgctcaaggccaacgcctacgacgccgacaacgaatcacattcgacggcgaccgtcaagaccaccatcgtgggtatattcaagggcgacagcgccagaaaggtatccagccgagcggaactgaccgccaacaccatctacaccgatctggataccacacgcgatctgtaccagtacaaggacggcaaggaaatataccaggacgccaccttcgtgctgtccaagggcgttgacgtggagaagaccatggacgccgcgaagaaa

SEQ ID NO: 2592 - DNA, 36060 bp, Unknown
  R222_15m  MAG No. k141_8004
atgctcaactggaagcgtgagccaatcatgttcgccccgacccttgaagaggagaaggacggcgtattctccggttccgcagtaatcggcgacgatggcaagctcaagttctactacaccggccaccgttgggccaacggccacgacaacaccggcggcgactggcaggtgcagatgaccgcgctgccggacaatgacgagctcaccagcgccaccaagcagggcatgatcatcgactgcccgaccgacaaggtggatcaccactaccgcgacccgaaggtctggaagaccggcgacacctggtacatgaccttcggtgtctcctctgcggacaagcgcggccagatgtggctgttctcctccaaggacatggtccgctgggaatacgagcgcgtgctcttccagcacccggatccggatgtgttcatgctcgaatgccccgacttcttccccatcaaagacaaggacggcaacgagaagtgggtcattggcttctccgccatggggtccaagcccagcggcttcatgaaccgcaacgtcaacaacgccggctacatgatcggcacgtgggagccgggcggcgaattcaagccggaaaccgagttccgcctgtgggattgcggccacaactactacgccccacagtccttcaacgtggacggccgtcagatcgtctatggctggatgagcccgttcgtgcagccgattcccatggaggatgacggctggtgtggtcagctcaccctgccgcgcgagatcacccttggcgatgacggcgacgtggtcaccgcgccggtcgccgaaatggaaggcctgcgcgaggataccctcgaccatggttcgatcacgctcgatatggatggcgagcaggtcatcgccgatgacgccgaggccgtggaaatcgaaatgaccatcgacttggctgcctccactgccgatcgtgccggcctgaagattcacgccaccgaagacggtgcctacacctacgtggcttatgacgaccagatcggccgcgtggtggtggatcgccaggccatggccaacggcgatcacggctaccgcgccgccccactgaccgacaccgaactggcctccggcaagctggacctgcgcgtgttcgtggatcgcggctccgtggaggtctacgtcaacggtggccaccaggtgctgagctcctactcctacgcctccgaaggcccgcgtgccatcaagctcgccgccgagtccggtagtctcaaggtggattccctgaagctccaccacatgaagtccatcggactggagtagctctctcacctccctcacagagggaggttttttgtgtgcccctgtcgttcgccttcgcctatactgatggacggcatataacacaatccatcacacgaccggcaggcgcgcaggctcctcaccttactgttccacgccccggccgcaagcgccaccagcaaaccggactggcgcggaaagcaaggtgacatcccatgtccatcgccaagcgcctcaagcgccgcatgcccaccgtcatcgccgtcatcgtattgctggcagtctgggaaacgtgggtggatctaggacatgtctcccccacgatgatctccgcgccaagcgagattttcgccgccaccatcgaaacgtggaacacgctcggcccggccgcggcgatcaccggctatgagggcgtggtcggcttcctgttcgccgtgttcttcggcattatgatcggcatcgcactgtactgctcgcacacgttcaacgcggcgttctatccgctgcttgccgccgcacaaaccatgccgctgatttccatcgccccgttgttcctgatttggttcggctttgagatttccggcaaaatcgtaatcgtggcggtattcggcctcttccccatcgccgtgcagaccgtgcgcggactagaagcggtgccccagttctattccgacgtcgcattgacctgcggcgcgaccccggtctggacgctctggcacgtgaagctgcgcgttgccgcacgtcagatctatggcggtatccgcgtatctgccgcatacatcttcgccacggcatccaccgctgaatatcttggcgcgcgcaagggcctcggcatctggctgcaggctgcctacaattcgttccgcacgccgctgatcttctccgccaccatcgtcattatcctgatgacatgcgtactgatgctggcggtgaacgccagcgagcgcatcctgctcggcccggccggcgatgacgaagaccccgacgcggaccagtagttctttttaccgtcaaagacacaagccggcggccagaaccgactgaacggggcggcttctcatgaggtctccagccctgtctctataatggaacagctttaccagcgtgtggcaaaccggctttcttgagctttcatagggaatgtcgggggcgctggtcgaacggaaatcaaggccctccatatcgttttctgccgacttccgttcgaagcaatcccagagaacgatagagagacaacgaattagggaaccatcattatgaagaaaagccttgtatccaaggccgctgccctcgtgggcgcccttgctatgactttcggtttcgccgcatgtggtcagaccaacaccgccgactcctccaactccaacacctccgacctcaagaaggtcactttcatgctttcctgggcgcccgataccaaccacatcggcgtgtacgtggccaagaacaagggctacttcaaggacgccggtcttgacgtggatatcgtggccgtggcccaggccggtgccgaacaggccgtgaacaacggtgtggccgacttcgccctgtccaacttgaccaatgtgggcatctacacgctgaagggcgctcacatcaagcaggtgctgcaggtgcagcagaagccgagcgccatttggtgcgcactggcgtccaacaccgccatcaagtcccctaaggatttggatggcaagaccttcgccaccttcggctccaacgagtccgacgccgtggtgcgccgcatgatccagaccgacggcggcaagggcgagttcgacaaggtgaccgtcggcacctccaccttccagaccatggaatccggcaaggccgatttcggcggcttctacgccacgtgggaaggcgtgcaggccgacatgtacggcccgaagctcaactgcttcaccgagcctgactacggcgtgcccggcaacgccgacgccatcggcatcatcaccaatgacaagaccatcaagaacaatcccgacctggtcaagaagttcactcaggccactcagaagggttacgagtacgcgtacgccaacccggatgacgccgcgcagattctcgtggacgaagcccctgacgccaacctcaagcccgaattcgtcaagaagagcatgcaggttatcgtcgacggccagtactggggcgatccggccaagatcaaggacggctctttcgtgctcggcaccaacgacttcaagggcactcaggaatacttcgacttcctggctgaagaagacgcctacactgacagtcatgacaaggtgattcatgaggccccgcaggccaaggaccttggcaccgacgaattcctcggcaagtaatttccgatattccgagtttgaatctacgcaaaaatgcgtccttcccatgaggaaaggacgcatttttgcgtatcggccgataaggttattcatagcgaatcatgctaacaaggaggcgattccatggcccaacgtcctgaccgcattattgccagcatggataccggtgttgatgatgcgttggcgttggcgtatttgttggggtcggcggatgagtgcgagctgagcggtgtgatcgccagttatggcaatgtggatgcgaacacggcttatgccaatacttgcgcggtgcttgatttgtttggccgggcggatattccggtgtttttgggctccgagcatccttcttgggctgatgcgtttattcccgatgcagggtgtgcccagtttcatgggaaggatggactggggaatacttggctggcaggggccggggctctggctgatggagctggtgtgcctggtgatgatatgtctggggatgacatgtctgaggatgtgcccgatggggttgtttctgttggcgggtatttggtaggggacgctcatgctcatccggcgtcggggtcttgttctcgtgtgggtcgctctcggcctgtggaccgtccccagtcggctacatcgacagctctcgccagctggggcaaaaggaggcgctccgttgatgctgcggatgggattgagtatctgattgagcaggttcgtgagtttggccgagacgttaccgtgctggctaccgggccgttgacggatgtggatgcggctattactcgggcaccggatattgcaccgaaactcaggctggtgatgatgggcggtacgcttacccaacccggcaattgttgggatgcggtggccgagacgaatatcatccaagaccctgaggccgcgaatcgtgtatttcattccggcgcagacatcacaatggtgggacttgatgtgactcaccagtgtttgctaccgcgatcggcggccgaccagtggcgtgcgacggggaccaagcgcgggcggttcttggctgatctcgcggacttttccatcaaggcaaatttggaagccgcccccgcactgttctctggcggcatgccgttgcatgatccgttggcggcggcggttgcacttgattcttcactggtcgattgttttgatcttgcgttgcgcgcggagaccaataccggtgatttcaatggagtacgaggccggaccaccggagacccggttgggctggtgaatcattccatgccgcatgtgcatgtggcacttggtgcggattcgggacgttttttggatgagtttacagagaggatggctgaggtgtgccggtaactcccctcagtccgctacacggacagctcgaccgcaattacggacaagctgccgctcgcattcttctggctcgactctcgtctcgccttcgcctacaaacagcccatcgggctgtttgttttacggctcagccccctcaattttgaggggcttaacaaggactatttcacacccccagcaatcaaggaccggcttcgccggactcatcattacctggtcatgtcctatcggcctcggccaggcggcgtgaacgaacagtccaccgggctacatgccgaggtttcgcaaggcttggaatcattgggtttttcatgtccaaggcggctatgtgaaccttaaacgatgccgattctagcacatggggacgcttcgtgacacatcacttcgtgcgtaggtcgggccatggcgggggtaggagttcgtcgatggtgacgtcgaggatctgggcgatggcgatcagggtcttggaggtggggttgggcgtgggcccggcgaaacctcccgattcaagccgctggtactgcaccgtggagagtccggcgtccgaggccacgcgctcctggctgaggccacgttggtcgcgcaggcggcgcaggcgtatgccgagccccttggcgtactgccgccaggtgagttcgtcggatatgcgctcgtgcatggttccacccaagcgcaccactgcatatatgattacttcataaatgtagtattatatatgattactacataaatgtagtatcccgttgtctatgatggactcggaagagcagaacgacagaccgggaggaacgatgtccgacgagaccgccgatgaaaccggggacgtaccggaggacggcaggaacggcgagacccacggcgtcaggaggaagaccgtcgccgatctgacgcgctgtgccgctttcgcggatgagtattccctgtatcagggcgatgactttctcaccttgcacgcggattgtggttacgcgcgattatatggcggaatcgtggcgaattacgtgcccggttctttccgtcgcaatgccgatgggacgtattcatggcgcatttccaatgactcatatgcttccgatgcgacgttctatccgaagggcatacagtctccactgttcgcccagattccagatgacggcttttctctggggtatgatcgcatcgattttggaggatacgggtatctgcggggtgttgtgtcatgacaaaagcacgtttgtgccggcaatgcggacggccattgaaacccgaggacctgttttgcacggaatgcggcaatcgggtcaggcacagggtctcggtctggccgatgattgccgcagcggttgcagtctgcgtggtggcggccagcgcggctattggtgtggccatcatggggccggacaatggcaagggcgttgcagccagccatatcaatatcaaggaacataaaaagacgaacacaaccaagaaggagacggatgcggccaagaaatcggacggcgacaacgataatacgatccggaacgacgagaccaatcggccgaagaccaagcactacacgaatgcgcggttcgcttttgcgattgatgtaccggaggatttcgcgtggcagccggaatccgacaacggcgatggccgtaagttcaccaatgaccagctgggcatgaccatcacgacgtggggatcgttcaacgtgaccaacggggccatggaggatgtgttcgatgtcgatgatccgaaatactcctacaaggcggtgatgccgggagaattcgtcgccagctgggaggagaacggtacgatcacctacctgcaccagctttatgccccggatgtactgcggacggtggaattcacctaccccacgagccagaaggcggccggtgaccaaattgtcgaacagatctcttccacattcgcgtccacgtattcgacggatgcgctgcccgggaaagacgaatcgaatcggtgcgccgcctgggccggtgactaccgaacgttggggtcggccttcggcacctacacgttgaaggccgactgcagcacggcttcctccatgcaccaaggccaatggcaagctggctcctatgacagggattcgttcaaacagaaggccaatgggcggtatgcctggacgggtgtgggcaaatgcgcctacgatgcgtctcagacttcgtccgaggaacgtgcggcatgcgacgctttcccctccagcgtggtgaagttcgagctggtccccagcggcgcatcgcccaatggcatgctgctgcacgcagtttccgatggaatcgacgccaatgcgtgggagtcgtatttcgcgccggagggctatgacggaccccaatgttccgatggaagctgccgataaataatgacgccggagaatatcgaagaagaggagcatcgatgatggtgtgcagctattgcggtgcgcaactgccgcaaggcgccgtattctgcatgaactgcggggagaaggccgctgatatgggcggcgacatcaacagtgagacgcttgtgtctccgccggtgggcgataatggcaggccggaatcgcccgtcgtgcccaagcgtaagaagcgtatatggattatcgttgccgtggcggtcgccgtcgtgctggcgcttggaggcggagtgggcggctggtggattatgcgctccatgcacggcaaggccttcgccgcatgcgaatcgtcggtaggccgatatgcggatgccgccgccagcatcaggaagacggtctccgacaacgccgatacgtcgaaactcaccattgacgacgtgggcgaccagaagctaatcgacgcctatgccgaagccgagaaggatatcccccaggacatcaatatcccagggtgccgaacgtcaatgccaacgaatgagcttgaccgtaacgccagccaggcggatcgcggggccaagacgctgacgaagaaaacacgcactttgcagaaggcggccaaagccatatcagatgccagggaagcgaaaacgctcgtcgatgcttccacggcgttggacgataaggtcaagcaggcgcaggacctgctcaatagcaatggttcggacgccgactccgataaaagatccgcattgcagaccgccattggcaacgcgaacaaggccaaggacggcaaggacgcaaacggcatcgccgacgcatccaagcaactggatgacgccatgaacgcggtaagcgaaagcgcccaagccaactcaacaccatgctcggctttcgccgggagttggggaccagcaggaaatgccggcggaggcagcaccttgaacggggactgcacgctaatcgacctgttgcccggaggcggcatcgaatcgcatccaatggccaagggcactttccagaccctgagcaatggatcaaagacttggatggatgacgagggaaagagatacgtttattacccgccgaatgtctacagccccgaattcgagacactggatgatcgaggcacttgggtaaccaacaaattcatcgacaaaccgcgtattgtcatcaacggcatgccccgtttggtgccgtataggtagctgagccttcattttttcaccaccgacgatgacatcatgcatctaagccctttgatctatgaatcttgagggtttgcaatgagccgcgtaaacccaatcaaagagacggagaaagtaatgcaaaatcctgttagcgaattcaagccagagagggacgctaaatccatcaagctcaccgccgtcatcgtcgcggtggtggtcgtggcgctggcgggtatcggcggcggctacgcctactggacgcaccacgaggacaacgcctaccatgaggcggtagcccaagccgagaacgccgacaaggcgctctcgaaggccgtggacgaggccacggcgaccgaatataaggcggatcagctcaaggagccgaagctgctgggcaagctcgacgccgccatcaggaaggccaaggcgctcaagggcatccccaacgacgcccccagcgagtggctggcgtggcagctcgcctccgcgaagaaggccaatgccacggacgcggacgaggccaacgcccaagcgaagacgctcaacgccgcgctcaaggccgtcaaggacagcaagctggcgaaggagctggacaccgccaagagccagctcaagcagggtatcgacggcgcgagccagaccctcaaggacacggacgggaaggtggcggacaacgccacccgcgacagcctcgcgaaggccatcgacgaagcgaacaacaccctttccaagaagggcgtcaccgacccgaagacgtacaccgacgccaaggcgaagctcgacgccgccgtcaagcaggtgaccgattcgaaggccgcgaaggagcaggccgacgccgaggccgcagcccaagcccaagcgcaggcgcaggcagcccaagcccaagccgcgcaagccgccgcgcagtcgcagcgctcctactcccagtcctacaaccgttacggcggctccggcagcgggtattcctccaaccgagggtattccgccccgcagcagtcctacaccggcggttcctcagcccccgctcctgcccccatccaacgtcccaacaatggagtccttggcggcggcaccggcccgctggttgattgctccaaggttgcttgctccatccttggcaactgaccttagtcatttctctccttggaagccccatctcattgaggtggggcttttccatgtcttcacgcatgctcttgctggcgtgggtgatgcttgtggtgtgattgcctactttggggcaagcaggtcgtgcgccgctggttgggttcggtgggtgcgcggcgttgcttggtcaatatagttcgatttaggagagatatgctgaaatacaaagagcatagcaagcccactccgcccaaggaaaagccgggttggctgaggaggggtatcgcgtcgcttgcggcgttcgcgaccctcgccacgggtggtttggtggccgtttcctctgccaacgccatcgacaactccggcaacggcgtcattatcggcggtggcggcaacaccggcatcggcccgaatgacttcgtcctgtggctcaaagataatctggctcaaactgctgcgggcaaaccgcccaccggctggggcacaagggacaacgccaacaccagcgatctgctcagcgatctggccaaagcaggcgtggatgtcagtgattctggtgtcaacaagcctctgattcagaaggcctgtaaccaggcggtgaaccgcgccctcgacgccacccatcaaagggcgcgcgtgattggcttcgccacctcgctgcgcggtggattcatgtggggcgacaacgccgcgcactggaagtccctgttcgagcagagatggtctcaggctcaggcacagccgaacggtggtgtaaggttctttttgaatggttggactgatggcgacgtaaccaagttcgcccgtggtgagttcgacaagggcatggctgagatggccgcagccggcacggtgaataacctggccatctgcgtcgcggtgaacgagtcccagcccccgatggccttcacccccaccatctccaccgaggcccctcacatcattcaggagggccagcccatcaccgacagggtgacggtcggcgtgaagtcgggtgaccattggatcgacggcacgagcgtgacggcgaaggggtattacttcaccggctcgaaggacgcgatcatcaggaacctgccctatacgggcgatccgaccgacgccggcatcaataattatctcaaccagataaggtcggccggaggcgtgcgctcatatgatgtcctcggccctcaggctgtcgtcgagtccgaggagatggaagcgtccggccggggcgtgctcggggtcgccgaggtagtcggagatctcgttggggtcgtagcggtgcatgccgccttgtctggtcatgtagatgacctggcggaaccttctgaacatcgccttgcgtcggggccgttcgatctcgctgtacagttcgttgaggggcaggttgctcacgatccacacggtgtcgtacatggcgatccggttgtggtagcgggcggccagggtggtgcgccaccggtcggtgacgttcaggagctggtcgaacggcagcgcgccggagaactcgtccatcagcagcaccttctggttcccgtagccgtcgaagggatgcaggtagtcgctgacgcggtacacgtcctcgggcgcgtatctgttcatcacgtaggaggtcttgcccacgcccgtctgcccgtacaggtagtagacctcgatgtcgcggccgctgctggagttgtagatcgacctgtcccttgcctcgatgagccgcgagagccatccgacgcatcgggaggcgtggttgtcggtgtccgcgagcagtatctcgtcaagggtcatgccctgttcgaccatgccgcgcagctcttcgaggtcgttgcgtttgccctgctcgtccgcgatgtcgttggcggacaggccgtggaagaacgggccggcgtcatttgccgttatcgtcgggaccgttggtttcgccgatgttgatttcgatggtgtggttgacacgggtttcctccttggtgacgtaggcgtaggcctgggccttggtgccttccctgggttcgatgtgggcgtccggcatgcccgccttggcgagccggttcttcacggtgctgaatttcttggggttcccggtctccatccagatctgccagtgcaggtagccgtgggacgcgccctcggagcgctgcgccccctcctcgatctggccgcaccagggccagtcggcgaacgcggcggcgatgtccctctcgtaccggatcccgccggtgggatgccggcccttggccgggtcgtcggggtcgtcgggctcggtggccaggacgggtatggtgatcagccatccacggctcctcctgccctccgcggacgcggaccgggacttggccctccgcttggttggattgttgctgttgctcattggacacaacctttgacacactgccagacacaagcccctccgggtcaaaagggcctgcaatcggggacgaacgggatgaaaggacacagacacaaaagtgcctgggtaacactaggccaggcaccccggcccctggcggggccgggggcgggatccggctccgccgccttcgcggcacgccggccccgcccgccgcatgcgcggcccatgtcacggatccgccacgggaagcgacgcggacgacaaggccacgcacgcctccaactgatccagatactgctggtaggacacggcgaccccacggaacagggtgggcggcacgcagggagccgtcatgaaaccgacgccgggccgggcccgggcgaggaacgagcgctgttggtcatccaggccggggatcatcatctcgatcccggcttcatcggagcgcaggaggaaccgggtctcgatgttcgaccgggccacaccctgcaggatcgaggcgtccatgcgctgggcgacgaccatcacccgcacgccgcacttggccgactgggtgaccagccgcaggaacactgacctcaaccgggcctcgagcctgcccttgggcgaggtcgaggcgtccagggtcttcgccagctccagcaggctggggaactcctcgatcaccacaagcaccagaggacaagcgacggtgaactcgtcgatcttgtcacaccgctcggcgagcagacggtcgagacgatcccgcatgagcttctcaacgccctccaacgccctcgcatgcgcgtcgagatcgtcctggcccagggccaccagaggatcgccggcgaacggggccaacaacagccgggagatgtccgacccgacgatccgcacccacggcatggccgccaactggcccagcagccagtacgccagcgcggacttgcccgaccgcgtggcaccggccagggcgatgtgcgagggcgtggccacgtcgtagtcgatcggctccctatgcccggtcaggccaacgcgcacgcgggccatcgaagacaaaccatcattcaacgtcatctcgcccactcctccttcgcctgggaatgaagccgtatcagcaccgcacgatcccgcacgacaggctcgtcggcggacatgttccacaactgggccaacgccggaacggcctccaccacctgatccacgtccatcgacggcggcggagtcacgacggccgtcacaacacaggtcttgggatcatggaacagccgcagaccgggaaactcgcatcgatcggactgctcggcggcgtcgatcatggcgagccgctggcgaagcagcacgccgtcctggatctgttgcctggcgcgaccccgctgcaactcgaaccgttcgtggatccaggccgactcgatgggcgtcaacgcccgctcgaccataagaccggcccgtgcgggcaccgtgccatcccgccatttctcaaacacattgtccacctggcgttgcaacgcacgttgttcgccggactgcatttcaccgacatagccgacccattcgcgcacgggccgacacgacgcggtcacccagaccacagccgtcgccccggtggcgacgaacagcgcgtcgatcaacgccgcgttccacgcatttccgcttgccatgtccaaggacaacaggcaaatgacgaaaccgaacactaggaacgccgcgaaaaccgcgatctgatgcgcgaagacgcttgacaaaccctcatcggaggaaccggcccgcgtcggagccagctcctcaccaagatcggcccattccatcacaattccaccgcgccatcatcagcggcgacccgtgaggagcccagagatcgcaggcctgagccgcgcaacgcgatgcccgccatatcccgctctggcatatgccagacggaaacgtcgaggctgtcgaaggtcgccgcgcccatgacctcgggccgttcctccgagtagtacgtgatctcggcgggagcgccggaggcgcggccctggggggtcaggatcgccttgatcgtccagcgcggcacgccgtccttcgacgtggcctgcacatcggtgcgccggccgtcctggtagacccacttgggtgccacgtcgtatacgttgacaccgatccgaccgagatcgaccggatattttgtcggctgactgagcgtattgaacttaaaaaattttatccatgatagtcctttgcggatttattgttgagccgccggtactcgcgttgggcgaggagggcagagttgaccggctggccgataaaggcgtcgagctccgaacgccgaagcagaacgcggcgaccagccttgtatcgcggaagacgcccggagacgaacgcgcggttgagcgtcgagcgcgacaggccggtatattggacggcctcggccaccgagagccaccgcttgtcgagatcgtgtgcgcccatcgtgatcgctcctttcgttttccttgacacttcgataatcgcctgaaagcgcggtcgtaaccagagcggaacccgagcgggttcgacacccatgcgcgtcatcggaagaggagacgcgggcaagcggataatgggagaaggacatcacaaggaggagcgcatggacgaccacaacgaggacacggacgagatggacggcatcgaggacgccgggccggcatcctgggaggaacgggcacggttcctcagacagatcgacggaataaccgagcgggaaaggatagccgagcgggaaaggatagccgagcgggaaaggatccgcgcgaacgggatccgcgcggacgtgatccgggaaatggcgatgctgaccgaaacccagatcgggcgcctccaggagatgctcagggtgctgcgttcggacgcggccgaccccgatccaagcatcaccgaggagatggcacggctcggactggatttcgcgttcgtggaatggatgcggccccacaaaaagaaactgaaggaccgcgaggcatacgtggatctgtacaacgacgagggggagctcgccgacctagtccgcaccctcacgatcggcgaataccaggagctgcaactgatccacgtcgcaaagaccctgacatgcagttcctccatcccgtcccgcgacccgcaagacgagccccacgtcattcccgatatacgcgaagcgctgcaaaaagaactgcgatcagccatatggcatctgatcaacaccgacggacgaagcgtcaagtcgctccacaatttcctaggaatcagcgagaccaccctgagagactgggcgggcagtcccgacgatccactcccgcagtatgaacaacagaaaggccacaccccttccggcgatccgggcgcgaaggcggcctagcccagcgatgaaagctccttctcgaggcgctccacgtcacggcgggcggcttagagacgttccccggcccgggcgagctcggcctccacacgcgcggtcgcgaccggtctgcacgagggagtcgaacaccgcctcggcgaccctcctgccaccgtcctcggtggcacgctggtacaactccaggctgatgcgggcgtcggcgtgcctgccgtaccgctgggcctccttcgggctcgcgcccgactgcgcggcggcggtgatcgcggtggccctcaacgtatggaaatgcaggtcgggacgtcccgccgccctgcgggcccggtcgaactggccgcgcaacgtggacgggggaaggatgccgcccgtgcgcgcgccggacaacagcatcgcgtccccgcccccgtcgcaatgggccttgatatgcgcctccaacatggcggccagaccctcggggatcggcatgtccccggcgctggccgcggtcttgggttccttgagcacccactcgcccgacagactgcgcatgaccgcgtgacgcacatgcagcacacgacgggccagatccacatcaccgaccctcagaccgcacacctcgccgatcctcaggccgcacaccgcgcccagatacaccgccaccgccgtatcgtcgggcatcgcgtcatagatcaaagccaattccccgcgagtggcggcgggaatcatggcctggcgactctccggaagacggggaacgggaaagacgcaaggactcgacgcgatcacgccatcctccaccaaacgcgacatcatggcgcgaagcaactgatagcaacgacgccgcgtataaggactggacacaccatcgtcaagccacgcgcccacgtccgaccggccgatctcactcaccggcatgccgccgaacgccttgaccagcaaggccatatccgaacgcttgagccgcatcgtggaatcccggagacgcccgccgtcaaccgtgcgatacgagtcaaggaaatcctccgcgtacacggcgaaatcctcgcgtgcgagcttcacgacacgctcgcgctcctccggcggcacccagtcggatagcccgcgctcgtaatccctgacgaacccctcctcgccatccagccaggcatacgccaacgcctccgcgccaagagggaacctcctgaccaccctcttgcccggctccttcggattgggataccgcgccaacagacacgtgggcacgccattgtggttcttcctcttcaccaccgaaccgaaccgtctgctcaaacctcttctcctgcgcatggggccagccttcccgcatcggccggcgataccccagatgataccccaaggcgcgcaaaccgacacaaacagagccaccgagacacaaacaccaaaccatcacaaaccaagcaaaacccgtaaaacgcaacaaaaacggggctcccgaaccaaatcggaaaccccgcaaacacagtccacaggactgttctttatttcacgccgccaaatcggcgatcgcggtggatgtaatggtcgatggagcgccatagcacgtcacggccgcagtccgggaagagttcgggcacgaagtcgagctcggcgtaggcggcctcccacggcaggaagttggaggtgcgctgttcgccggaagtacggatcaccaagtcgcaatcgggaacgtccggattgtacagatggtcggcaatcatcttttcagtcacacggtcgccggaaatcttgccatcacgcacttcgcgagcgatggcggcgcaggcgtcggcgatttcagcacggccaccatagttgatgcagaacaccacatcgatgaccttgttgttcttggtacgctcctcggcggcctcaagctcgtcgatcaccgacttccacagcttggggcgacggccggaccaacgcacgcgcacaccccactcgtccatctgttccacgcggcggtggatgatttcacgcgagaagcccatgaggaagcgcacttcctggggcgaacgcttccagttttcagtggagaacgtgtacaggctcaaataccgcacaccggcttcgatggcaccggcgatagtgtcgaacaccaccggttcggcggcctgatgaccattggtgcggaccatgccgcgctgcttggcccaacgaccattaccgtccataatcacaccgatatggcggggtaccttgttcttggggaagtcgggaatacgggcagggtcgctgaacggagctgcgggaatgtccaacgacgtgtaatcaacgttctcaaaagccatactcatgaatctatcaagcgcagcgaacgaatcgggcgttcgaggtaatactccccccaatcttcaaccaactcctgcacaacccgctccacaggcgcggcatcaagcaccgaccaatcgccacgaatcagtgcatcgaactggtttaacacgaacggcgcgatacggcgcgcatcggtagtgtggtcggcttcgcacatcacgccgccggacgcgatggacaggtacgccggctccgccttgccgcataccacgcaagtacccaatcgtggcgtccaaccggccaaggccaaggcgcgcatcacataggagtcgcctatggcttgcggggcgtgggattgtttggcgagcgcgttcaacgcgccgatgagcagccgatattggttcgtcagctgctcgtgttcggtgctggcgagtttatcgatggtctcgacgatgacgttggcggcctcatacgccgcataatccgccgcgatcggagcaccgtaagcggcgaccgcttcagcctgggagaccacgtcaagcgagcggccttcagcgataagcacatcgactcgcatgaacggctcgagcctggcaccaaagcgtgatttggtgcgacgcacgcctttggcgaccgcccgaatcttgccatgcccacgcgtcaggatggtgatgatacgatcggcttcgcccagtttggaggtgcgcaacaccacaccttcgtctcggtacagcgacatctcatctcctttccccgcgacgcccggcagactctactcaatgaagtagtcagtaaataaacaggccccagaaggcgaacaccaacagtatgtacagcatggtgaaggccaccagccagaacaggactcggcccagacgggtggaggcgagtaccgggtcggcaccggtgacgatgtctcgaacggattcacgacgagggggtatctgaatcagtccgcgggcggaagcgacctctatcagatgcataaagacgcgggaccaagcccatagcaccagcacggacaccacttggatgaccggccagctccaatacatgacgcccggcgtctcggtaggagcgctgccccatgcaagtttgaccacacccataatcacctgtccaagtccggcaaagaagatgagcagtgtggcaagagtggtgagggtcaaagtcagcagcgcgttgccgaaaccatgtgcgaaaccgagtatcacaggccgttccggtatcagcatgcccgcacgtttggcctcgcgtttctcgcgccgccatcgggcatccgccgcgattttgcggcccagcgccaccagtgccagcacgatggatgcgagcagcagcagtaccaccgtgacgtgcaggatcacaccatatatggtgccgacgcgtcttgccttcaaggcgcccggcagaccgattgattggtacagattggtgccggccaccttttcgctggtctgcgtgagtccggcggaagtgccgacggcccaatcgatgagatcgtccacataggcgtccgcaaacggggtgcccgcttcggactcatcccccaaacgcagcacatggttggcgaccggatagctgcgcacggtcacgttccagttatcggctttgtgggcgttgtagagaatcgcacgcacaccgtcgacctgcgccgtcatcacgtcttttgaaccgtaagccacataggtgggtacggcgtaagcggcgggtttgagcgtggcgaggtcggaattgttcagtccgaacaggccggtgtccgcgctgaacacgcgttggacgatggatcgatagccctcgttcgcgccgacaagagtgaagtcctgggtgacgaaaaatcccagtgattggcgtgggctgaacaccatcgggctcagaagaatctggaaggcgacgtccggatcgtcctcgagcagatatgaggagatccatgtcgattcggaggtggcatagatgccgaccttggcggcgtctacatcgctttgggctcgtaggtattcgatgacctgatcatatgccttggctgaggccggataatcgcggttgatgtcggtggtgctccagacgggtttgtcgagcactgcggtcacaaagccggccgaagccatatcggaggccacgtcgccaaaggagttgtcacaggtgccgtatccggcaccgtgcatgaacaccacgccggggcgcttgcctgatgcgttctgaggttcccgaatcaataccttgatggcttggacgccgtccgcattggccttgccccgatcaccaggctccttggtcagattgccgtcgctggtcatgttcagcgtgatgtatcgctcggtgacctcatacgtgcctttcgccggcagcgtttctccggacgggttatcgaaggtgacttcggtatcgtcggtgagcgtggccatcgactggccggtgggttcgatgttccaaggcaccgtggtcaggttggaaatggagaccagcacgccgatcaggataatgaagatgggcaggctgaccatcagccggtgggtgctggtccacggcttggatcgaacagtcaggcgatgctcttcttcttgcgacacgtgcgctattgtaatctgaccgcgatatttacgccgagggcctattcggccgaatcagtgaccgggatgctggattgggaccacgaccgggccggtggaattgacgggcacttggccgtcggcctccatttgggcggcgatatcgttcgctatggtgagcagcgtgtcgacgatctggtcttcgggcacggtcttgatgaccttgcccttgatgaagatctggcccttgccattgccggaggccacgccgaggtcggcttcgcgtgcctcgcccggaccgttgacgatgcagcccatgacggctacacggatcggcgcggtcacgtccttcaggccttcggtgacggcggatgcgagctggatcacatccacttgggcgcggccgcagctcgggcaggagatgatgtcgaacttgcgggggcgcaatcccatgtattccaggagtttgcaccccaccttgacctcttcgaccggcggcgcggaaagggacacgcgaatcgtgtcgccaatgccctcggccaagagcgcaccgaacgccaggcaggatttgatggtgccttgccaggcggggccggcctcggtaacgccgaggtgcaacggccaatcgcccttggatgcgagcagtcggtacgtttcgaccatggtgatgacgtcatggtgtttgacggagatcttgaaatcgtggaagccgacgtcctcgaacatgtgcgcttccttcaaggcggaggccaccagcgcttccggagtcgggccaccgtatttggcgtagagttccttgtccagcgagccggcgttcacgccgatacgcagcgagatgcccgcgtcggtggcggccttgcagatgtccgggccgacttcgtcgaacttacggatgttgccggggttcacgcgcacggccgcgcagccggcgtcgatggcttggaacacgtatttggactggaagtggatatcggcgatgaccggaatcggcgatttgcggcagatttccggcagtgcgtcggcatcgtcctgactcggcacggccacgcgcacgatgtcgcagccggcggcggtcagttcggcgatctgctgcaacgtggcaggtacgttggccgtgagcgtgttggtcatcgactgcacggagatgggcgctcccccgcccaccggcaccgggcccaccatgatgcggcgggacttgcggcgcggatgcaaaggcgattcgctggtcaggtcgaccggatcaccggttttgcggaacggcttttcgatgggattttccgtattcaaggtattcatcattgcttgtttatcaggttgtcggcgcgtcggcgggcttcaagctcaagctggttcatttcctccacgtccgtgaacagcgggttaccacgaagctcggcgtccatctggtccagcacggctttgaccgtgcccacgatgccgaggtacggcagccgatgatcaagaaacgcatgcacggcctgttcattggctgcattgagcaccgccgtatgcttctcggaggcggccaggcagtggcgggccagttgcacggcggggaacgcctcatcgtccaacggctcaaaggtccaagttgcggcttgcgtccagtcgcacgcggcggccacattggtcatgcggtccggcgcggacaggcccagcgcgataggcagacgcatgtctggcggcgaagcctggcaaatcgtggcaccgtccacaaattcaaccatggaatggacgatggactgcgggtgcacggtcacgtcgatgcgttcaggcgacacattgaacaagcgggacgcctcgatgacttcgaggcccttgttcatcagtgtggaggagttgatggtgacaaccggccccatgttccacgtcggatgatgcagcgcctgctcgggagtgatgttctccatgtcgacacgtttccagccgcggaatgggccgccggaggcggtgaccacaagcttggcgacttcggcgtgggttccggagcgcagggattgccagatggcggaatgctcggaatcgaccgggttgatctggttctcgcgcacttgcgcgctgaacagcagatgaccgcccgcgactacggactccttgttagccaatgccagctgggaaccggccttgagcgccgcgatcgatggttcgaggccgatcgagccggtgatgccgttcaatacgacattcgcaccggagccggccatggcgatgaccgaatccggaccgccggtcacgcggacaccttgtgcgccggcctgtgcgagagctgcttgcagcgctggaaccttggtctcatcaaacaccgcgacttcggacacatggaactgtgcggcctgttgcgccagcagctcgatatgtgctccgcccgccgccagaccggtgacggtaaatcgttcaggatgacgcgagatgacgtcaagtccttgggtgccgatggatccggtggatccgagaatgatgacagtggagttggaggctatgctcacttttccttcttcgtatcgtcattgttcagtgtggggaacgacaggtcggggatatccgaatcgaagttaccgccaagcgggaacagcagcgggaacgaatcgttggaatcgtgcttatcctgtgacggctgagctgcttccgtgtcgtgggaggcggcaacgtattcagatgattccacagccggacgggagaccgtgctgtctgcaggctgactatcggatacgcgaaccggaatagagttcgtgttacgatccggcttgctggtgggagcaaaggagaccggcatggcagcggacgcagcctcgtcagcagtgctattcacaggctgtactgccggggcggagggtgccggggatgaaaccgaacccggtacctcattcaatttcagcgcattcggtgcatcaaggctgggcatcttaggagcgaaggacggtgcatccactgccggaagttcctgagaaaccgcagccatgtgggcgagagcggccaaagaggaatcgttctgcaccatatccacgggctgttccgcgaacaccgacggggtcgatgacggagctgcgggttcgtgagctgcctgtgccggagcaaacgaggggacgctgccagcggtcacaccggaaaccggcgcggacggggcactgacgggaggctcagccgcagcaactgcggtaggagccacggaaggcgtctcggagacgggcttcgccgcagactcgttggacgcatgcaccgggtatgctgcgggagcaaaggaaaccggctgttccgcattggtgctattggtgcttgtggaagcatcgaacgatgcaggagccggcgcataggagatcggcgccgccgcggccggcgttgcgggagcaaccggagccggagccgtgaacaagctctgctcggcctgatgcagggcatcgaatgattcgtcatgagcaacggcagccggagcaaaacgttcgtcagttgccgggcgctgcgttccggaagcgaacaacggtgagacgccgttcgcttgaacggtcacgttcgtggcggtctgggcaggaaccgcaggctcgccggacacgaaatcggccacacgggcataggattccaagcgactcagcaactgcacgcaggcgttcaggaagtaatcgacctgtcgctcgtcataacctttcttgcccttgcgctgggtgaagatcacattgttgaccgtattcgcattgagatcggccaaagaccgtacatcgtcttcggtaacgccgtcaacgcccaatgcggccgccgccttgtccacaatctggtcgaccagacgatccacctgcttcttatcgtacgaaggctgcttgggcgctccggacttgaagcgttcgcgctcgttacgctccgcatggttctggacttcgtgatacagcttctcggtcttcgccttccacgtcacacgcccatgctgtgcgatctcccatgtggtctgcttatcgaccacggcacgttccagacgtccaagcgcggcgtcaacctgtgcgatcacatagccgttcttgcgcaaatcaaaggacacgttctgaatgtcatgctgggtgagattcatgccctcgctgtcatacaaagcatgggcgcgctccaggaaagcgtccacctgagcggggtcatacccccacttgcgcttgcccgcacgtgcgatgcccgacttgccgtccccttcacgaagttcctgcgccatcggctattcgacctcctgctggatataaacactctgccacaactttacgtgactattgagacgcatctgaccaagaagaccgaaattcacgattttgtagcagtactgccggtttccttctgcacgcatctcattgagatttcagaacccttgccgaagaccgtcagggaatatcgtcacagcccatgtctgtggaatgaggggattgcatgaagcgatgaaaaatgaaagtgggcaatgagggactcgaacccccgacatccaccgtgtaaaggtggcgctctaaccaactgagctaattgcccgcaaatgacaacaatagcgtatggccagcactgcgcgacacgtggtgtcgcatacgcgtgccgtagcgctcaatcgcgatgacattcagtcacgcccagcagcactacgcagcacacaacgccagtcaacacgcttaaagtcaagcgtattgattgaggcttatcagcgacccttgccgaatgcgcgcaggcggatgccgttccagtccgagctgacggtcagcggggtggcggcgttcataccggcggtctgtgcggcggactgcacggtggatgagctggtggcacccgggcggccgggcttgggagtcagtatccacagcgggccgtcattgcccagtaccgcgtaggcgtcaacgatcgtatcggacaattcgtcctcatcatcgccgtcgcgccaccatacgatgacgccgtccacagcggagtcgtagtcctcgtccacgagatcctcgcccgtgagctcttcaatctgggcacgaatggaatcgtccacatcgtcgtcccagagccactcctggacgatatcgccgggctcgaaaccaaattcttcagcgttctgtgatgccgtttgattcacaggggacacattagcaagtcttcgcgaacaaatgcgttaacgcggccgaaaatcgccgcattgtgggcagacccatgcgagtcgtctcaccagaaacaacgactggccgcgcgtgtcatgcctcgcaatgaggcaaatcgtcggcctgccccttgccgatggccaccaacgcctgatacgcctcgtccagcgtggcgaccttgacgtcgcgcagaccatccggcacgcggccggccaaatccgaacaattcgatgcgggagccaggaaccatgtggcgccatcgcgcttggcgccaagcatcttcagctctatgccgccgattctgccgactttgccgtccttgtctatggtgccggtgccggcgatggtcttgccgccgctctcgttggcgggggtgagtttgtcgatgagaccgagcgtgtacatcatgcctgcggacggtccgccgatgctgtccacgtgcatcgtcaccttgacgtgttgcaatgtactggcgtcaatgcccagttcgtccgcatgggctttggcatgcgccagaccgacggcactggccgaatcctgggaaccggccatgtcctgttcgactttcttctgatactggtccgcactctggcccaccggtaccgtggcctcacgcggcatgacctccacctgcggattggcccaaccccagacggcctgcgcgttgatgatcgggtacccgggcacgccggacgcgttcaccgtggtcagcagcagcttgccggaatccttatacgtcgtcacgccggtaccggtgatgtcgataaccgcaccatcctcgaccttgcccagcacgtcttgggtgggtccgggcatctcgatgacgtacgggctgggcagcagcagaatcaccacaccaagcaacacggcgaatgcaccgacgaaatggcgtttcggacgagcggccgcataggcccgagcacggctgattccacgagataggcgcgaatcatgcttcacttcgaacgatggcatgcgcccatcccccgcttccgaatccgcagtcgggctcttctgctcctggacgaagcctggttcctgattcctgtggcgtgcaaacataccctacagtgtaagcggagggccgaaatcagccgaaaacgaacataaaccgaaaatattgctcggccacgagcgaacaggcccgggcagaccctacacttggggtaacacaccgcggcaaagaaggatacgcatggacgacaacgcgattcacgagtggctgatcaaatgcttcggccccattcagggcgagatggcctggcagcagatcagccagttgcctgaggagatccgtgaacagctgatgagtcaggaccccagccgactgcccaatccatccgaagtccagcagatgatggccgcgttcagcgccggcggactcaacacgatgggcgatatgcagcgcactgtcgaggaagggccgatcaacgtcaagctcgccaagtcgattgccttgcagcaggccaacgcctccggttccgcgtccagcgtgtccgccgtggatggcgaggcggctcgccgcgcgatgagtgaggcgaacctgtggctggataccgcctgcgagttcaatcccgcgcccggcgatccggatgtgctgacccgcgccggctgggtggaaggcaccatcgaccagtgggcgaagttcgcagctcctgtggccgagtcgatgaacgacgctttggcttcggtgatttcggagcgtcttggcggcgcgttcggcgatggcgagattgccggcatgttcgccggaccggtgccgattccgattcccgacggcatgaaagatccagcccagctgatgaagctgctgggcaacacgtcctttgccatgcagttggggcatgcggccggcaatctgagccatgaagtgcatggcagtttcgatcagggcatcgcattgctgaagaatccggctggtggactgattgcccagaacgccaccgaatacgcgaagatgctgaacggtgagactcctgcgcccgaggccgatacggccggcacttcaaccgactcggtcaatccgttctccacatccaccgacgcttccgccaatcccattggcttcacttcggccggcaacagcgatactccggcaactgacggtaccgcccaagtctccggctccgatgcttccgccgacgccgccgcgttcgaggctgcgctctccggattcgagaccaccgagaaaattcccgaatctgaagtgctttccttcctggccctgcaggaaatggctcacgcccgcctgtatgcctcggtaccgtggctgatgccgcgtttcgaggcgctcatcggcaagtacgcacgcggcatctccatcgatctggatgcgatggaggaacagctgcgtgacgccacgtcgatggatccggagtcgatttccggcgcggtgaatctcaccaaggtcggcatccccgacactcccgaacagcgcgaggcgctggcttcgctggaatcgctgctggcgatggtcgagggctgggtggattgcgtggtgtggcgcgccggtatggcccatctgcctcatatcgaacagttgcgtgagatgatgcgccgcgagcgcgcgatgggtggccccgccgagcgtacgttcgaaagtctgctcggtttgcagctgcgccccaagcgcatgcgcgaggccgccggattgtgggagatgatcaccgccgccgaaggccctgaaggccgtgacgccaagtggtcgcatcccgatctgctgccttcgctgcctagcgacaagcccgcagatggcgcgtctccgtcatccgacgccccttcaggctcctcttccgatgccaacggttccgcctcccaccctgccgcagatggcaagaccggcgatatcgattgggatgccgaactgtccaagcttctcggcgaagacggagaagatggcggcaacggcaactcggaggatacgcaggcatagtcaaccgtccttcagccaattcccgttcctgaacgttcaggaacattcacattcattaccgacgcccgtcacaaaaatcgtgatgggcgtctgtgttgcgctccataaccatccttggtccgcgcatacgacaaatgcagcgaatcctcagctcgggtgatgcccacatacataagccggcgttcctcttccagcgcatcccccgtttccggcgaaccgtacggcaagagtccttccgaacagccgatcagaaacacgtgcttgaattccagacccttggatgcgtgaatcgtggaaatcgtaacgccgggatcgtcgtttgcggcaagtccggtggcgtccaaacccatcgcctccaatagcgcacgtttggacgcggcatcgtcggcgagcgcggatgattgccatcccgaatccttacggacgcggtatttcagtcttgcagcgcgcaaagcggcaccgaataccggctgttgggcgttgatgcgggtgagaatcgcgcaatcggacggcttggctccgttggcgaccaaccgggcgatgcgtgccgccacgccctgcgcctcttccatatcgctctcataagcggttcgggtaacgcgcgggccggattcgcgggcggaaaccagtttcaggtaatcctcacggttcggcgcggccgcaagcacccggttggcgagattcacgacttccggcgtcgaacgatagtcggtgttgagattgacatcggcggcgagcggcccgaattcatcggcgaaacgcagcagatcccagctggaagcaccggcaaacgagtagatggtctgggccggatcgcccacgacgcatacgttgcggttcatcgcgctcttgccgtcaggccctcccccgcccagccacagggtcagcagcctgtgttgcaggggcgagacgtcttgatactcgtcgacggtgagccagccgatggtggaacgaatttgggcggcggcttcgggaaaatcatccatgatatggcatacgagcagcagaatatcgtcaaaatcgatttcgccacgcgaggtcttttcctgctcgtaggcgctgtagacgtcggcgaaccgagcggtgtcaagtccggcgggcggctgccgatgggcgatggcacaggcccgggcataatcttccaccgccaccaacgagattttggcccaattgatttcggcgagcacatcgcgaacggtcagcggatcggcatcggtacgtgcggtggcgcggatgatcgcgcgggagacgacgtcacgctgatcttcgatcacatgcgggaatggagcctcgcatatgtccgcccagacgctgttgagctgatgcaatgccgctgagtggaaggtcgcggccgtgactccggcagttcccgcacccgaaccggaacgtccggcaccttcccctacgccgagctggcccaaccgtgcgcgcatttccgccgccgcttttaccgaaaaggtgacggcaagcacccgctccggcttccatgccccggtggcgcaggcataggcgatccgccgcgtgaccgtgcgtgttttaccggcacctgcgccggcgatgatgcgcaccggcccttgcaacgtagtcgcggcggtacgctgccgctcatcgagcccctcaagaatcccctgcgcctgttccatgcgtccattgtggcacgattcgcgctcacggcacgactcacgcctatggctgaatcgggctcacgacaaaacatcgccagaatcatgcgttttgcgtgtcattctgcggtgcgaatcgccacggatgtattagtgtggaagggtgatgaaacgtagcgattatatgttggcggcactcgcctcagccgtcctgccgaatctgggggtggccggtgtacgcgagaacgtgcaggccagcgcaaccgacgaggccaaaggcatcgatcagaccgtgatccaagatgcctcgggcaagttgtacgacgtatacgccactgacagcaaggaagggcgtacacgtctgatccgccgtgtgaaagcggcgcagacactggcagccgcgcgcgagcttggtggcctcggcttcgatatggaccgtgtggtcgcattcgtcccgggagacgtttcccaacccggccagacgaccaccgcacaggccgtggggcagcaggcccaggcggagtccacaccgctgaccccgcgcaagcccggtcccacaggcgagacgaccgtgatgatcgccgtccaccgtgatggtcaggcacgtcctctcgacctgttgacattggatgactgcgcggccgtcggcacctccatcggagccattcatcgtctgccttcgacttttctggccaatgccaaatatccggtagtcaccaccggtcagattcgttcgcagctgaccgcctggattcgccgcttacgctccgccggccatgttccccaagaaatcaccgacagctgggcgcgcatcatggacaccgagggattgtggtcgttctccacctgcacggttcacggcggattctccgacggcgacttcctgttctccggttccaccatcaccacggtgaccaactggcaggatatgcaggtcaacgatccggcacgagaccttgcctggattttcggcaagctcgacgaatcccatcgcaacgccgtgctctccgcatacggccgcatgatgggctctcgacttgacgatctcatcatgctcagggccaacctgtggctgcagatggaacaggtgggcgaattcattcaggcgttgaaccgtgcggacaacaatcgcatcatgcagttcaaggcacaggtcgaacgactcgcacaccagttgggcgtgatcaagcacactccggcatcggccccagccgcagggtcggccgccgcctcgtcgacggagcccggttccccctccacaatcaccgtcggcacattgttgcaggacgaccgtcatcaggcacccgccacgcaggtacccgcacaaccgcagcagtccgaaaccggtaccgcggcggccgaggtctcggacgacacgcccgatccagatcgcaccggttccgctgacatcgtggccgctggcgacgtggatcttaccccggaagtcgaacccgatgctgaccggaccgccaatcacccgcaagcgagtgtctccggcaccgcaaccggtacgggatcgaccaaaccgcagccctcacatggcgcttcccattcttcggtgacgatcacgctgaaggagctcctcagtatgaacgggcatagcggcacgacgtcaaccgacgcttcccctgcatctcaatccgccgccccgaccgacgatgcggtgaatgacgatactccggacagtttcgttcagcacggagcctcgagtgcccaaaccacggtgattccgctgttggagcgggaagaacgcgctctgcgcgatgcccgtgccgggttggacgggtatgacagcgagggcaatccgctggccgaatcatccacatcatccaaataatgtcgtgtgcggtgttccgcgccacgccgagcgcgtaacaccgcacatgacgacgcagacacgcggcacaatagagtacagaacctcggccggtgacggccacttaccatgatgttcgtcacaaagacggcagaacaaggagccttatatggatatcgaactgggcattcagaacgtggcacgaccggtgaacttcagcaccgacgaatcagccgataatgtgagccaggccatcgcgcaggccgtggccgacaacgcgacgatcgatatgaccgatgacaagggccgtcgcatcatcgtgcccgccaaggcactcggttacgcgatcatcggctccgaaaccaagcacgccgtcggtttcggcacgctgtgaccgtgaatcgcgcataagcggccttgggcatcatctcaaggccgctttgtattgccgcgaatcaccgatataacgggagcacgccgcgatgaacgatctcttcgacagtggcctcgtcggtgaggttctcccccagtttgttcggtttgcctttgccatgccagtcagatccgccggtgaccagcagctggtgccggcggcagatggtgagcagccgttctcgttgctccggtgaattgcctcggtgccatacctccagcccgtccaatccctcgctgatcaacgcttcgatctggtcatcggacagcagtctgcggttacggctcacatcaccggcatgggcgatcagaatcacaccgcctgcccctttgacggcggccaccacttcatgagaggtcggcgagggcgtgggaatatagtatttggatgaggcgctgaccgcattcgcaaacgcttccgaacgagtccgatatacgccggcactcaccaaagcatcagcgatgtgaggccgcccaatggtggttttgtcaccctccttgacttgggcgagcacggattgccaggtaatcggataatcacgagacaacaattcgaccatgcgctgcgtgcgttgcaaccgtgcggctcgagtatcggcgaacaagtccgtgatgtgctgattcgtgggatcatactggtagccgagcatgtgtacggagacgttctcatccgtggcggtgatttcggtgccgcggagcaacggcaaaccgaccctatgggatgcggcttcggcctccggccagccggcggtggtgtcatgatcggaaatggccacgcccttgagtcccaatgccttggattgttcggccaatgtggccggcgtttccgtgccatccgagaagacggtatggcaatgaatgtcccacccgacggcgggcggctccaaaggcatcacatatccagtcataccttccatcgtaacctcatctcagcattcccacgcaaggcgcagacaggtcgtcaccttctgccaacggccaagaccagacattcggcactcagctgacaaccgcaaaggctaatctggagcgcagcgctatcgaaagggacatgatgactcgtaacaccgcaaccgacacatcatccagtaccacgaacaccacgccgcttggcttggcggaggcgcgaccgttgattggatggcgccacagtgccacttggacatatctcatcatgctgatcgcctcggcagtggcattgggggcctcgctcattctgtccgccgagactttgcagttggctaggcatccggagtccgcgctcggctgcgatctgaactcggtggtgtcctgttcggcggtggcccagtcctggcaggcggaaatcgtgaagttcggcgggctgagctatccgaacgcgttcttcggcatcgccgccgaatcggtgttcattaccatcgcggtgatcggtttggcgcgtgtgaaggtgccgcgttggttcgcgacctgcacgtggctgggcggactggccgctttggcctactcgtactggctgagcacacagtcgctgttcgtgattcacgcgctgtgcccgtggtgcctgaccctgatgttcttcaccaccatccagttcatggcgttgagccatgcgaccgtggcagtgcagggattgccgtcacgtaaggctgtggcggctgatgatggcgacagcgaggccgatgtcgcggcggtgccggccggactcaataagtattaccgcctcaacatcgacctcatggtcgacatactgtggatcgtggcgatcgtggtactcatcatcgtcaccgaaggcgcggccctgttcgctgcctgattcctttacaacaaatcgatatcggcgaccagcgtggctgctccggtcagtttcacgtcgctgtcggtgacgtccacgcgcagggtaccgccacgtacggtgatgtcccagtggctgatgccggtcttggcccgcagcacaacgcctgtggcgcataggccggtgccgcaggacagggtttcgccgcagccacgttcgttgacgcgcatcgtggcttcacccacgccggtgttctgatcgatgtcgtcgacccgcacgaattccacattctggtcggattcgatggtcgggctcaccacgggcttgatgaccagatccagcgcctcgaccaccggcagggacgcgaaggcgtcctcgattaccgcgaccacatgcgggttgcccatatccacgaacgtgccgcgcgccgagccctcagcgccggggatggtgacctcgtaggcgtcggtttcgccgatcttccactcccccatttcgacctggaacacgttggttccgtacggcctcatattgccgcgtggcgtcagaatcttgacgccggcacgggtgccgaggcggaacggctcggtggagtcggccacgccctcgcgctgagcgaacaaggtgatggcgcgtgtaccgttgccgcacatctccgccaacgatccatccgcattgcgatagtccatgaaccatttcgcacccccggccagtacgtccgaaagctgatcatcgcttaaatcagacacgaaatcaggccgtgtcaggcgaatcaggccgtcaccgccaatgccgaagtgacggtcgcacaggaatcggacctcatcggcggtgggctcgaatttgccggacttgtcgaggtacaccacgaaatcattgccggttgcgtgtgtcttggttactcgttgcggaagactcatggctttcagagtactctagggagcgaaacaacaccgcaaaacaatcggctttgtgatcggtcgcggcaacatacggttgcaggcatggctatagggaggattcaggcatgagctcttcggctccaatcggcgtattcgattcgggtcttggcggtatttccgtggctcgccaaatcgccaaggatatgccggccgagcatgtgctgtattttggcgattcggccaacgccccgtacggcgtcaagacgcctgagcaggtgagggccctgagtttcgatattgtcgaacggttcgtgcgtcaaggtgtcaaggccgtggtcatcgcatgcaacaccgccacttccgccgcggtgaacgatttgcgcgaacactacgatattccgatcatcggcatggagccggccctgaaagtggcgtgcgaccgtggtgacgtgccttccgacccgcatcatattccccagagggtgattgtggcggccactcccctgaccttgcgtgagcggaagttcgccaaactgatggatcgattcgattccaacaacacgattttcaaggagccttgccccgacttggtggagattgtggaatccgggcggctcggcgaccatgacctggtgatgcgcacgctgcatggctacttcgaccagtacgacatggagcacatcgattcagtggtgctgggctgcacgcatttcgtgttctaccgcgactacttccgcgagctgctgcccgaacgggctgctgtcatcgacggcaatgagggcaccgtgcgccatctgggcgtggtgctggagtccctgggcaaactggcacccgaagacgcgaccggcggcgtggaactcgccaattccgatctgtccgaacgtgttacacggctttcacgcgacctgctgaatgcgtgatcggatgcatgatgatgaataggaggctgatatggcactgaagacggcaatgattgatgtgggcggcgggttccgcgcgattttcggatgcggcgttatggaccgcatgctggaggacggcatcgacgtggacatgtgctacggcgtttccgccggcgcggccaatatgacctcgttcatcgcccgccagcacggccgcaaccacaccttctacaccagatacgcgttccgcaaggagtatgcgagcgcggagagctatttcaagaaccgcaacttcgccaacctcgactatatctatggcacgctgagcaaccatgacggtgagaatccgttggatttcgaggcctttgaggccaatccgaccggattcaccgtggtggcctgcaatgccgaggacggctcgaccaagtatttcgacaagtcacgcgtacgcttcgatgatttcgacatcatcaaggcttcgtccgccgtgccggtggcctgcgagccgtatgtggtggatggtgtgccgtatttcgatggcggcatcgccgatccgatcccggtacagaaggcgctggatgacggctatgatcgc

SEQ ID NO: 2593 - DNA, 42553 bp, Unknown
  R222_15m  MAG No. k141_9619
ggtcgtgagtccaattctcactcggggctctctggcggggtagctcagctggctagagcgtacgactcataatcgtaaggtcaagagttcgagcctcttcctcgctacaaatcgcgcccgctaaccggtgggcgcgcactatacctaagaacacagaggtgaatgataatggctaagagcgccgacatccgtccgggcatcacgctggcctgcaccgagtgcaaggagcgtaactacattacgactaagaaccgtcgtaatacgcccgaccgtcttgagctcaagaagttctgcccgcgctgcggcaagcagaccgtgcaccgcgagactcgttgatcgcaagcatcacagctttacagaacccggcccattcggccgggtttttgcgtattgactccagagccgagtggtagggtgcggaatcagtatccgcatcgcgtgagaaacggcagaaatcccgcgtctgaacgaacccctcgcgggcgttctgccgtttcagccgatgattgccccgatatcgcacctgcgccactaagataggaagtcatgacaagctttgcagacatcaccaccatgggcgtgggcggccccatcgcccatttcatcgagccgaccacgcgcgtggggctcatcgaagccgtggaggatgccgattccaaaggcctgcccttggtcgttatcggtggcggctccaacctgcttgtttccgataagccttttgacggcgtggtggttcgagacgcccgacgcctcatcactgtgccggacgaggctgcaccggtagagggcgaggatcgcaccgtgcatgtcaatgccgaggccggtgccaattgggatgatttcgtggccttcaccgtagagctcgggctcgagggcgtcgagggactgtccggcattcccggcacagtcggcgcctccgtggtgcagaacatcggtgcctacggacaggaagtcgccacttcggtcgaatcggtggaagtctgggatcgagacaccaaaacaacgcgcgacctcacacccgccgatcttcgattcggctatcgatactccgcactgaaggccagcatgtacgccggtcccggccagccggccgaccgattcttcccgacgccacgttacgtggtgctctccgtcacctttgccctgacccactcggccgaaggcacggtaggttacggacagcttgccaaagcgcttggcgtcgaagtgggcgaccgtatggccaccgccgacatccgcaaagccgtgctcgcagtacgtgccgccaagggcatgcttgaggatcccactcgctacgccttgcccgacatggccaccgccaagcgcgaggccaatatcctgaccgatctggagcgtctggcctccctcaatgaggccgccggcgttcccgttggcgatgacggcctgcctgctcccgactacaatcgccacagctgcggctcgttctttatgaatccgattctgaccgccggccaagcggcggccctgcccgaagatgcgccgaagttcgacgcgactctgcctgacggcactcccggcaccaagacgtccgccgcctggctcatcgaccatgccggctgccataagggatataaggtcgatgcgtacgcgccggccagtctatccacgcagcacacgctggccttgaccaatcgtgggggagcgagcgcagccgatatcgcagctttggcgcgcgcggttcagcaggcggtcaagagcgcgttcggagtggacttggtgcccgaaccggtctgcgtcggcgtgctgtaatcgcgctattgatcgatggagtggggtattaatcccatatattgcgggctctaagtcttattaatagacaagacacgcgggctcttctatactcgattgtcggtattgtgcgcattcggtgcgcaaacaacagagaaaaagaagagcactatgcaactgttccgtacgaaatccgtcgaacagaccattgccgaaacgggtgaagagggccgcaagctcaagcgcaacctgacttggtgggatctgtcaatcatgggcgtggccgtagccgtgggcgccggcatcttctcggtgggcgcgcaggccgccgccttccacgccggcccggccgtgatcatcagcttcctgatcgccggcatcgtgtgcggcgcagccgtgatgtgctacgccgaattcgcttcgatgattccggtggccggctccgcctacaccttcacctacaccacggtcggcgagatcatggcctggatcatcggctgggatctgattctggaaatgctgatggccggctccgtgatttccaaatattggggcgtatacctcaacgatttcatgcgcctgatgggctggaacgccaacaccaacctggcgttcggctccttccatatcgatatcgccccgatcatcatcgtggcgttctttaccacgctgctcgtattcggcaccaagatcggcgcccgcgtggacggtgctatgaccgtgctcaagatcgccatcgtgttctttgtggtgatcgtcggcttcttctacgtcaaggcctccaacttcaccccgttcattccaccgagccagccggcctccaccgtggaaggttcctccgccgtcaccggcgtgatgacccagccgctgtggcagttcgccaccggcatgaccccatccgtgtacggcgttcccggcatcctttcgggcgcggcgctcgtgttcttcgcgttcatcggcttcgacgtggtggccaccgcctccgaggagaccaagaacccgcacaagaacgtgccgctcggcatcggcgtgggcatgctgctcatcatcgtcatgtacatgctcgtggccgtggtgaccaccggcatggtctcctatgccgatctcgccaagcaagacagcccctcgctggccaccgccttcgaactggtgggtgccgactgggccgccaagatcatcagcttcggcatcgtgctgggcctggccaccgtggtcatggtgctgttgctcggcctgacccgtatcgtcttcgccatgagccgcgatggtctgctgccgcgcggcctgtccaagaccggcaagcatggcaccccggccgctctgcagatcgtcgtcggcgcggtggtggcgctcgtggccgccttcttcgacatcggcgtgctctccgacatggtcaacatcggcaccctgtccgccttcacgctggtggccatctccatcccgattatgcgcaagaagcgccccgacctgccgcgcgccttcaagatgcccggcgacccgtggattccgatcctcatcgccgtggccaacttctggttgatgctcaacctgtccgtgctcacctggattcgtttcgtggtgtggctcgtggtcggcgtcgccatctacttcggctacggctactggcatgcgcgcctcggcaagggcgacctgaccgaaacgctgtccgccgaaaccgataaggccgttaacggctgagagcgaggagcgtcccaacgggcgcgtacccttgtatcagtatctgttaaggaggattccatgccatatgtgatcgctcagccttgcgtggatgtcaaggacaaggcttgcgtggacgagtgccccgtcgactgcatttacgagggttcccgctcgctgtacatcaaccccaacgagtgcgtcgattgcggtgcatgcgaaccggtgtgccccaccgaggccatcttctatgaggatgatctgccggacgagtgggcttggtacaaggatgccgctgtcaacttcttcgctgaagtcggcgatttgggcggcgcttccgccaatggcccaatcggcaaagacccggaacaggtcgccgcgctgccgccgcagaaccagtaagctgatttgcggataagcgctgcacacagcgcatagttcggattgaaccctcggtctatcacggccgagggttcgtcgtatcttaggaacataccgtccaagaaaggggttctcatgggcttccacgcatattcgtcgccatacgactggtctcgtatcgccggcttcaaagccaccgccaaaaccgtgccgggtggcatgatcgacctgtccgtaggctcgcccgtggacccggtgccgagcagtgtccagcaggcgctggttgccggcgcagacgcccccaacgcccatggatacccggtcaccgccggcagcgccgaccttaaggccgctatcgatacatggttccgcgaactgcgcggtgtggatctgaagtccatcaacgctgccgccgtacccaccgtgggttccaaggaggccgtggcgctgatggccagcctgctgcaccttggcgaaggcgatgtggtcgtccaaccggctgtctcctacccgacttacgaaatcggtacccaacttgccggcgccaccgtggtcaaagtcgatgatgtgaccgacgtcgattcctgggtgaatattccgaacgtcaaggccatctggatcaactcgccgtgtaatccctccggcgaggtcatctccgctgactggctgaccgacatcgtggctgctgcccgtcgcatcggtgccgtggtgctctccgacgaatgctatgcgttgatggactggcgttcggtgcgccgcaatacagccgcgtcctctgcgcctgccgcgtctgcatctgctgcgtctgtgcctgccgcaccggtggccgaatccaacgagcccgcctccgataccgcattcagtctctccgccacgccatgtgccctgaattcacatgtgtgtgaaggttcggcagctggcatcctggtgctctactcgctgtccaagcagtccaacatggccggctaccgtacggctctgattgccggcgattaccggctggtcaaggaaatggccgaataccgcaagcagatcggccagattatccccggcccggtgcaggccgccatggccgcaggcctgaaggacacagccgctgtgcacgagcaatgggggcgttaccgtcgccgcctatccgcgctggttgacgcactgaaggcatatggttattcggcacaaatgccctccggcgcgctgtacgtatgggtcaaggccaagtccggcgactgctgggccgatatggccgagctcgccaagatcggcatcatccccagccccggcgaattctacggcgctcccgcctacctgcgtttctccgccaccgccaccgacgaggccatccgttccgcctgcgaacgtctgcaatcggcccgcgcctgacgacaccgactaccgccggggcgccgccgtggtattgcggatggccaggaacgtgcgcgcggtctcgaacggctcgcccaggtcaatgccgaacgtcgcggaatcaatcagcgacagcgccttttccgctgccttgcgccccagggcctgcggatcctgatgaatggtggtcagcccgaactcggccgcatagtcgctgtcgtcgaatccgatcagggacatgtcgttcggcacgccgatcccggctttgggcagcttgtacagcaggggcagcgccgtcccgtcgctcaggcagcatagggccgtgggcggctggtccatgacggtgatgcgcgcgatcgcctcgtccacggtgaagtcgttgcggggcagggctatggtcaactgttcgatatcctcatacgccgcacaggccgattcgaatctctgcaggcgcgagtccgcactgtattccatcggcgcctccgagacgtcggtgcagatgtaggcgatacgccggtgccccagggcatgcaggtgattgatggccatgcgcatgctcttggcgttgtctatggacacggtggcgttgaacccctcgttgtgcggcacgttgacgccgatcagcggcacgcccatgccctgcaggttggagatctcctccatggttacgttgaacgaggccacgatcaccgcgtcgacattgcggcgcaggggcagctcgtcgaagaacgacatgcgctgttcggtgtccgcaatgccgtagagggacacgtcgtagccatgggtctgcagcacctcggtcagccccttgtacagattggagtcgaaccaggtggcgatcgcctcgccggtgagcatagcgatacggaacgtgtgtttcgatttcagcgcggtggcggaccgggagatggcgaagtcgagttcgttggccgcttcgatcactttcttgcgcgtggcctcggtgacgatatccggtttggcgaatgttcgtgacaccgtggccacggacaccccggccctgacggctacgtcgtagatcgtggaatgtatcacgcgcgaaccttcctcatgggtgctcgataatggccacaatcataccatgacggaatgtaaccgtttacagaaatcctgtaattatgccgtttgatatcaataaatatgggtgttaacgtatacatcacgacagtcgcggagtagcgaagtcgtgaagtgtaaatgaaaggagaagcagcagatgaagtccgcatcgtcttggaccgagcgctggtcgtcctccgggcatgatcgacgcccgaaccgtatggcggcaaagacccgcagcatatcccgcgccatcgccgccgtctgtgccggcgccgcatgcgtggccgcactcgccggttgtggcacatccaccgccggaaacgtcactctcgaattcttccagtacaaggtagaggcagtcagccagttcaagaagctggtcaagggattcgaggcggaacaccccaacatcaccatcgacatcatcaacaccgccgatgccgccaccgatctgcgcacgcgcttcgtcaagaacaaggtgccggatgtcctcaccgtggacggcggccgttacttcggcgaattcgccgcctcgggaatcttccaggacttcaccgacgacgagatcctcgacaacatcaacccgcagatggtcaagctgctcaaggatctggccaaactgtacgacaccagcgccgaccgcgcgtacggcatcccgttcgccggcaacgccaacggctacgtcgtcaacgtggacctgtggcgtcaggctgggctggacccggacaacctgcccgaaacttggtccgagttcatcgccgcgatgaagcagatccagcaggccggcatcacgccgatcgaaggcagcctcgccgaaccgtggaccactcaggcgccgttcgcctccctggccggcacacttgtgccgatcagcgaatactcgaagctcagcggcggcaccgccacattcgccgacctgtggggtcccgtggcggaaaaggaagtcgagttctaccagtacacgcaggacaatccgggcgttacttaccagcaggccacccaggacttcgccaacggcaaggcggccatcttgcccctgggcacctacgtcgtgccgcaggtgcgcatggtcaacccggacatcaacgtgaagttcgcccagctgcccgccaccgacgatccggacgagcaggtgctcaccgccggcgacgacaccgtgctcaccatttcggccaccaccaagcatcccaaggaatcgcgcatgttcgtggaattcttgatggacgaggaccggctcaaggaatacgccgaatcgcagttctgcttcaccccgttcaaggacacctacgccggcgacgaggctctgcagaacatcctccacttctacaaggagggacgcatcgctgatttcgccgaccactacatcccctcgtccatgaccatggccggcagcctgcaaagcctgctgaccaccggcaacgttgaggcgttcaccaattcaatgcagacgcagtgggatcagatccaagccaggaccgtacagtaaggaggttcaccatgtccgccattgccgaaaaaccacgcaagaagcgtgtctccgctttctcccatcgcaaggtcgatcccgcatactactggatgaccgttccggccatgatcctgttcatggtgttcctgtactggccgttcctgcgcggcgtgatgtactccttcaccaattccaagggctacggcaaatacaaatggatcggcctgaccaactacaaggccatgttccaggatgagcgcattgggcgcgcctacctgttcacgttcttcatcgccatcgtggtgacgattctggtgaacctgctgtccatgttcatcgccgtgctgctcaactccaagatcgcgttccgcaacgggttccgcgccatctacttcatcccctacaccctggccgtgcttgtggtcggctacgtgttcaagtacatcttcatgatgccgatccccgaactcggcaaggcgttgggcatagggtggctgtccgaatcgatgatcacctccgaatcgctggcatgggcgccgatcgtggtgctctccgtatggcagggcgtggcctacaccacactgatctacctcgccggcctgcagaccatcgacaccgacatctacgaggccgccgcccttgacggcgtcaacgcctggcagaagttctggcagatcaccttcccgctgatcggaccgttcttcaccatcaacctcgtcctgacgatgaagggcgccttaggcaccttcgaccaggtggtcgccctgaccggtggcggtccgaactccgctacggaaacggtcacctacctcatctaccagggcggcctgaccggtggcgaatacgcctaccagaccgccaatgcggtgatgttcttcatcgtcctcgcgatcatcgcgttcattcagctcaagttcttcggtagcaaggagaaggtgtgatcatgaccagcgctgttgctgcacaacccaagaaaaacaagttccgcaaggaccataagatcaactggtggctgaccgcggtggtcgcggtgctgagcctgaccattctggtgccgctctacttcaccatcgtcaccgcactgaaaaccccggccgaagccggcacgttcgccctgcccaccagctggcagtggggcaacttcgccgaggcctcgaacatggtgaactatccgcgcgcggccctgaactcggcgatcatcactgtgggcgccatcgtgctcaccctgctgaccaacacgttcgtggcctatgcggtggcccgtaacatggacaagcggttcttccgcttcctgtactacttcttcatcgcagccatgttcgtgccgttctccgtgatcatgctgccgctggccaagcagatgggcgggtggaacctcgacaacaagttcggcctgatcatcctgtatatgatcttcggcctgggcaccaacctgttcatcgccatcggcttcatccgttcgattccggtgtcgctggaagaggcggcccgcattgacggcgcgtccacctggcgcatcttctggaccatcatcttcccgctgatgggcccgatcaacgccaccatcgcgatcctgaccgcgctgtgggcgtggaacgacttcctcctgccgttgatcctgctgtccaattccgcggatcagacgatcccgctggcgcagttcgtgttcagctcgcagttcaccgccaactatccggtggcgtttgccagctacctgatggccatggccccgatcctcatcgtctacatcttcgcccagaagtgggtgatcagcggcgtgatgcgaggcgcgaacaagtaagccgtctcatcccgtcatcagtctgtggaatcctggagggttcttgccgccctccgggattcccgtcacattcgttagaaaggttgcaatcatgactactgcgcagcgtgtcgtgcttcccgattccgttcgaaccaatggcaccacgccgaatccgtggtggtcgaatgctgtggtctatcaggtctatccgcgttcgttccaggattcgaacggggacggtatcggcgatctgaagggtatcacctcgcgtttggattatctggccgatcttggcgtggacgtgctatggctgtcgccggtgtacaggtcgccgcaggacgacaatggctacgatatttccgactatcaggacattgaccccctgttcggcacgctcgaggatatggacgagctgctggccgaggcacacaagcgggggctcaagatcgtgatggatctggtggtcaaccatacttcggacgagcatgcgtggttcgaggcgtccaaagacaagtccgatcctcatgcggattggtactggtggcgtccggcccgcccgggaaccaccccgggtgagccgggggccgagccgaaccggtggggttcctatttcggcggttcggcgtgggagtattgcccggaacgcggcaagtactatctgcatcagttctcgaagaagcagccggatttgaattgggagaatcctgcggtgcgtcgtgcggtgtacgacatgatgaactggtggctcgaccggggcgtggacggcttccgcatggacgtcatcaccctcatttccaagcgtatcgattcggccggccgtctgcccggcgaatacggttccgaacttgaggacctgcccgtgggggaggagggctactccaacccgaacccgttctgtgcggacggccctcgtcaggatgaattcctggccgaaatgcgtcgcgaggtgttcgccgggcgcgagggcttcctgaccgtgggcgaggcccccggcatcaccgcccagcgcaacgagcacatcaccaatcccgccaacggcgaactggacatgctcttcctgttcgaacacgtggacttcgactgcgaagacaacgtcaaatggaagccgctgccgctcgacctgccccagctcaagcgtattttcgccaagcagcagtcggccgtcaagaatgccggctgggcgagcctgttcaccggcaaccatgatcagccgcgcgtggtctcccgttggggagacgactccaccgagggcagccgcgtacgttccgccaaggcgttgggtctgatgctgcacatgcatcgcggcaccccctacgtctatcagggcgaggagctgggcatgaccgacgtccacttcacccggctggaccagtaccgcgatctggaatccctcaatgcctaccatcagcgggtcgaggaagccaaagtgcagtccgcggaatcgatgatggccggcatcgccgcccgcggccgtgacaacgcgcgtacgccaatgcagtgggatggttccgcctatgcggggttcaccgcgccggacgccgccgtggagccgtggatttcggtgaaccggaatcatacccagatcaatgcggcgggcgaattcgacgatccagactccgtgtacacgttctacaagcggctgatcgccattcgccacgagaatgcgttggtggccgccggcgactggcaactgatcgatgcggacgaccagtacgtctacgcattcactcgcacgctcggcggcgagaagctgctggtggcggtcaacctgtccggacgaacggtcgatctgccgcgcgacgccgccgaactggtgcagcacggggtgaccgaaccggatatcgtgatttccacctacgacgcctcgcacgccgtggtctccctcgccaaccgtgagcttggcccctgggagggcgcggccgtccgcgtgtgagctagcgtatgttgttccagacttttttcgtccttgtctggggaaacgtacgcttacttcagctcggtgtatgttgttccggactgttttcgttcttgtctgaggtgccgtacgtttgcttcgtctcggcgtacgttgttccagatgatggggaaattggtctggggaaacgtacgccaagaggctggtgcctgcttggtgcctgcccggtgtttgttaatgtccaacgtggaaagcccgcgcggctggcgggaagccacgccgcagggccgtcacgccccaaactgggcggccttgctgccaaatttgcggcgcacagcgtccagtgcggcctcggcatcatgcaaacgcgcctgtgaggtctggccgcgggcattgtcggcctcttcgagcatgtcatccagtgaaggctgcacggccgtagccgccgccttactgagcgaagacgtgctcatgccggccaagcgaatagttttgggcaggggagtggcagactccgccgaggccggtagccccagcatgactttcagctgccgcacgcattccgggtacagcacgccggccgtatcggtcggccgctccatcgtaaaagaccgggtctgatagctcaggtcggcgaaccgcaacttcaccgtcagcgtgcgcgccaccagccccttgcgccgcagcgtgctggctacttcgtcgcaggccgaacgcagtagcccacacaccacgcgcatatcgcgtgtatcctcggccagggtttcctcggacccaatggatttctcctcgcgcaccgtggtaatttcgcgggaatccaacccgtgcgaggccgcccataatccacgtgccgcagccggggagccagtggcacgagtcaatgcagcctcatccagctgagccaattcagccaccgaatgcacgccccaagcattaagccgcttctccaaagacggcccgatgcccggaatgccgcgcaatggcatcatctgcacgaattcagccgagcgggccgccggaatcagcagcatgccgtccggcttggcattggtcgaggccattttggccaccagtttgttacaggcgatacccactgaacacgtcacgtggaagcgctcggccacctgagcgcgaatccacgcgccgatcgcgctcggccgcccccactccagcagtgcggcggacacatccatatagccctcgtccaccgaaacctgctcgaaccggtcggtgacggtcaaaaacacctcatgcatgattcggtgcgacatcatgcggtaatacgccatatccactggcagaaaaatgccgttcggacacaactgatgggcgcgcgcggccggcatcgccgaattgatgccgtatctccgggcttcgtagctcgcggcggacaccaccgcgcgcggcccggtgccgatgatcaccggcttgcctttgaacccggggttgcgcgccacctccaatgaggcatagaaggcatccatgtcgatatgcagcacggtgcatccggtctcgtcgtgaccccaatcgcgtttggcggcctcaagtctcggtgcggtgctcatgccaccattgtaggaatgccgaacgaggtcatgctcactatgtggcgcgcatggcgcggcgctcattgtcgtaatgccgaatatcgccggaattccaagggtttgcgcactgtgcggctgtttcgcatggtgggtgcgattccacggaatcgtccacattgcgtcactgtccgtaacgccttccaagtcgctgcgcgctgtcccgactctccgagtagcgtaaacctcgtgaagaaggcagtggtcggtatcctcaaccgtgttcccgtggtgcttatcgtgattggtgaggcactggtgatttatttggctacggccgtcgccaaacttgcgttcacccagctcgacccgctgtattcggtgtggtaccgcgtgggattcatggcggtgctgttgctgctgtggtgcaggccctggagcaaggctaagcgagcgcagctgtttcaccgcgacgcccgcggctgggggctggtcgtactgctcggctgctcgctggtgctgatgaataccctgttttatgtggccatcagcaatatggatatgggcattgccgtgtctatcgaatttttgggaccgctttcggtggcggtgattaccggcaaaagctggcgtgagcgggtcggtatcggcatcgcggcggtcggtgtggtgctgttggccggcatatcattggccaatccgtccggcaagggcacgtttttgtatggtctgattgcgattttgatcggcgggtcgatgtggggcatgtacatcatcaccggccggcgcgtggcggctggcggcaattcgctggataatctgtgcatcgccgtgaccatcggctggctggtccagtccctgttccttggcgtgccggctgtggctcatgtggttcaccccaaggccgatgccacgtgggcgcttgagcccggcggctcgctgaagctgctggctctgctgtttgtgatttccctgatggcctcgttcattccctatgtggtggagcagatcacgctgcgacgcaccacatccggcgcattttcggtaatgcaatccatcaatcccgccatggcggtggccgtgggactggcgtttggcgagattcccggcgttggtgaaatcatcggtgtggcgttggtgatttgcgcggttatcgttacgttctccggcgatgccgcgcccgcggacggtcaataatgtgtcgttcggcacgccgtatccgcaggacgtggtacagtaatttgctgttgcgcattattgcgtaacgtggagtcatgcctgagtggccgataggggcaccctgctaaggtgttagtcgtgtaaacggctcgagggttcgaatccctctgactccgccgattaaggttccgggtgaaagcttggaatcttttttgttttccggaaactcctgatgatgggcctgttcgcacttcgcggagtcagagggattcgaaccccgggaatacggttctggtgggttgtccggatatctgttttgcgacgcattcctgggaatgtgtttctagtgggttgcttgggggtctgttttgcgaaactttcctgggaatgtgtcgctagaaataaccgaaataaccgaaataaccgaggacggtcggtctccgcttgtggtaagcggagtcggaggtacgccattgtccgtccgcctccaaaccgccattttagcgggtgaacgagtgcggcacctcggggaaaggctaacaaacgaaagaagaatgtccactaagtgagacttttgcgtggtgttcgtgaatggtgattgaagattaaccggtttatgtcgcttgtccaatcgcttgcccatcgccttcctccccgcagtgtttgactgagatgggcggtatcctagagagagaagaagagttccgaagggtgggcaaagatgagccatatcgctgggcaggggcaacatcgctccaactcgacacgaaccaaccgtgcggcgctgattatcgtgttcgtgatcacgctcgccgttacgctgggcatcggcgcatggttcgcaacccatcgcacggacggcaatggccccgcacgcgccggagtgtcggacgtcgcgttgaataaagcgaagaacacgcccaaaccggtgaccgaacatcacggcaattcaccggattgcccggatacggactgcatcgccatgctggtcaacggcgatttgttgttccatgagggattgtggagccatttccaaggcccgaaccccaacgccacggatggcaccgccttcaacttcgacccgctgttcgcgccgatgaagcagtacattcaggcttcggacatcgccgtgtgcgaattcgaaaccccgatcgcccagcgcggcggcccatatgccgcgtacccgatcttcaacattccgccggaagtggcggatgccgcccgcaacgtgggatacaacgcctgcacacacgccaccaaccattcctgggatcagggggcggatggcatcgcccgtctgtgggacacgcttgaggccgatggcatcgcccagaccggctcgtacaaaaccgaagccgactccaccaaaccgttagtcatcgattccccgaccggcggcggcaagctgggtctggtcaccggcacggtctccctcaacggcatgaccgccgacgaggactggcaggtggatcgtctgcgcgaagacggcgacccgaatcacggcagcgacatccagcgcgcggtagacaaggccaacaaggcccgcgagcaaggtgccgatgtggtggccatcgccatgcactcggtgcaggaataccttgattacgccgattcctggcagatttcggaagcccatgagcttgccgacactggtgccttcgacgttatctacggtgccggctgccattgtgcgcagcccatcgagaactataacggcacgtggattgtctacggtctgggcaacaccgtcaccgagtcggcgaacacgccggaaaccttggtcaacaaccagggtgtgaccgcacgcatccagttcgccggcaagaagggcgtcaaggggtcgtggcgcgtcaaccgcatcgactgggtgcccaccgccaacgtgcatcaaggcaactaccaatggtgcccgatatccagcgaccatcccataggcacatgttgggacgaagcctacgacgctcagatacgccaacgcatctgggatgtcatctattcgatgggcgcggaccagaacgtcgtcaaggaatggaacatcacgcaggagcaggcggcaaagcaatagttgctcggcttggtctcaaggaggggaagccgcaaggtgacgcttttcccgtcggcctcctaatgtggagcccatgaccgagatttacgaaacccaaagcgaacgcaccgatctgcccctcgtcgtgatgccgtccgtgctcgacgcgatgatcgagcccatcaaggcccagttccccgcgctccacgacgttgcccgcgtgcgtatgttcgaggaattcacgtccgacgaggcgatcgtagccgagcgtctgaaggatgccgacgccctgctggtgggcggctaccacatttcggatgatctgctgcgcaccatcagcgagcaggggcacgtcaagtgcatcgtgttctgcggtaccggcgtcgccagctacatcaatctcgataaggcgcgcgagctgaagatccgcgtctgcaacgccgaacattatggcgatcacgccgtggccgagcacaccttcgccctcctgttcgagctcatccgccgcgttggccaactcgataaggatgtcaaggccggcaactgggcgtgggccggcggcgatggactgcaactcgccggccgtcgcatgggcatcatcggactgggcggcatcggcgccaccgtggccggcatcgcccgcgccttcggcatggaggtcgccgcatggaattcgcatgtgccgcccgagcatttcgaacgctccggcgccactccggtcgacgatctcaacgagctcatcgaaaccagcgacgtcatctccgtccatctgccgctcaacaacgccacgcgcggcatcgtcaccgccgagaaccttgcgcatgtgaagcccggcaccctgttcatcaacaccgcccgctccgaagtcatcgaatccggtgcgctgcttgcccgactgcaaaagggcgatgttcccgccgcactcgacgtgttcgaccacgagccgctgaccgccgacgacgccatctgccatgtgcccggcatcgtcctgaccccgcacgtcggctggcgtaccgacggcgcgttcaaggagctcacccgccagatgatcgcctgcctgaccgcctacttcgccggcgaggactataacgtcgtcgtctccgaacactgatagtcctgcctggcctcgcgctcaatcgaacacccagtcagccgaccaccggaacacgcttatgcagacgattctcaacacgcccgacgatcccgcccacgattcgctcgtcgaaaaaaagtccgaattcatcggcgacgccgcccatgtcgatacgctcgacgaggcgctcgcgttcgtggccgcgatccgcgagcagcatccgaaagcccgacacgtggcgtatgccgccgtgtgcggaggcgcggatgggcgactgtccgaacgcatgagcgatgacggcgagccgtccggtaccgccggcaagccgattctcgacgtactcaagcagtccggcaccaccgattgcgtggttgccgtcaccagatatttcggtggtattctgctgggctccggtggtctggtccgcgcgtactcatccgccgcatcattggcgatgaaagccgcccgcgccgcccgcatcatgaccgccaagcgataccgggtccgtctcgaatacccgcagctggcacgattccagcagattctggcgcagctcggtggcagtcaggaggatgaatcgtatgcggtgaacgtcgagttgaccgcggtggtgccgcaggatgattgcgcgcgattcgaggagtgtgtgcgggaagcgttcaatgccgcggtggtgccggatccgattgacgtggtcaacattccggttccgctcgcgtgacgcctgtatgactaagctgggcatcatgaccgacgagaacaccaccagccagcagacccagcccaccgaggccgcaaccgagactgcaaccgacacgggcgcccagcagcgggaccaaggcgcgcagaccgcagccgagtccgccgctccggtggatttcgaaccgctgaccgctacatacgaacgtctgcgtcattccaccgacccggccgaactgtccgaattcgcccgtcggccgttgcctgaccgtgccgatcaggcggcgttctcccgcgccaccgcacttttggaggctgtggccggcaacccgcacaccccggtggccgatcgcgtgttcctcgccgacaccatgccgttcccgaacgtattggtcaaactctccgaagaccccgaaccgtccgtgcgccaagccgtggccgccaacggggatgacaagaattggctggtcggccgcctgaccaaggatccggtacctgcggtccgggatacggcgttgaaaaacaagcgcaccagctggaagatgcggcttgagggtgcgcaggaccccactgcggatgcggagacattggatttcttgggcgtacttggcaccgaatccgaagagggagcaccggcagtgctttcctcgatggtccgccgtgccgtggcgctgaaccccaatacgtccgaagcgatgcttgccaaattggccaacgacccctcggccgaggtgcggcacgccgtggaaagccgccgctaagcacactattgctgtgttttgccgtgcaaatttggccggcaatcaccctctatccaccattgtgagcgctcacatctcactatgtgagggtaaaaagtacataatttggcggaatcacggcattttgcttacggtgtggcgcaatcaaacggcgttagactggggctatgagtgagattaccgagagtgaagagcgtctggcccgtccgttgattcgactggccaagttggtcggtgtcggcacgagttatgtgggcatgagccatgactaccacgagatagacgatgacgtcctgatcgaggtgctggcagcgctgggcatcgacgcctccagcgagaacgcccaactcatcgccatccgacgcattctgaacgagcgttactcccgattggtggcacccaccgtgctgcatatcgccggtagcgaggaccgggtgctggtgaacaccggcattctggacgtgccttcggcgagcatcacgctggagaacggcgagccatatcagggcaccgttgaagttggtcctggagatggatcccaggcctacgacttggatggcacgttcatttcgaatgcggctgtggtcattcccgccgatctgccgattggctaccatacgctgcacgtcaaggtcgccgaccgtgtgcaagacgccactttgatcagtgcacctgatcgcgtcgatctgcttgacccgatgaagggcggcagtctgtggggctggatggcccagctgtactcgattcgctcctccaactcctggggcgtgggcgattacgaggatctgaagaccatgctggtggacgccaagcagaagaccggtgccgacttcgtgctcatcaatccggtacatgccgccgagccggtgtccccgctcaccccgtcgccgtatctgccggtaagccgtcgcctgatcaacttcacgtacatccgccccgaggcgatcgccgaatatgccacgctcagcgcgggcgacaagaacgccgtcgacggactgcatgccgacaccgaaccgctgaacggtgattcccagctcatcgaccgtgacgccatgtggcgcagcaagatgcacgccctgtggattatcttcaaggccggccgtaccgccgaacgccaaagcgcgttcgaccaattcaaggcggactgcggttccgacttggaggcgtatgccacgtggtgcctgtgctacgacaagtggggagcacccaatggcgaggagagcaactgggagcgcaagttcaaccgcagctccccggaaatcgccaatctgcgcaagcagtacccggacactttggacttctaccgctggctggaatggattgccgccgagcagctgtcctccgcccagcaggcagccaaggacgccggcatgcatatcggcatcatgtccgatatggccgtcggcgtgcacccctccggcgctgacgtgtggtggaatcccgagcgcttcgccaagggagccacggtcggtgcaccgccggacatgttcaaccagcaaggccagaactggagccagccgccgctgagcccgatcaatctggaggccaccggctacgagacctaccgcaatatggtgcatggcatgttcgcccgtgccggtgcggtgcgcatcgaccacattctcggcctgttccgcctgtggtggattcccgagaaccggtcggctatggatggtgcttatgtgtactacgactcagacatcatgctgggcgttctggccatcgaggcctctcgcgccggcggcgtggtcgtaggtgaggacctcggcgtggtgccggaccatgtggccgattccctgtcgagccacggtattctcggttgcgccgttgaatggttcgaacagtgcgacggcgtgttccgcgccccctcccagtggcgtccgtacgcattggcctccgtgaatacgcacgatttgccgccgaccgccggttacctggaatacgagcacgtcaagattcgtgagcgtctgggcttgctgaccggcccggctgaggaattcgaagcctccgcaaaggccgagcaggatgcgatgctggtcatgctggtcgagcagggctatcttgatgccgacttcgccgaacatcgtgaggatcacgaggcggatatcatcgacgcgctgtaccgcgcactgaagggttcgccgtgcaagctgctcgccgcctcgatcaccgacgcggtgggggagaagcgcgcgcagaaccagccgggcaccaacaacgaatacccgaactggcgcatcccgctggccgacgccaagggcaacgtggtaccgctcgaaaccctcttcgacacccccggcgtccaacgcttcgcccaaatcttcaattcctgacccactttacctccctctgacgagccgagtcgttaagcggacagtccagtggactgtccgtagacgaggcctgaacgaagcgatagctgagagaaggcagggaattgcctcaccgtaggcgagtcggttagccgaagtgggtgggagagaaaccataaataggggaagagaagccataaacccaatggagtgtccccagttgccctatgtcaagcccggcgatatactagtggattgttgtgtttccctaaggggtccttcaaagcgctatcccactcgccatcgaggactttcagggagcccacggataatgaggttcgatgcctcttggatgcggccctgaccaagccacgccaagcagctgagacccggaacacaatatagaaaaggtaatccagtgaaaactttcactccgaagccagctgatctgactcatgactggtatgtcatcgacgccaccgacgtggtgctcggccgtctcgccacccaggctgcaatcctgctgcgcggcaagaacaagccgacctacgctccgcacgccgattccggcaaccacgtgatcatcatcaatgccgacaagattgctctgactggcaacaagatgggcaaggaactctactcgcactccggtcgtcccggtggtctgcgtcgtgactcctacgccgagctgctcgagaagaaccccgagcgcatcatcaagaacgctgtcaagggcatgctgccgaagaaccgtctggccaaggtgcagctcgaccgtctgcgtgtcttccgcggcgccgagcacccgcacaccccgcagaagccccaggtcttcgagatcgcccaggtctcgcagcaggccaagtgaaacctgagaggagataagaatcatggctgaaaacaccaacgactcccaggttgtcgagaccgaagaggagctcaccaactacaccaccgagaccaacgctggcgctggcaccggcacctccgcgatcgagccgggctacggcaccggtcgccgcaaggaggctgtcgcccgtgtccgtctggttccgggtgacggcaagtggaccatcaacggccgcaccctggaggagtacttcccctccaagctgctgcagcgtgaggtcaactctccgattgttctgctcaagctcgaaggcaagttcgacgctatcgtcctcgttgacggcggcggcaccaccggccaggccggcgctatccgcctcggcgttgcccgcgctctgaacgccatcgatcgtgatgccaaccgcgccgccctgaagaaggctggcttcctgacccgcgacgctcgcgtcgtggagcgcaagaaggctggtctgcacaaggcacgtcgcgccccgcagttctccaagcgttaatttcgcttgtcctgtaccgagcatgcaaaggctctccgtggaattccgcggagagcctttgtgtttgtgtcgtgctgttttgagtgtgactcacacctgtttcatcagcgtgatgctcagcgccggcatggtccagacattgtcgtcgacgggagtgtccggcgtatcatccacaggggcatcaggcatatcagctgatacctcatcccgaggcgcggacgaggtgccgtttgcggcgtgatccgttgctggcatcgcgaattcgatggtatccgcttcatcctcagtcgaggattccgtgcgctgcatggccacttcttcgaccagcgtgcgtaccgtctcgctggcgtccggtacatgctgcgtccaaacggtggtgtcatcgttcaaatcgcattcctcgacctgaatgccatgcccggctcggcggccgttgatttcggccgagcaccatttaggcgtccagtgagtgtctggcggcaggcggaatgtgcggtcgtcagcggtgccgttgaccacaatgcacacgtccacctcactgttggacagcaatcgcatggtgaagctacgtacgcccagatcgaaccagtcacgctccatcggcgtggtgccgtcgggcaggaaccactgcacgcggcttgagggcttgagtaggccgagttgggtcagtcgggtgaagaagtcctcgtggtgatacaggtccagtgatttacgtagcgccaccagtcgagacacggttttcaggcgacgcatttcgcgtgtcttgttggtggaatacatccaatcccacttcagccacgtgatgtcgttgtcttggcagtaggcgttgttgttgccgtcctgtgtgttgcggaattcgtcgccggcgagcatcatcggcgtacccagcgagagcagcagcatgccgatcatgttcatggccgcctgttcgcgtgccgtgatgacgtctggatcatcggtgacgccttcgacgccgaaattggcggaatggttcaccgacgagccatcattattgttctcgccgttggcttcattgtgcttggagcggtatctggtgaggtccgtcagcgtgaaaccgtcgtggcaggacacgaaattgatggaggccggagcgccgcgcccgggttcggtggcgaacagatcggccgagccgcagagtcgcgtggccatctcctgcaaactgatacgaccgaaatcggagccgccatccacatcctcaagccagaaggtgcgggccgtgtcgcggaagcggtcattccattcggcgaacggcacggagaattggccggtgcgccagccgaggttgcccagatcccacggctccataatgagcttcaggttgcccagcagcagatcggaacgcagggcgtagaggaacgggtgatgatgggtgaattcgccttccaggcgggccagcgtgacgccaaggtcgaaacggaaaccgtctatgccgatacgcttggcccagtatcgtaatgagtcgatggcaaaggtgaccacatgcgtgttggtgaagtccagcgtattgccgcaaccggtggtgtcttcgagtcgaccggtattggatttttgatgacgatagtaggccaggtcgtcgaggccgcgccagcagaccgtcgggccttcgacgccgccttcgcatgtgtggttgtagaccacgtccatgatgacttcgaagccggcctcgtgcagcgcgcgcaccatgtctatgacttcttggcgcacggcggccgcgcccttctcttgggctgctttggtggcataggagggttcgggggcgaagtagctgagggtggagtagccccagtagttcttgtggccgtgttcttgcaggaagagctcgtcctgcttggccataatcggcagcagttcgatggaggtgatgcccaatccctgcagataggcgagcgttgtggggtgggcgagtccggcgtaggtgccacgcaacgcttcgggcagccacggcgcgttggcggtgaagcctttgacatgcatctcgtagatgacggttttgcgccacggcacatgcgggtgctgcgggtcgccctcatgcttatggatatcgcgatcgtcgatggccacggataccggcacatggccgagcgagtctacggtgctcatggcaccgtatgccgagccggttaccttgtggtccacgacatcgcattcataggagaaggcggcgggggtgagctccatggagccgtcgatgcccttgccatacgggtcaagcaggaatttgtatggattgaagcgcacgccgtgtttcgggtcccatgcgccgtccacgcggtagccataacgcatgccgtcccatgctttgggcaggtgcacgtaccacaggccgtagttcggtccggtcatgcggaacagggtctcgcgcagatacaaatgttcgataatgcgcgtgcacaccggaaactcatggatctgctggatgaacgaggcgttcgggtcttcgaacaggcggatggcgtcttggaagaaggcgccgggctcgtcaatgggctccagcacacacagccaaacctgatcggcagtttcggaacgaacaacgacgtcagccccaccgtcgtcagtgaagtacagccctgggcgagtggcgtaacgatgcaacggtgggtttttcatacctccattgtagacgtgttgtcacttctggtggaagcccttgatttcctgccgcgttccgcagcaccacagatatcgtcgagataattctcggcgaatcgcaatgcggcaccgatgatgttctggtcttcggcgcagtagctcttgcgcagattgaaatggtcggtgccgaacggactgcgtgcgatgacgcgcgccttcagatcctcgatgtcactgtcttcaagatgctgggctgcttcaccgccgacaatcacgtcgcccgcgatgatggatcgcgcgttgacgatggcctgcgccacgtaatccagccattcgtccatgcgctcgcgatgatgccgttcaccctgctcaagcacgctgaagaagccgggaatactttcgtaatcctcgggcaaggtctccggcgagcagtaggtgtccatgcaaccgcgctggccgcagtagcattcgcggccgcccggcaccagcgtcatgtgttcgatggcgccattgcacatattcggaccctgatacagcttgccgcccacgatcaccgcgccgcccgggcgtcgctccagatagacgcacaccgcatcggtgagcgtggagtcgaaccatagctcgaccatggcggaggcatcggaatcgtggatcatcatgcacgggtaatggaccgactggctgatggtttcgagcgtaagccccgtgttgcccataatggtgccgaaggtgatggtggtggcgtcgggggagaggatgccttggatggcgaacgagacgccgagcactttgccgtgcttcttttcgacgtcggaggcgaagttgttgatgatgccgccgatacgctggtagtaaacgttggtgttgcggtaaggcagggcatcgttgcgtttttcgatgacgttgccgtacaggttaatcgcgcacaggcgcagttcgttggaccgcatcactacgccgatggcagtgcgatgatcgggattgaactcataattttgcgccttgcgcccgccggtggaatcctgcagttcgcctttgcggatgagtccgtcatcttctagggcgcgcagattttgggtgatggtgggcaggctgaggccgagttcgcgttccagttcctgcttggtgacatggctatggccatacagatactgggtcatggcactgcggttgtgcgctttcactgcggtcgatggcattgccctcatatttacccctttgtgcgatgagatatatgtaagtatactttatgaaagtggctttcatgtgcctcgacgcggagattatgaggcaacaatcgtatatttgtaggcgattttgggcacttttttaaactaattttctagaaatgtggggaaaatgagtacttttggaaacatgatttaagaaagttgtcggattgcgttgtttgcaagcatgtgattttcggtaaaaagtgaacaaaaagtaccaaatcgccgaataaagtgaggatttgttcgatatttcgcacaactcttaacaaaaactgctcaatatcgcacgtgaaacgccgtcgattttgtgcgtatgcatcgcgccggaccgttcggtatattgtgactcaagtcacatatgcaatgtgacaacgcatcaccggtcattttcggttactgaggcggtatcccgctggtgcaactgaggtgacgaggcgatggcccagaactttgccataataccccaagaagatcgaggaggaccccaagtggcagaagcaaagaagaaagtcgaagctgccaatccgaccccagaagagaagcaggccgcagctgaggccgaagttgacgcgctggttgcccgcgccaagaaggctctcgacgaattcgagaacctcgaccagaagcaagttgatcgtatcgtcgccaaggcctccatcgccgctctgaacaagcacctcgttctcgccaagatggccgtcgacgagaccggccgtggtctcgtggaagacaaggccaccaagaacatcttcgcctgtgagcacgtcaccaactacctggccggccagaagaccgtcggcatcatccgcgaagacgacgtgatgggcatcgatgaggtcgccgagcccgtcggcgtggtcgccggtgtcaccccggttaccaacccgacctccaccgccatcttcaagtccctcatcgccctgaagacacgctgcccgatcgtcttcggcttccaccccggcgcgcagaagtgctccgtcgaggccgccaagatcgtgcgcgacgccgccatcgaggccggtgctcccgagaactgtatccagtggatcgagcacccgtccatccaggccaccggcgcgctgatgcagcacccgggcgtggccacgatcctcgccaccggcggtccgggcatggtcaaggccgcttactcctccggcaagcccgccctcggcgtgggtgccggcaacgccccggcctatgttgattccgatgtggacatcgtccgtgccgccaacgatctggtgctctccaagcacttcgattacggcatgatctgcgccaccgagcaggccatcatcgcccacaaggacgtctacgaccagctcatcaaggagctcaaggtccgtaaggcctacttcgtcaacgccgaagagaaggccaagctggagcagtacatgttcggctgcaccgccggttccggcgtcaagcccgtgctgaactccgtggtgccgggcaagtccccgcagttcatcgccaaggctgctggcttcgagattccggccgacgccaccattctggccgccgagtgcaaggaagtctccgacgacgagccgctgacccacgagaagctcgctccggtgcaggccgtgctcaaggccgacaacaaggagcaggccttcgagatgtgcgagaagatgctcaagctgggtgccggccacaccgccgccatccacaccaacaaccaggagctcgtgcgtgagtacggcgtccgtatgcacgcctgccgcatcatctggaaccagccttcctcccttggcggcatcggcgacatctacaatgccatcgccccgtcgctgaccctgggctgcggctcctacggcggcaactcggtgtccggcaacgtgcaggccgtgaatctcgtcaacatcaagcgcattgctcggaggaacaacaacatgcagtggttcaagatcccggccaagacctacttcgagccgaacgccatcaagtacctgcgcgacatgtacggcatcgagaaggccgtcatcgtgtgcgataaggtcatggagcagctcggcattgtcgacaaggtcatcgaccagctgcgcgcccgctccaaccgtgtgaccttccgcatcatcgactacgtcgagccggagccctccgtcgagaccgtcgaaaagggcgcggagatgatgcgcgaggagttcgagccggacacgatcatcgcggttggcggcggctccccgatggatgcctccaagatcatgtggctgctctacgagcacccggaaatcgccttctccgacgtgcgcgagaagttcttcgatatccgtaagcgcgccttcaagatcccgccgctgggcaagaaggccaagctcgtgtgcatcccgacctcctccggcaccggttccgaggtcaccccgttcgccgtgatcaccgatcacaagaccggctacaagtacccgatcaccgactacgcgctgaccccgtccgtggccatcgtggatccggtgctggcccgcacccagccgcgcaagctggcctccgacgccggcttcgacgccctgacccactcgatggaagcctacgtgtccgtgtacgcgaacgacttcaccgacggcatggccctgcacgcggccaagctcatctgggacaacctggctgagtccgtcaacggcgagcccggcctggccaagaccgacgctcaggagaagatgcacaacgccgccaccatggccggcatggcattcggctccgcgttcctcggcatgtgccacggcatggcccacaccatcggtgccctgtgccacatcgcccatggccgtaccaactccatcctgctgccgtacgtgattcgctacaacggccagattcctgaggagcccacctcttggccgaagtacaacaagtacatcgccccggagcgctaccaggacatcgcccgcaacctcggcatcgacaccggcaagaccccggccgaagccgtggagaacctggcgaaggctgtcgaggactaccgcgataacaagctcggtatgaacaagagcttccaggattgcggcgtggacgaggattacttctggtccgtgctcgatcagatcggcatgcgcgcctacgaggaccagtgcaccccggccaacccgcgcatcccgctgatcaacgacatgaaggacatcgccgtcggtgcttactacggcgtctcccaggcggaaggccacaagctacgcatcgagcgcgagggtgaggccgccactgaggaagcctccgagcgctgattgcaggcggttggcggctgctggcaccagcagtagccaccaaccgcggtgttgcagcttagtggctgcatagcggacacaaggagcccgaccccattacaggggccgggctcctttgcatatgtggcgctccctcagccggcaggtgcctccatggggcggtaacctactcatggggcggtaacttgcccatggggcggtgaaaaccccatggggcggtgtacgaaaacggctctattctgcggaaggtaaaattttaccgtccgccccatgggctaattaccgccccatgagggaattaccgccccatggaatcgctgagcgtcgctaaaccaccgcaataatgcagccaaaagcaataaagctggcaaacgcctcggtaacgccggtcaccacgggcttcaaggttgtgcgccgtgtaaccaccggcaacgcaacggcgcgggccaacagcagcacagtcatcgcaatcagatacgggctgcgtccagccggcacggcggctagcagcaatagcgccacatgccatacccacgaagccgccacgtacgaacgcttcccgcgttcccggatcatggttttgaccaccaaaaccgacccatactgcgtcagcgcaaacagcacggtggcaatcagcccgttcacgggcaatgaacccgcaggccaccaggcgcgaaggtcgaatatctggctcaaatctggcatattccgaatcgcggcgcgtgcggcggtgacatcagcggttgcgcacgaggcatgtgctgcgttgatgggaataacacatgccgtctcaacagcgttgccaaacgacgcgatcaccgtggccatggccgatgcggcaatcaccgacacggcattgccccacagcgagcgctccttcctcagccacgaggacagcatcgacagcgcaaccagcactatatataaaggagcccaacgcagtatgccggtatgcgtaatcaggaatggcaagccgatgacgatgagcgctacggcataagtgagcatcggcggcagataacggcgtgaaaagtgtgctttgaaccagtgcgcggcgctgaactgcacgcaatagcacacggcccacgtcgccaacagccaaagcgtatcaagattaggcccgccgataaagaagccagccacagcgggcagcataaccattacccatgcgccaggttggttgtcgaaccaatcgcgtttaagagtcttgcggcgggaagccatatctgtcatgatatcgcagcgaatggttctcaataagaaagatgtgagacctgcattgcgacaatcgaacataggaagtgcgagaagccagtgcttccgccattatgcaacgtgtgcgattgttcggaaatgttcatttggctcacattgtgtttatgtgagactaatctcgttgagtatcgccctcggcgctggaaatggcctcggctatcggatcttggctgaagtcgtggttgcgataatcagggtcgtccaccggcagatactgcaccaaggtatcgaacacctgactgtagattttgccgcgctcgagcaccgcatcgagcacatggccgccgaacgtcttgtcgtcggacaggaagtgctcgtggaatccggccacagccgcgccgtgaaacatcacgggggagaagtacccgagcatggtgcccttgacgtcgtggcgcaggaacacggcctgccggtcggccacctctaccagcgtggggtagggtgcctgctgcttgatgaccgcgcgtgtcttgatgaagctgaacgtgccgcgcacaattaccgaaaagaacgtgttcgcgcggccgttcgccttgacgatcttttcgttgagctcttctaggccgatatcatgacgctcgcactggtactggaaggccgcgcgatggctattagcgaatggcatggtgaagtcgtccggcacgcgttcggccacaccggattggcctatcttgtatgccacgccatccaggatgatgagctcgccgtccaagccctcgccggtgccgatgccggtgtcgccatgcttgagcaattcgccgatggtggtggtgccttccagcagccccggcacgagtaaggccaaagtgccgtgctgatataacacgttggcgccgtgctcacgaataggtttgatgttctttgccagtgattgtgtcacgagccttaagagtaattcgcgttaccgtccaactcaattaatcaatccatattcgccaacgtgagctgtgccactatatataggtaagtctcagaaggatgttggtaggcgacgccgagcggctatgccgcgaggtaatacgaacggcatgagcgcgacacgcgcgaattcctccgcgctgtcccacctcaatgcttgaataaacaagttgcctgatttgggctcgcaaattggaattaaaaaagcgagcgcgggccgggagccacttcaagtgaagtgacagccggaaaccgcgcactgatgtcggatgaccgccagaggacgtatgtccaagggaggccatgcgcgccggtgccctagaagcaggttggtaaacagtacaacgaacatcgctagaaagggcggacggcaatggcgggacagaaaatccgcatcaggcttaagtcctatgaccacgaggtcatcgaccaatcggcgaagaagatcgtcgaaacggtgacgaacgcgggcgcaactgttgttggccccgttccgctgccgaccgagaagaacgtcttctgtgttatccgttctcctcacaagtacaaggattctcgcgagcacttcgagatgcgcactcacaagcgcctcatcgacatcgtggacccgacccccaaggccgtggactccctgatgcacatcgatctgcctgcggacgtcaacatcgaaatcaagctgtaagggaggaggaagcattatgtctaatcgcaaggctctgctgggcaagaagctcggcatgtcccaggtgtgggacgagaacggcttcttcgtgcccgtcactcttgtcgacgtgtccaccaacgtggtgaccgccgtgaagaccgaggagtctgacggctacaaggccgtccagctcggctacggcgccatcgaccccaccaaggtgaccaagccgctggctggccactttgccaaggccggtgtcaccccgcgtcgccacctcgtcgaggtgcgcaccgacgacgtcgatcagttcgaggctggccaggaactggccgctgacctgttcgaagagggtgctgaggtcgacgtgaccggcaccaccaagggtaagggcttcgccggtaccatcaagcgttggggcttcaagtcctaccgccgtactcacggttctcacaagaacgagcgccgtcccggttctgtgggcgcatgcgccactccgagccgtattctcaagggcaagcgtatggccggccgcatgggtcatgtgaccgccactacccagaacctgaccgtcgtctccgctgatgtcgagaacggcatcctcgccatcaagggtgccattcctggccccaagggcggcatcgttctcgtccgctcggctgtgaagggagcctgataaaccatggcaaacgttactctgaacgtcaccgacgccaagggccaggccaccggcaccgttgaagctcctgaggctctcttcggcgtttccgccgaggatgtccaggctcacatcccgctgatccaccaggttgtcaccgctcagctcgctgctgctcgtcagggcacccacgccaccaagactcgtggcatggtttccggcggcggcaagaagccgtggaagcagaagggcaccggtcgtgctcgtcagggctccatccgtgcaccgcagtggtaccacggcggcaccgtgttcggcccgcagccgcgtgactactctcagcgcacccccaagaagatgaaggccgcagctctgcgctacgccctgtccgatcgcgccaatgccggtcgcgttgccgtggtggagttcggtatcaccgagccgtccaccaaggccgctgtcgccgccctggccccgatcaccgcggacaagttcaccacggtcgtcttcactcgcgacaacatcaacgagtggctctccgtgcgcaacatcccgaccgttcacccgattttcgtcgatcagctcaacacgtacgacgtgattacctcgcagtacgtggtcttcaccaaggaagccttcgaggctttcgtggctgccaagaccgagccgaaggaggcctgatttagatggtcgctattcacaagcccgctcacgacgtgattcttaagcccgtcgtctccgagaagagctacgccgcttccgaccgtggccagtacaccttcgtggtggctccggatgcgaacaaggtgcagatcaagcaggcaatcgaagagatcttcaaggtcaaggtgacgaacgtcaacaccctcaaccgcgctggcaagaagcagcgcactcgcaccggtttcggccagcgcgcttcccagaagcgtgcgatcgtgaccgtcgccgagggccagacgatcgacatctttggtaactgaaggctagccgagaaaagttaaaggaagaactacattatggctatccgcgtttataagccgacgaccgcaggccgccgcaacgcgtccgtctcggatttctccgagctgactcgttctacgcctgagaagtcgctggttcgcaagaagtccaagaccggcggtcgtaactcttacggccgtatcacctcccgtcatcgcggcggcggccacaagcgccagtaccgtctcatcgatttcaagcgttgggacaaggacggcgtgcccgccaaggttgccgagatcgagtacgatccgaaccgctccgcccgtatcgccctcctgcacttcgcagatggcgagaagcgctacatcatcgcgccgaagggcatcaagcagggcgacgtcatcgagaccggtgctcaggctgatatcaagccgggcaacaacctgccgctgaagaacatcccgaccggtaccgtggttcacgccatcgagctccgcccgctgggtggcgccaagatcgctcgttccgctggtgctgccgttcagctcgtcgccaaggatggcgcctacgctcagctgcgtatgccgtccggcgaaatccgcaacgtcgacgcgcgctgccgcgccaccgtcggcgaggtcggcaacgaggaccacgccaacattcagctcggcaaggctggccgcgcccgctggatcggccaccgtccgatcacccgtggtgagtccatgaacccggtcgaccacccgcacggcggtcgtacccgcggtggtaagccgccggtctccccgtggggcaagggcgaggttcgtactcgtcgtccgaagaaggcttcgaacaagatgattgttcgtcgccgtccgtccggcaagaaccgcaagtaagggagtatcgagaagatgactcgtagcatcaagaagggccccttcgtcgacgcccacttgcagaagaaagtcgacgagcagaacgagaagggcaccaagaacgtcatcaagacgtggtcccgtcgttcgatgatcacccctgatttcatcggacacaccttcgccgttcatgatggtcgcaagcatgtcccggtgttcgtcaccgaggccatggttggtcacaagctgggtgagttcgcccccacgaagaccttcaagggtcacgtgaaggacgacaagaaggcccgtcgctaaggataaggaatagaacatggaagctaaagcaatcgctcgtcacgtccgcgtgacgccgcgcaaggctcgccgcatggtcgacctcatccgcggcaagaaggcgaccgaagccgtcaccattttgaagttcgcccctcaggctgcggccctgccggtccgcaagaccctggagagcgccatcgccaacgctcgcgtgaaggccgacaaggccggcgagccgttccgcgagaacgacctgtacatcaaggagacctacgttgacgaaggtgtgaccctcaagcgcttccgcgctcgtgcccagggccgcgccgctcgtatcaacaagcgcacctcccacatcacggtcgtcgtggctaacaaggaaggagcccgctaaagatgggtcagaagatcaatccgtttggctaccgtctgggcatcactgagaaccaccgctccaagtggttctccgactccaacaaggccggcgaacgctaccgcgacttcgtgcttgaggatgatcagatccgcaaggagatgagcaaggacctcgagcgcgctggcgtgtcccgcatcgtcatcgagcgcacccgcgaccgcgtccgcgtcgacattcacaccgcccgtccgggcatcgtgatcggtcgtcgtggcgccgaggccgagcgcgtccgcgccaagctcgagaagctgaccggcaagcaggtccagctcaacatcttcgaggtcaagaacgccgcgctggacgcccagctcgtcgctcagggcatcgctgagcagctgaccaaccgcgtcaccttccgtcgtgccatgcgcaaggcccagcaggacgccatgcgcgccggtgccaagggtatccgcatcaagctctccggccgcctcggcggtgcggaaatgagccgttccgagttctaccgtgagggccgcgttccgctgcagaccctccgcgccctcatcgattacggcttcttcgaggccaagaccacgtacggccgtatcggcgtcaaggtctggatctacaagggcgacatgaccgaatccgagttcgaagagcagcaggctcagcagaacaaccgtccgggccgtcgtggtggcgatcgccgcccgcgccgtggcaaccgttccgccgccccgcaggccgtcgaagcccccaaggctgaggctcccgccgaggccgctccggctgcagaaacgaaggagtgagcaagaatgcttatccccaagaggactaagtaccgcaagcagcaccgccctgtgcgttctggcatgtccaagggcggcaacgagatcaacttcggtgatttcggcatccagtccctcgccccggcctacgtgaccaaccgtcagatcgaagccgcgcgtatcgccatgacccgctacatcaagcgtggtggccgcgtgtggatcacgatcttcccggatcgtccgctgaccaagcacccgctcggtgcccgaatgggttccggtaagggtgccccggagttctggattgcgaacgtgcgccctggtcgcgtgatgttcgaaatcggtggtgtgtccgaggacgtcgctaaggaagccctccgccgcgctatcgacaagctcccgatgaagtgccgcattatcgcacgtgaaggtggtgatatctgatggcagtcggtaccgctgattactccatcaagaatctcaacgagaagaccaacgcggaaatcgaaggcttcctgaagaagtccaaggaagagctgttcaacctgcgcttccagcacgccaccggtcagctcgagaacaccgcccgtctcaaggctgtcaagagcgacatcgcccgcatgtacaccgtgcttcgcgagcgtgagcttggcatcagccaggagccggccgctaccgaatccaaggagaagtgattatggctgaagagcgtaacttccgtaaggttcgccgcggctacgtcgtgtccgacaagatggacaagacgattaccgtcgagctcgagcagcgttcgacccacccgctgtacggcaaggtcgttcgttccaccagcaaggtcaaggcccatgatgaacacaacgacgcccacattggcgacctcgtgagtattatggaaactcggcctctgagcaagaccaagcgctggcgtctcgaatccattatcgagcgcgccaagtaagtaaagttcggcaaggctcgccatttaccggggcattatgggcaaccacgatgccccggtaaatggggagaaccagctcggctaaggagaatcaatgattcagcaggaaacgcggcttcatgtcgccgacaacacgggtgcgaaggaactcctcgccatccgcgtgctcggcggatcgaagcgacgctatgccggcatcggcgacgtgatcgtcgcctccgtcaaggacgccattcctggcgggtcggtcaagaagggcgacgtggttaaggccgttgtcgtccgtaccgtcaaggaatcccgccgtgcggatggttcctacatcaagttcgacgagaacgccgccgtcattctcggctccggccgtgaaccgaagggcactcgtatcttcggaccggtcggtcgtgaactgcgcgagcacaagttcatgaagatcgtgtccctcgccccggaggtgatctgacatggcagccaagatcaagagcggcgacctggtcaaggtcatccgcggcaaggaccgcggcaaggaaggcaccgtcaagcaggtgctctccaacgatcgactgatcgtcgaaggcgtgcagatcgtcaagaagcacgtgcgtgcaacgcagcagggccagcaggctggcatcgtctccactgaggctccgatccatcgctccaacgtgatggtcatcgacccggagaccaagcagccgacccgcgttggcatcaccgttaaggaagaggcgcgtgacggcaaggtgaagaccgtgcgcgtgcgcgtcgccaagaagtccggaaaggagctggcatgaccgatactactgtcgaagcgccggccaccccgcgcttgaaggtcaagtacaacgagcagattattcctgagctcgagaaggagttcaagtactccaacccgatgcaggttgcccgtgtccagaaggtcgtcgtctccatgggtgttggtgccgctgcccgcgactccaagctcatcgaaggtgccgtcaaggacctcaccctgatcaccggccagaagccgaagatcaccaaggccaagaagtccgtcgcgcagttccacctgcgtgaaggccaggccatcggtgcgtacgtcaccctgcgtggcgaccgcatgtgggagttcctggaccgtctgctgaccctcgcgctgccccgtatccgcgacttccgcggcatcaacggccaccagttcgatggccagggcaactacaactttggtctcaccgagcagtccatgttccacgagatcgatcctgattcgatcgatcacgtgcgcggtatggacatcactgtggtgacctccaccaaggacgacaaggaagcttacgcgctgctgaagcacctcggcttccccttcaaggagaactgatatggcaaaaaccgctcttaagaacaaggcggccggcaagccgaagttcaaggtccgcgcttacacgcgctgccaggtctgcggtcgtccccactccgtctaccgcaagttcggcctgtgccgcatctgccttcgtgagaaggctcaccgcggtgaactgcccggcgttacgaagtccagttggtaaacatcgacgctgaaggtccgcggcccgaacgcttctagaagaagcgtgagggcggcggaaaccatagcgagaaagggcaacaagcccaaatgacaatgacagatccgatcgcagacatgcttacgcgtctgcgtaatgcgagcgcggccaagcacgaaaccgtggatatgccgtactccaagttcaaggcgaacatcgccgagatcctgaagcgcgaaggctacatcaaggacttcaccgctaaggaagccaaggtcggccagactcttgaggtcaccctcaagtacggtccgaacggtgagcgttccattcagggcatcaagcgcatctccaagccgggccttcgtcgttacgcgaagtccgactccctgccgatgccgctcggtggcctgggtatcgccatcatctcgacttcttcgggactgctgactcagaaggaatgcctcgaccgaggcattggcggcgaaattgtcgccttcgtgtggtgagaaaggagagctgaaacatggcatcgcatattggtaagctccccatcgccatccctgctggcgttgaagtcaagattgaaggccagaacttctccgccaagggcgctaagggttctgactcctacgtggttccggaaggcatcaccgctgccgttgaaggcaacgagatcgtcctgaccgccgctgatgacctgcgtccgacccgtgccaagcacggtctggcccgctccatcatggccggcatggtcaagggtgttcacgatggctactccaagactcttgagatcgtcggcaccggttaccgcgccgtcgccaagggcaagggcatcgagttcttcctcggctactcccacaccatcaccgtcaacccgcccgaaggcatcaccctgaaggtgaccgacgccaaccacgtggttgtcgaaggcaccgacaagcaggtcgtgggccaggttgccgccaacatccgcaagctgcgcgctccggaaccctacaagggcaagggcatcaagtatgccgatgaacgcatcctgcgcaaggctggaaaggctggtaagtgatatgagcgttgctattctcggaaaaggcaagaaggtagctctcaagcgccgtcacgcgcgtatccgcaagcgcatctccggtacccccgagcgtccgcgcctggtggtcacccgctccaaccgtcacatggttgctcaggtggtcgacgataccaagggtattaccttggtgtccgcctccacccttcaggccgacttcgccggtttcgaaggcaccaagactgaggccgccaagaaggtcggcgagctgatcgccgagaaggccaaggctgccggcatcaccgcagtcgtgttcgaccgcggtggcaacaagtacaccggtcgcgtcgcagccgttgctgatggcgcccgcgagggaggtcttgcactgtgagcgacaacgaaacgaaggaaacccaagtggctgaagaaactcagaacactgtggcgaccgaatccaacaacgaggaccgcaagggtcgtcgtggccagcgcggtgaaggccgtcgcggcgagcgtcgtaaccgtcgtgaagaaaaccacggcgacgagctgctcgatcgcgtggtgaccatcaaccgtgtgtccaagacccacaagggtggccgtaccttcagcttcgctgcactggttgtggtcggcgacggcaacggcaccgtgggtgtcggctacggcaagtcccgtgaagtcccggccgccatcgccaagggccagctggacgccaagaagcacatgttctctgtgcctcgcgtccgcggcaccatcacccacccggttcagggtcacgacgctgctggcaccgtcctgctgcgtccggctgccccgggtaccggtgtaatcgccggtggctccgtgcgcgccgtcatggaatgcgcaggcatcaccgacgtcctgaccaagtcgatgggctccgccaccgccgttaatgtggtgcgcgctaccgtcgacgccctcaagcagctcgaagagcccgaggagatcgccgcccgtcgtggcctggcgctcgacgaggttgctcccgatgctctgctgcgcgcccgtgccgccggcattgccgaggctcgcaaggctcgcgaagaggctgctgccgctaaggccgccgaagagaaggatggtgagtgatactcatggctaagaacctgaagattaccctgcaccacggcatcgtgaaccgtaccccggctcagcgcgccaccgtcaagaccctcggcctcaacaagatcggtaagaccgttgtccgcgaggacaccccggccaaccgtggtctggtgaacgccgtgcgtcacctggtcaccgttgaggaggttgactgattatggcagataacgaaatcctgcagatgcacgacctgaagcccgccccgggcgccaagaaggaccgcacccgtgtgggccgcggtgaaggctccaagggtaagacctccggtcgtggcgccaagggccagacgaagcgtaaccacgtgcgtccgggctttgaaggcggccagctgccgctgtacatgcgcctgccgaagcttcgtggcttcaagaacccgttcaaggtcgagttccaggtcatcaacatcgctcgtctcgtggagctcttccccgagggtggcgaggttgctgtggccgacctgatcgccaagggcgctgttcgtgacaacgctccggtgaaggttctgggcgacggcgagaccaccgtggctttcaccctcaagggtgttaaggcttcggcttccgccaagtccaagatcgaggccgccggcggttccgtttccgaggactgattagtcctacggggagcgcaataggctgtacaacccccgcccgccaataggtggacgggggttcccttttctcaaaaattgttgttctgagcgcagagaagcagtctcaacacaatgatcgttttgagtatgcttcccccgttcagtacgacggagcataattcaggtaacattcgcgagacatgaagtggccgaagtaggcactgtagactatgctcattcgttagtttgtgtatttcgcgtgattggcgcgctattgggaggaaatctaggtgaggacactaatccaggccctgaagaccaaagagttgaggaagaagattctcttcgtcctgttcatcatcatcgtctaccgcatcggttcgtttattccgacccctggcgtggactacaacgtggtgaacaagtgcatggccactatcggcagcgcctcccaggagaacttcatcggactggtgaacctcttctccggtggcgctatgctccagctgtctatcttcgcgctgggcgtcatgccgtacatcaccgcgtccatcgtggtgcagctgctgcgcgtggtcatcccccgcttcgaggccctgcacaaggagggccagtccggcgaggccaagctcacccagtacacgcgttacctgaccatcggcctagccgtgctccagtccaccaccatcctggtgaccgcccgctccggcgccctgttcaactaccgctgcgaccaggtcatcccggacggctccgtgtggaacctcgtggtcatggtcctcatcatgaccggcggcaccggtctgatcatgtggatggccgagctcgtgaccgacaagggcatcggccagggcatgtccatcctgatcttcatgtccatctgctccggcttcctgccgcagctgtgggagatcggctacggcaccaacggcaagaacggcgac

SEQ ID NO: 2594 - DNA, 68646 bp, Unknown
  R222_15m  MAG No. k141_9987
cccggaagctaaggcctggcacggcgatggtactgcacccgacagggtgtgggagagtagcacgccgccgcaccacacgacaaggacccccggacgaggcaaacaacccccgggggcccacccatacccaaacacaacaacagtcgttgcaacagaagaattcctgtcctagactgtggtgttgctatgcattacttcactccgaaacgctgttccacctcgaacaagatcatgtaccatgacaaggcccaggcgcagcatgccgccgaccagagccttatcgaacgcggagcggagctgtgggtgtatcggtgcgaatattgcggcacctggcatctgacgcatcgtgatcccgctcatgagcacgcgtatgtccccctgaaccagcagataaaaccgcacagccgcaagaagggctacaagccgcggtggcgttgatgctcttctcctgtcattcgccgaataggcgaatccgcgagggccgaacaacacgagtcagataacacaatgggcggtggtcggaacctgatatcgggttccgaccaccgcccattatcgtttgggggtcatttaccggtcgagacggaatccctgcgatgtggcgttcggtatcacctgatgcgtggcgtccatgcgctgggctgcaatcgaggcgatctgatcgctgaatgcgtcaacgggacgatcggtgttgcgcagatcgtagtactcatgcactgaaacgtcaaaggcgccgatacgctccttgatggattcagtggcgtcatcatccgacggatacacgtcatcgaagaactgcagctcgcgaggcatgcgaggcttgagcgcgggagcctgatcgggcttgccgatcgccaatcccagcacaggatacgtgtactggggcaggtgcagcgcttcgatcagaccgggaacatcattgagcagggaaccgaggatgacgcatcccaggccgagcgaataggcggcggtctccatcgcatgcaaagcccgaaccgcatcgttctgggcctgagagaaccggtagctaccggcgagaccgtaggtgtccgaatccgtggacacgcccttcgactcggcgataatcgcattgcggtgctcgtccgcgacgaacacatacagcagcggtgcttcggcgatatacggctgcctgccgatctcggacatgcgcttcttaagcgccggatccttgacacggacagccgaccagtcgttcagatactggctggaagcggcgtgctgggccacggtctccagcgtggcgacggtatcatcgtcgaagggctcggcaacgaatttgcggatggacctgcgattgagcagcgtctcgatagtgctgttggtaaccatgctgtcattgtcgcaaagagacgccccaagagccacccatttgcgctgacggggaacacgtcggtaatgctggcgccccaaaacgtctttaagtgcgcgccgaaacgacgaccgtgcgcacttaaggacgcaaacagggccatttgcgtccctatgttcgcgcacttgtcgtttcggcgcgcacttaaagacgcaaaacgggctgatgcgcatagaagatgcacggcgacaatgcgctggacgacgccaagcgattatcagtcggattggcgacggtgacggcgagcgacgagggctttggagccgcgatcggagagttgcgagaccacggctcccacggcggcggacaatgcggcgaacaggatgctcatgaacaggctctcctgctggtccacgactccgtcccccagctcgcccgtgccatcggatggacgcttgcgggcgacgaacttgttccacaccagagtgaacagcttgccggccacgaaccccgcgatggacggcagcgcgaatttgacggccttatcgccgagggagtcggggtcgtttagacgctgattacgcatggcatccactttctcgttgattcgggcgaagccttcgatgatccgatcggtgcttgaaccgtcgaggcccgatccgccgttgcccggtccatcctgaaattctgtcatgtcaccattattttgcgaggtggagacgcatcgcatataggcctcggcatgcgaatatgctgcaggttgagtacagtactgcatatgactcaaacgacaggtggcaacgcggctacggcagggcgactggttctgctccgacacgggcagactgtgtggagtgagtccgggcagcataccgggcgcaccgatattcctcttaccgccgaaggcgagcgacaggcccgcgatgccggcacccggattcagacggcgtttccgcagggattcggcgagaactgcgtgtacgccagcccgctgaagagggcccagcagacggcaagcctcgccgggttcgctccgcgtacgctgccggcgctcgcggaatgggattacggccgggcggagggccgtacccgtcagaccatcgcgcaattgcacggcggctcttgggagctatggaatgatggccccgatgcgctgagccccacaatggaaggtgactggacggagacgctgccggacggcgagcaggttcccgtgcataacgggccgggcgagtcgctgagcgacgtctatgaccgtgtgcagcaggccatcgatcaggcggtgccgctgatggagagcggccattccgtgctgttcgtcgcgcacgcgcatgtgctgcgcatccttacggcacgttggctgggggtcgacccgcatttcgcgcgtctgctgcgtctggataccgctcattattcgattctgtccgtatacaagggggaccgtgtcatcgagcgctggaactgctgacgtcgtggtgccgggaacagcaacggtgcaatcgttgacattctgaattcgccttgatatctgccctgccgggttcaatccggcggggcattgttgttggtgtctatggcatggggcaggtatatgcgtgctcgcgacacgcttgccatatagcgcgaacgcatggatggccgttcctcggtgcaaagaacaatcacgcgtcggctccgtcgcgttggtggccgtcgccggcgaatgccgcggacgcctcgcagctcgccaatggcgcgctctgcgccccgtccgaccagaaattcggtgaagagcgggacaccgcagacccggacaaaggcatcgccacctacgtgggaggcgacatgtacgtcggtaggaacccctccaccggcgtcgacgccgaaggtaacatcaccctgagctcctcgaacgcacccgacggctcatacgccgccggagccgaaggcctcaccgtcatcaacggcaaactggcgatgaaccccatcaaaagcttgctgtggaacgccgccgcgaccgaaagcaatcacaacgtcaacggcggcggtggtcgcagaggccccgtatgacaagatcgtgaccggccgatggtgggattggagcgtgatgaatcccatattcggacttctgatcgcgctggtggtctgcgccctggcggtctgaaacgggcggcggtctgaaacgggttcagtccgtgtacagggcgtctgactcgcgcagcaccagggtcggttgcacgatttcatgcggcttctcgggttcctctccgttgatgagcttgattgccttctgggcggccgcacgtcccatcttgaacgggtcctgtttcatggtggtgaggttgacggtgctggcataggggctgtcgtcgaagccgatgatcgagtagtcgcgtggcgtgcggtgtccgtagcgttcgagcttgagcatcagcggaatcgccatcatgtccatctggcagcagatggcgtcggggaactcgtccagcgcgagcagcgccgacagcgccgaatcggcgaacgcgcgtccgcgcggcacggtgaccacctgccagttgagttcgcgcgtcttctcgacgttttcgcaggcgcggatgaatccgcggccgcgggcgtcgatcgaggagtccatggactcggacgccgccgagcaggcatacacgatgtgcttgtggccgaggttgagcagatgctgggtggccgtgtacatgccgttttcgtcgtcgatactgatggaggcgtcgaatccgtcgatggacggtgtgttgatgccgatgatcggcacgcggatgcgcttgagctgttcgacctctttctcgtcgatggcgaaggacgccacgaacaccgcgtcgacgttgcgtcgcactggcaggtcggtgaagaacttgcggcgcatgtcggcggtgtcgatgtgctggaagacggagatgtcatagccagcgtcgtgcatgatcgagttgatgccggcgaagatctgggtgttgaaccagctggtgatctcctcgttcatgagcagcgccacacggaacgtctgcccggatttcagggccgcggccgagcgggagatgttgaagtcgagccggtccgcggcctgcagcaccttgtgccgtgtcttctccgacacgacttcggggtgggcgaatgcgcgggatacggtggatatggagacccctgccgcttttgccacttcgcgtattcctgctttatccatgtagacaactcctttgctgtgtgttgaattccccatcgtgccgtgactgccgacatcatatttgtttcattatactgcaaacgttctcaaagagaaagggacgtgtgtaaggctctttgaaaatgaaaaccgttctctcggttacggaaaatgaccgcggaagttcacgttacgttcggatactcgtcgcgtgacggttgaatggccgacatagtttgctcggtgagggccgcgaggccttccggcgctgccgagagaggcttgctgtgcccgacggcgccggtgattgaccgccggggcatgcccggcttcgtgattggaagaagagatccatgaacatcaacaaaatgctcaaaggcgccgtcgcggcgttgacctcagctgcggccctgggcgcgctgaccgctccggcgttcgccgcgagcggcacctacgatctgaacggcaagggcgtggacgccctgtcggtgcacggcggcgcccagcgcatcgccacaatcggcaacgcgaaggcgaagaacgtcatcctgttcatcggcgacggcatgggagattccgagatcaccgtcgcacgcaactacctgcacggcgtcaacggcacgttccagggcctcgacaagatcggccagccgggcgcactccagacctcgaccggcaaggccgccgaaagcggcgtcggccagtacaccacgttctcgctgggcggcagctccaacgattcgctgatggccaaggattccaagggccagctcaccggttccaagaccgccggcgtgatcaccccggtcaccgactcctccgcctccggctccggctgggcgaccggcaccaagacctacaacaacgccgtgtccgtggacgtcaagggcaacccgcagctcaacctcattgagctcgccaaggccaacggcctcgccaccggcaacgtgaccacctccgagatccaggatgccactccggcggtccaggaatcccactcctccgagcgcgcctgctacggcccgcagggcaagtgggacggcaccgacaagaacggcgacggcaaggtcgatatcaaagacgccgagctcgccggcatcggcaggtgcctcgccgaccagctcaaggccaacggtggcatcggctccatctccgagcagctgctcgatacacgcgccgatgtgaccatcggcggcggcgccaagtacttcaaccagctcgacgagaacggcaacaccctgtggcagcaggccgctgaccgcggtttccagaccgtcaagagcggtgacgtcgacggcttcaagaacctgacctacaaggatggccagccggtgctcgccctgctcggcgacggcaacctgccgacccagttcaacccgtctgtggccaccaagcaggacgccgccaaggacgagaacccaaccgtgtgcaccaccaacgccaagtggctcggcaatcagggcgcgtccctcgccgacttcaccgacaaggcgctcgacctgctgcaggccaacccgaagtccgagaagggcttcttcctgcaggtcgaaggcgcttccatcgacaagcaggaccacaacgccaacgcctgcggccagatcggcgagaccgatgaccttgacaaggccatctccgccgccctcaagaaggtcgacctgagcgacaccctcatcatcgtgaccgccgaccacgcccacacctcgcagatcgtcgaatcccagccgtactacgcgctgagcaccgtgctgaagaacgccgacggctccaagaccaccatctcctacggcacctccgagaagaacctgtactccgacggccaagacaccgaaggcgcggccgattccagcaaggcccagggcaacatgagccacaccggcacccagctgcgcatcgccgcatcgggtcccggtgcgtcccgcgtggatggcctgaccgaccagaccgataacttctacacgatcgccggcgcccttggcctggcgaccgacaccacgtcgcagaacaacctgtccaacggcggcaaggtcaccgtgaacaaggacaaggacggcaagtacagcgcggccgtcaccggcttcaacggtgacgcggtgctgtcgtaccagctggtcgacaacgcctccaagaaggtcgtcgccgagtccaacacgtccaccccgctctccggcgtgcgcgtcgccaccgcggccaccacctcgatctcgttcgccgacttcactccggccgagggcgcgtcctacacgctgacggtgaacggccgccagtccggcaagtccgcctccgtgagcttcccgtccgcctcaggctccgccgacaagacgccgaacggcggcaacggcagcggcactgtcgctcagggcaccgtcaaggagccaaccgctcctctgggcaagaccggcgcgaccgtgctcggcctggcgctgatggtgctcgctctgggcgccggcgcgatggtcgtgcgctccgtcaaggcgggtcgccgctgagctgacgctcgccgcgattcgtgacgtcgcctagggcgactgatacgccagccggctgcaacctgtgatggttgcggccggctctttgcatttgggtgctctcaaactcgcagatacggcggctttttcgctaagaaatcggtgtatctgcgagttttgagagcggacttgagtgatatcgactcaagtttttgtgaagaagtgggaataaaagctggtgctcgaaagttgagtggtgtaggctcaagttttggaaggcaaaacgagggcaaccttgaggcgaagacccgtgggcgtcgatcgagcaccgatggacgcggggccaagacttgagcaagcaaacgtaaacgaacaagatatttaaggagcacacattatggcacgtgcagttggtattgatctgggtactacgaattcctgcatcgcgacccttgaaggtggcgaacccaccgtcatcgtgaacgccgaaggcgcgcgcaccacgccgtccgtggtggcgttcagtaagtccggcgagatcctggtcggcgaggtcgccaagcgtcaggccgtgaccaacgtcgatcgcaccatcagctccgtgaagcgtcacatgggcaccgactggaccgtcgagatcgacggcaagaagtggacgcctcaggagatctccgcgcagatcctgatgaagctgaagagggacgccgaggcgtacctcggcgagcccgtcaccgatgccgtcatcacctgcccggcatacttcaacgacgcccagcgtcaggccaccaaggacgccggcaagatcgcaggcctgaacgtcctgcgcatcatcaacgagccgaccgcggccgcgctggcctacggtcttgagaagggcaaggaagacgagcgcatcctggtcttcgacctcggcggcggcaccttcgatgtgtccctgctggagatcggtaaggacgacgacggcttctccaccattcaggtgaaggccaccaacggcgacaaccacctgggcggcgacgactgggatcagaaggtcatcgactggctcgtcggcgaggtcaagaacaagtacggcgtcgacctgtccaaggacaagatcgcgctgcagcgtctgaaggaagccgcggagcaggcgaagaaggaactgtcttcatccacttcgacctccatcaacatgcagtacctggccatgacgcctgacggcaccccggtgcacctggacgagaccctgacccgtgcgcacttcgaggaaatgacctccgacctgctgggccgctgccgcacgccgttcaacaacgtgctgcgcgatgccaacatctccgtgagcgacatcgaccacgtggtgctggtcggtggctccacccgtatgccggccgtcaaggagctcgtcaaggagcttaccggcggcaaggaagcgaaccagtccgtgaacccggatgaggtagtggccgtcggcgccgctgtgcagtccggcgtcatcaagggcgaccgcaaggacgtcctgctgatcgacgtgaccccgctgagcctcggcatcgagaccaagggcggcatcatgaccaagctcatcgaccgcaacaccgccattccgaccaagcgctccgaggtgttctccaccgcggaagacaaccagccgtccgtgctgattcaggtctaccagggcgagcgtgagttcgctcgcgacaacaagccgctgggcaccttcgagctgaccggcatcgcgccggctccgcgtggcatcccgcagatcgaggtcaccttcgacatcgacgccaacggcatcgtgcacgtgtccgctaaggacaagggcaccggcaaggagcagtccatgaccatcaccggtggctccggcctgccgaaggacgagatcgaccgcatggtcaaggaagccgaggctcacgaggctgaggacaagcagcgcaaggaagacgccgagacccgcaaccaggctgaggccttcgcctactccaccgagaagctcgtcaacgacaacaaggacaagctctccgacgacatcgtcaaggaagtcaccgacaaggtcaacgctctgaaggaagccctgaagggtgacgacaccgagaaggtcaagaccgctcagaccgagctgatgaccgccgctcagaagatcggccaggtcctctacgcccagcagggtgccgagggtgccgcggccggtgccggtgcggctggcgctgccggcgccggcgcttccgctggctccgcctccggttccgacgacgacaccgtcgaggccgaggtcgtggacgacgatgacgacaaggacaacaagtgatgtccgagttcaacaaggacgactacctgaacgacctgccggatccctcagatgctgaggctgccggccaggccgctcaggcctcttcaggggctgacgcctccgccgagtccgactctgcgcaggattcggctgcccaggctccttccaatgaaggagccgacgcggctcctgccgcagctgagggagagaagtcggatgccggagagaagactggcgaaggccagtccgattccgaagacaccctcacccccctcggcaaggccaagaaggaagccgcagactacctcgaagccctgcaacgcgaacgtgcggagttcatcaactaccgcaatcgcacgcagaaggagcaggagcgcttccgccagcacggcatcatcgacgtgctgaccgcgctgctgcccgccctcgacgacatcgaccgcattcgcgaacacagcgagatggacgactcgttcaaggccgttgccgccaagatcgacaaggctttcgagaagttcggcgtcgagaagttcggcgaaaagggcgaggacttcgaccccaccaagcatgaggcaatcctgcacaagccggatgccgatgccgacaaggaaaccgtcgacaccgtggtggaagccggctaccgtatcggcgaccgcgtaatccgcgccgcccgagtagtagtagcctccccgcaaaactgataacggccagctcgttaacgagctgacattaccttggctcccgctggcgggagctggcagccgaaggctgactgagggtggtcaaacactgaatataaaccaccctcagtctcgcttcgttcgacagctcccgccaacgggagccaaccataaagacttttcaagaaaggagacatgaatggctgaaaacgaatggctcagtaaagacttctacaaagtccttggtgtctccagggacgcttcggacgacgacatcaaaaaggcgtaccgcaagctcgcccgcaagtaccaccctgacgtcaacaagaccaaggaagccgaggagaagttcaaggacatctccgaagcctacgacgtgctgagcaagaaggaagatcgccaaaagtacgacgcgattcgccagttcggcatgggcggcgcccgcttcgcaggcggttccggcgccggcggcttcgatgcttccggtttctctgatatcttcggctccatgtttggccagggtgccggtggcaacggttcgcgtatccgcttctccacttcgggcggcggccccaacaacatcaacgacatcttctcgatgttcggcggtgctgcaggtcagggcggccagtcgtatggcggctacggccaatcgccgtacggcaatgccggcggctatggctatgaggaggccccgcgccccgaaaacggcgaggaccgcaactccaagatcagcctgaccctgcgtcaggcggtcaagggcgctaccgtgtccctgtccgtggacggcaagaagttcaaggcccacgtgcctgcgggcgtcaaggacggccagaaaatcaagcttgccggcaagggcaagccgggcatcaacggcggcaaggccggcgatttgtacctgcacgtcaccgtcaagcccgatgccgcgttctcgatgcgcggccacgacatcgtcatggacctgcccgtaactgtgggccaggccgtggccggtggcaaggtcgaggccaaggatatcgacggcaatcccgtcaccttcaaggtgccggcaggctccagctccggtgccgaggtcaagctcgcgggacttggcgtccagcgcggcaaccagccgggcgacctgatcggccgcgtgcagatcatggtccccgccaagccgggtctggccgtcaagcacgccgccaaagaattcgacgaaaaagccggcgactatctcagcctgtaatcaggaggtgaacaatggcgcggttagccaaccaaatgaagcagttgtacgcgatgtgcgcaaccgcgctggtgatgggcagggccgatctcgacggagccgatgacgtcggcttcgacatcgaactgcccatcttcaccgtcggccaggcagccgaactgggcaacatccacccccagaccctccgccagtacgaccggctgggtctggtccgtccgcagcgcaccgatggcggcgcacgccgctactgcctgcgcgacatcgcccgcctgactcgagctcagcgcctaagtcaggatgagggcatcaatctttccggcatcgcacgcattttggccctcgaagaagagaatcgccaactgcgccgcgaagtcaaacgcatgcaaaccggcgaccaggagagcgttttcgccgcaggccgtgacggcaatatcgtggaggtacaacgctccaaccgcgcccgcctctggcgcaacgccatccgccgcgaaacccgcgaactgcccggccgcgataccgctgctgacaccacgcgcgaatccgactccacccccgccgattccaaatccatggtcctgtggggttggtgatttgctgttcggctgtcgtgcggagttggtgagataggtatatcgaatacgaatagttgaggattcactgcgacgtacggaggtaaccatgctgctcaaggccgtgttttgggatttggacggaacgcttatcgattcggagccgctttggcatgacggtgaaatcgagatcgcgcacaacaatggcggcgagtggaacgaggacctcggttgggagtgctccggcactccggtgccacacgtggcagaggtcatgattgcgcatggctgcacattgagcgttcccgaaatcgacaaacagctcaaggattatgtgttcaaggcggaggtcgaacgtctgccgtggattcccggcgtattggacgtgctgcactcgctcaaggaggccggcattccgtccatgctggtcaccacgtcgccgcgccgtatggcggagaacatcatgaagcagtccgagggactgttcgccggctacgtctgtggcgacgatccgtacgaacacaagccgaaccctgcgccctatctggccgcagccgacaagcttggcatcgcccgtgaagacatggccaagtgcgtggtgctcgaggattcctcggttggacttcaggccggtgcggcatcgggcgcgactctgatcgcgcagaccggctggattcgcacggatacttccggcctgggccagttcgcgtccatcgaatcgtatgacggtatcgatgcggccgcgctggacggtttcgtgcgccagcgtcttggtgagtaattgattacatcaccgcgcatgcagttctcctcatgagcggtggaatgtgttgacgatataccagcgaagcacgccatatttgtaaagaagatggcagtaatggctgctatgaggttccggtggccccctcttgtatcggggcgactggtagagtggttgacggttttcagacgaatgtctggttattggacagattgttcacacatatagacgtataggactcataggaatcacatgggcttcgttaatttcatcctcgaactgctgaaggatccgcgtgccgcgattgccggttggattgccatgggcgtggcgccgaccctcggcttcatcttcctcatcgtatttatcgaaacgggtgtggtgttcttcccattcctgccgggcgactccctgctgttcgccgccggtgtgttcgccgctcccgatgccgcgaccggcaaggccgcgctgccgctgttctggctgctgccggtggtctggtgcgccccgattatcggcgaccagtgcaattacttcattggtcatttcttcggccgtcgcatcatccagtccggcaaggtgaaggccttgaccccggagcgtttggccaaaaccgagcacatgattgagaagtggggcccgctggccgtgttcctgggccgtttcttcccgttcattcgtacgttcatgccgttcatctccggtatttccggtatgcgttggagccgtttcacgccgttctcagtgctcggcggcctgtgctggtccacgttgttcacgctgctgggctacttcttcggtaacattccggcagtacaggaccacttcgagctggtgatcgtgctgattctgctggtctcgctcgccccgaccatcatcggtctgctcaaggccaagttcggcaagaagaagccggccaaggtgaccgatgctcagttggatgctatggaagacggcattaagaacctcgataagtaagcaagaaatgtagattaccgcataaggaatcgtcgtgaaaatgaaggccctgactgtgcatgtgaggtcagggccttttctgcatgagatgggcgtgaaacagcagcgtggttatccacatttgtcgtggacgacatgccggggtgtggataactcagcaagctagaaccacaatggtcgattcgtgttgagcattgaactcggacacgtttcaatcggcttatgaatagcaacaccacaccccgcgtggcgcgtaggatcacctcgccagcggtagcacctccgggcattccgctgcccacggacgatgcgccaattccagcgtatcgctactacactccgccgcccaggccgttggcctcatgcgaacggcagagatcgggcgaggctccggcactcgccctaactacagacaccagcttccataacattgtaacgatgacgtcaggtcatggaggcgtggggttgagtgtcatggcttccatgcttgcatggacattggcgagacgtgaacacagctgcgttctcatagacgctgatttcgtggccggatgccttgacctgctgcttggtgtagaacaagagccgggcttgcggttcagccaagtcgacgcgcccctcggccgtatcgagggtgaggcgatgaaccatgagctgatgatgtgggagggtgtgcgagtacttccctatgacccttggagcgcgcgccagcctgactggtgggaagttcaagcggccattcgggctttggcggaaacgaacgacgttgtcatcgtagatgccggtcagggtggactcattgagaccgtacccgatctgcgcagtggcctgcaggtgattgccgcggaattgtcggtaatggggctggccagagccaagtcgcaccggtccagattggattcatggggctgtgaagcgccacatatcgtaggtgtggaaccacgtggcgctccacgtgggagaggccacgtgggtattggcgaggcgcaggactatttgactgccacggtattggggcccatcaagccaagtgtcaatctgtgcggagacgtactggaaggcctcggcatcagatcggtgaccaaaggcagtcgcaaagccatgaacttgcttgccgatctcgtagaacaggccattcgcccggtttcgggagcttctcacaaggaccagtgatgctatggctgccgtcagcacgcgagccaatgaggctggcacagcgctcagaaccatattcttcggtctgctggatgacgtggcatctgacccgcaggttaccgatttggcggtgacctgtgatggccgcgtttgggcggaccgcggcaatggcatgcgcgaaacagtattgcatgtgccgttccgctcgccgcaagtagttcgagaatacgccgtccaactgtgcgcgcagctcgggcgcagactggatgatgcctgcccgatagcggatgccgccagtccggatggcatccgcgtgcatgcggtgattgccccattggtgccacaaggtgccgcgatttccatacgattccctgaccgaaccatggcatcgctacagcacctgagcaaattaggcgtattcccggctgcttggctgccgacgttcgtgggattggtgcgcaaacatgccacagtgctgattaccggcggaacaggcgtgggcaagaccaccttgctcaaggcgctgctggcgcaatgcgacgtgaacgagcgcatcgtcaccgtagaggaagttcgtgaactgggggaactgggacgcgacgatcatgtctcgttggtaacacgcgaggcgaatgtggagggcgtcggagccataagcctggcggacttggtcaaagcgacgttgcgaatgcgccccgaccgcgtggtgctgggcgaatgccgtggcgcggaaatcgtcgacctattgcgcgcgttcaattctggtcatcacggtggcatgaccaccgtgcatgcggacggcgtgaaccgagtaccgtccaggctgatttcgcttggattactcgccggagtcagtccacaggcgttgaccatgctggcggcaggcgctttcgacgcggtggtgcatttggagcgagtgaacggacagcggcgtatcacgcagatcggcgaactgcgcgtagcacatggtgaactggcaggaacaccgctggcggtatggaatggctgccatcctcctcggtatgccgccgaatgggggcacttcattgaacgatggggcatcgttcccaggccgagtggtggtgggtgatgatgtggtgtgctgttctggtggcgctcgccgtgctgatatggccggggaacaagtccgggaggctgtaccggctggcttaccgcgggcgcgcggtcgattccgcagccataaacgaacctcgatatgccgactcacctcgcgtgggcgttgcgcaggtgattacgtccgccatcgcgcgattgcgaggtggcggcacattggttgaagcattcgaggaacaatccagcagacgcttcgccactcatcgcattactgtggaacggctcataacggtgttcgaacagcggcgtctgcccgacgaatcaccagcgcaggtacttgaagctgcacgcggggtcgccgccgcagcggttttgagcgatgagctcggttgccaagcggtgccatgtctggaagcggtattgactgcttaccggcagatgaggctgatgcagaacttgcgatcgcaagcatgtgccgttcctaaagccactgtggggctgctgagcgcacttccggccgtcactgtggcattgggcgagcttctgggagctagaccattggcgttcttgcttggatcgccacgcggtgtggtctgcttgacattgggaggatgttgttatgctgccggcttggcatggatgcgggcattgttgaaaggcagcggattatgagtacggtgtgggtacacgccgcggcaggctgtgcggcgattgctggttggctgtataaggctctgtctcgtcatgacagccgcttgccgggcgaggagccggccgtagcgcatgattgcgggtcgtcatggaccatactcatattgcgtatgttgcaggtgtccttgcgtcagggctcctcgattccccgggcgcttgacatggtgggcaaagccgtcggcggcgactgcggcgctcgcatgagcgaggtcgggaactccttgaccagaggggttccctgggctgatgcgtggcatgccgctatggctgttcagcatgagggtgcgccagctgatagtccatccaagggaaatacgaataccacgcaacgagatcttggcctgctgcaatcggctttggaatcgtcatggacgcatggcgatatgcctggtgtgcgcctcgaatccgccattgaacagctggaccgtgacgagcgtgctgctatcgaacggaatgccgcgaagctgtcggtaaagctactgatgcctacagggctatgttttctgccggcattcgtgctggtaggagtcattccggcgattgcgtccttcatgatgtgaatataggcgtgaactgagtgcgcttaggctgaatcttgttgtattgctcggtattgtacttggctgcgtttggttatccacatttgtggtggacgacacgtcgaggtgtggataactcggcaagctagaaccacataccccgtttttcctggtgcatgaagcgttgatagtccacagtggtatgcaccccgcgtcaacccggcgcgggggccaaccactcacatacgcatggggaaggtgcgaagccactgcgcagcttcccctccttaccgaaaggaacgccaatgaatacccctatccccgtcatcgtcgacgggcaggccggcatctttgcgcacagcaaggctcgtgtggccacgctgaacgccaaggcgaaagaacggctatgcctcatggacgcacgcatccgcgccctcatggctgagcccgaagaaggcgcagccactgcggaatacgcagtcgtactcgttgcggctacaggctttgcggcggtgctggtcgccatcctgaagtcggatgccatcaagacgttgctgaccaacatcatcaaacaggctctgaaagtcgggtgacagccatgaagaccatgagatgccggtggaggctcgccagactgccgccagacctatgcacgggatcggccaccgccgaattcgcgatcgtattgcccagcgttatcgccatcgccgggctgatactggcaatgggacgtgtggtcatcgtttccatggactgccaaggtgccgcgacggcggctgcacgcgagtttgtggttaccggtgacgaatcatccgcgcgcagcatagctgcggacgttgcagggggagatccccgcgtcagcattgcccacaacggccaatcgacgagcgtgatggtcgaatgttcggtactgcccggcccactggatgtcactccaacgcgggtcaccggcaacgctacggcgataagccaataactggtcggctgctggctgggcggccgcaatagaaaggaactgcggtgcagggaatgcgttatgaggagggatcgggcacgatggccggagccatgctggttatggcggtgggcattgcgctcgcggtggcggcaagtgtgggcaacctcatgatctgccagaatcgagcgcgttccctcgccgatctcatcgcctttgacgccgcgtatgcgctgtggcatgtggatatcggtgatccatgcgcgcttgctgcaaacatggctgaagcgaatggcgtcacgctgggctcctgctccgtgcgggatgaagacgtgttggtaaccatcaaggtggaaaccatggttccggtggcatcatccgtggagcggatggctcgggccggaccggtgaattgtacggaaggagacaattatcacaataatggaccgtaagcactgatgctctggcgggcttctggacctttggttaaggtgagagcatgagcgagagtgaacgcacagaacgccgtcgcgtggtggccatggtgggcaatcccacttccgataagggccgtggtgccaaggtggatgcgcgagtattgggactgctggaggacgccggccgtgcccataacttcgacgtcatcgacatcaccggcgtaagtttcgacgattccctgaaccaggcgcgtgaacgcgcgcacgagtacgactatctggtggtggtcggcggcgacggcatgatcgcactcggtgccaatgccgtgggttgcggcggtaagccgctgggcatcgtggccatgggctcgggcaacgatttcgctcggggacttaagctgccggtcaatcgcatcgaaaccgcagtggaaggtatcgtcggcgctatcgtgcgcggatcacacattgatgtggacatgggacgcgtgacctctttggatggtggctatgccgtgaacccatccaccggcggggaatacgagtaccgggagaacaagtctgccgagcacccgattgaccggtactatgcgggcatgctgtcctgtggtcttgacgcaagtatcaacgaccgtgcgaatcattcgcatctgccgaccggcaccatgcgctattttgcggcggtgctggtggagctgacgcatatgaagcgttatgggtaccacgtcaaggccacgctggcggacggtaccacggatgaacgagacatcatcacgccgttgctgacgattgcgaattcgcgtcatatcggtggcggcatcgaggtctcaccgtactcctgcttctccgacgggctgttggacctggtgtggatgaatcatgtgccgaacttcggcgaatgtgcggtggccatctcgaacgcctataacggcaagctgctcgcctcaaaggtgttcgggtggaagcgcatacgcgagatcgaagtcacgcgagccgcagaaggcgacgagccaccggtgctgatggcggacggcgaatacatcgggcatctgccattcagggtagtggccgaggactgcgcgctacgcgtgctggtaccgccggccgtagccgcccgtgaggtggactcccgacaggaagtgctcgacgccatcgcccgagacggtcgcgaccccgtaaccggccagttcgcctgacctgattatattggctcccctcattaggctgagccgtaaagcaaacagcccagtgggatgtttgtaggtgagggttcgacgatagtcgaaccagaagaaagtcagccgtaggctgtccgcaattgcggacgagctggccgcgaagcggactgaggggagtgcgggagagcggtaccagagccaatggccgtcagacctcagacgacatagctttcgatatgcagcgtctgcgccatgacctctttgatggttcggtcgctgatgttcggatgcgagcgaaccagcgagataagccccacgattagcgtgaagaatgtctcatggacgttggtgattggcagaccatgcatctgctcgaaatcacgtacggtggtctgggcaatgtagtcggcaatacggtccgccgcgcggtcaatgaacttgatatacagttcggcgttgccatcttggatcatacggtttgagaaggggctctcgtcggcgattagggaacggagcacatgcacgatgtcgtctaatgccttgttcacgttgcctgtttcgcgcgcttggttccactgcttcaacgtggtgaggatttcgtcgatgacgtcatcgagtactgcgtcggctacggcttccttgtcttcgaagtagtggtagaacagcgaacgcgtcataccgacttcgcttgcgatgtcggaaacggtgattttggagaagcctttttccagacacaccttgcgcgcggcttgcacgatggcgtcgcgccgggcatcgccacgggtggggcgtttcttgtcgaggatatcgctcatgggtacctcctgactacaaccgttattgacactatgttaatacaaagaaagcggttaataacaataaaaatgcggtaaccgttgtcagatgaatgtcgttggaatataaagagttttcccgattcggcagctatgagcccggtttatcttgactttttatcggttaattctgagggcaaaggtaggttagtagctatggcacttgcactgtatcgtcgctatcgtccggacaccttcgaaggggtcatcggccaggaccaagtcacggtcccgctgatgcgcgccttggacgaaggcaagcttacgcatgcctatctgttctcagggccgcgaggatgcggtaaaaccagctccgcgcgtatcctggcccgttgcgtcaactgtgccaaagggccgacttcccacccctgcggcgaatgcgaaagctgcaaggacctggccaccggcggtccgggttccatcgacgtggtcgaaatcgatgcggcctcgcacaacggtgtggatgatgctcgagaattgcgagaacgcgctggtttcgcccctgcgcgcgatcgctataagattttcattctcgatgaggcccatatggtcacgcagcagggcttcaatgcgctgcttaaaatcgttgaagagccgcctgaacatgtgatgttcatcttcgccaccaccgaaccagacaaggtgatcggcaccatccgttcgcgcacccaccactatccgttccgtctggtgccgcaggaagtcatgggtccctacctggagacgatctgcgacaaggaaggcatcaagcccgagcccggtgtgctgaaactggcgatgcgcgccggtggcggctccatgcgagataccctgtctgtgcttgaccagctgatggttggttcggtcgaaggcgttatcacccatgatgccgctgtagccctgctcggcttcacgccggaggcgctgatcggtgaggcagtggatgcggtaatcaatcacaacggcgaagccctgtacggcgttatccagaaagtcgtggtcggcggattcgatccgagacgattcgtcgaagacctgctggctcgtgtgcgtgatctgctggtgcttacgttggccggggaccgtgcggaatccgtgctgtccgacacggctgaggccgaggatatggacgatctgcaccgccaagccaaggcgctgggactgggcgcactgaccgccatggcagacatcatcaacactacgttgggtgccatgaccggagccatttctccgcgtatgcgcttggaactgctggccgcacgattgttggccggcagtgaatcaggctttgcaacagccgctcccgcgccagcttcttctggcatgccgcctgcggctgcttcttcgacttcgactacgtcagccgcttccggtacgggtgccagtggttttgccggcgcatcgcgaggcgggtttgccggagtctcacatggtggattctccggtgctgcacgcaaccagcaagcagccgcgcctcagagcaccgcttcccatgaatccgctgtgggagacaatggccctgtcagcagcccagtcagcgaccggcccgcgggctctccgtctgcgcaacctgccgcagcaactgctgctgccaatgcctggggtgatcccgccacgtcgccggccgtcccggcccaaccggtgacctcgcctgcggcatcggataatcggtccatcgacgagaagtgggatgcagccgtcgccgctttgccggaaaccattcgtgaatatgtgtcacgagacaaggtgccgaccgtaaaattcggtcccaaccgtaagagtctgccttgcctgtcgatgacgttcgacaagtcgctgagccagcacgctttcgccttggccgtggacaacagcggtaagaaggcggcgtccgtggtgttggatgccgtgcgcaacgagttcggtgccaatgcggttattgcaccttctgcggtcgcggcgaatggcgagcgagtcgaatccgtcaaacgtatgagcccggagcaattggccaaggtcaagcagcagattgccatggccaaggccggattggccgcgtcgagtttgggcgcgggtctgggcattcatatggggagcgagccgaaagctccgaagccgactgcaacaggccaagccgaggatacggacgacagccatcgagccggccaatccagtgcatccacggcggcgaagagttggagtgacgatgacccttgggccaagccggccgtaagcaacgcttcaccgcaatctgcagacgggttcgcacctaacgagcccgctgctgcgcctgcgcccgaagagcatcacaagaagcatgttgcggttccggacatcagtgatggtgttgatccgtgggccgctccggctgctcctgttgcacccgctgcgtccgttgcgtccgctggacccactggacagtccacggggcagccagccaccgcagctcccgctacggcagttgccggcgcaagcgatgatccatggaatcagccgcaatctcaggctacggcctcgctggcactgcaaccggtcgaagccgacccgtggaaccagccatatcagcagtctcctcacgatgatccgtggaatcagccgcaggggaaccatgctcaggcggctccgcagccaggagacgacccgtggaatcagccgcagtcccagactccggcttcttcggttcctcagacagtgtcgggcaatatgtcgggcgatgacccgtggaaccagccccaatcggttccgcagccggctgccggcgatgacccgtggaatcaaccgcagcccgcacagccgacgccgaatgccgacccgtggaatagccagccgcagccgcaaccgcaagtcgcggccgaggacgacgaatactcgatgaacgaccagtcgctcggcgaggcgacggccatgaatcttgacgatctgaaaaagctattcgaggtcaaaaaagtcgagcaattcgcggcagatgatccgaagaaccccaagaacatccagcctgccaagaagcactcggatgaataatgaggacgaataacgaggaatacccatggcacttgcttatgacggcgcaatacagcgactgatcgacgctttcgggcggctgcccggcatcgggccgaagggcgcgcagcgtatcgccttctacatgctgtccgcgcccgaagatgaagcgcgcgatttggccgaggccatcgaggaggtcaaggccaagatccgcttctgtgatatttgcggcaacgtgtgcgaatccagcccctgcccggtatgcgccgacccgagacgcgaccgttcggtgatctgcgtggttgaagagcccaaggacgtgatgagcatcgagcgcacgcgcgaataccgcggcctataccatgtgctcggcggcgcaatcaacccaatggccaacgttggccctgccgacctgcgtattcccagtctgctcaaacgcttagaaggcgatgaggtcaaggaagtcattatggcgctcgacccgaatattgaaggcgaggccaccaccagctacttgacccagctattgcgacccgtaggtgtcaaggtcacccgacttgccagcggcctgccggtgggctccgacttggagtacgccgacgaaatcacgctgggcagggcgctggccggtcggcgtgaggcctaggccagcgtatcattggcgctttcgcccttgcggcgcatccacggccagaatgcgccgtggcggatgatgcgcgcggccttgtgccgtcgtgccaaccagataatgaacagtcctgccgccagtatgcccagaccaacaccaagggcgatattgcgcgcgtcaagcacgtcattcggctcgggggccggcatcggaattgccacgcggtgcccggagataagcagtcgatgcgtgttcacgccgtatggcgtacaggtcatcaaggtgacacggtcctcacccggcacaatcttgagcttcgacgtgtcatccggcaaaatcaccgaaatgcggtccactttgtagcccaaagtttcgcccatgacaaggtattcagttatggggttctgcggaaacctcgccggtttgctttcgtttgccggtaattgatagttaaccgctcgaatctcaaaggatggatgcggctgtctcaaagaaccaccggtgaaaacttgaatatttgctgaacaacgtaggccatacccgtgtccgcatgccggcgcggggtcgcggggtgaacgcgacagcccttataatcgttgcgtttgcgtagaatatcgaccaaacaaatccctaagagaagaacaaaggacagcagtggctctcatcgtgcagaagtacggcggctcgtcggtcgccgataccgattcgatcaaacgtgtggccaagcgcgttgtggagacggagaagaagggcaataaggtggccgtggtggtctccgccatgggcgataccaccgatgaccttatcgatcaggcgctgagcatcgactccaacccgcccgagcgcgagatggatatgctgatgactgcaggcgagcgaatttccatgagcctgctggccatggccattcacgccgaaggcagccgcgcccactccttcaccggtcagcaggccggcttcttcaccgacacccgttacggcgcggcccacatcaaggccgtgagaccggaccgcgtgaagaacgcgctctcattgggagacatcgccatcgttgccggcttccagggcatcaacgccaagggtgacgccaccacgctcggccgcggtggttcggacacgtccgccgtggcactcgctgtggcccttggtgccgacatctgcgagatttacaccgacgtggacggcatctttaccgccgatccgcgcatcgtgccttccgcccgccgtattccttccatcggctacgaagccattctggaaatggcctcctgcggctccaaggtgctggcactgcgctgcgtagagtacgctcagcgtttcaacatgccgttgcacgtgcgctcttcgttctcccgtcgccccggcacgctggttgtgcctgacggcattgacccgcgcacgctgccgaacctcgactgagcgcggctacagcgaacaataatcgtaagtaatttcaaccaagacaaggcaagacatgactgaagaagaagcgaaatccatgggcgacctgttccctgacctgggccccgaggcaccggtgatttccggcattgcccacgatcgttccgaggcgctggccaccgtgcgtggcgtgccgaacgagccgggtatggcagccaaggtgttcaccgagctggccaccgccgacgtgaacgtggacatgatcgtgcaggccggcgcatccgttggcactgcagacatctccttcaccgtgcccgaatcggccgtcaagcaggtgcagaacacgctgctcgacaagcaggaagtgctgggttaccactcctttgatgtgaacaccaacgtcggcaaggtagccgtggtgggtgttggcatgaagacccacgccggtctggctgccaagttcttccaggccctgagcgatgagggcatcaacgtgctgatgatctccacttccgagatccgtatcgccgcactcgtgccgctcgaccagctcaacgacgccgtcaaggcgctgcacactgcctacggtctcgatgccgatcagatcgaagccgtggtgtacggcggtactggccgctgagccgctgagccgcgaattccgcgcctaatacgatgaaagccctccttgcggagggcttttgcgattttaacgagattcaactacttcttagtgatgtagcctagagccttgagcatttcggcgcattcgagggcgccgccggctgcaccacgcagggtgttgtgggccagacccacgaacttccaatcgaagatggaatcctcacgcagacggccgatggaaacgcccatgccaccctcgtagtccacgtcgagcttgacctgcgggcggtcatcctcggtgaggtactggatgaagtgcttcggcgcgtgcggcagctccagctcggaagccttggacgtgtagttcaccagacggtcgataagctcttccttggtggccttcttgccgaagttcaggaacacggtggcggtgtgaccgttgagcacgggcacgcggatgcattgcgaagtgatcttgaggtcgccgtcgaacggcacgatctcgcccttttcggcgtccacatggccgaacaccttgagcggttccttctcggacttcgcttcttcaccagagatgaacgggatgatgttgcccaccatctcaggccaatccttgaaggtcttgcctgcgccggaaatcgcctgataggtgctcacaaccacctcacgcggctcgaattccttccatgcggccagtgccggcgtgtaggcctgaatcgagcagttcggcttgacggcgatgaaaccacgagtggtgcccaggcgcttgcgctggtgctcgatcacctcgaagtgctccgggttgatctccggcaccaccatcggcacgtccggggtccaacggtgagcgctgttgttggagaccaccggggtctcggtcttggcataacgctcttcaatggcgcgaatctggtccttcggcatgtttaccgcagagaacatgaaatcaacgccagaggccacggactcggcatcgtcgccatcgacgaccaccatgttcttgacgtattcgggcatcggggtttccatcttccaacggtctccgaccgcctcggcatacgtcttgccggcgctgtgcgcggaagcggcaagggtgaccacctcgaaccacgggtgattctcaagcagcgtgataaaacgctgaccgaccataccggtggcaccaaggatgccgaccttcaatttttcggacatgatgacctctatgacctctgggtttcgatgggttacttacgttcggacggccgtcatacgggtgaccgtaaaacaatgacattgtacgaaacgcgcggaacaacagtagcggtcttcccagatggtgactgcccgatgaagcgaaggtgatgttctacactggtagccatgtctatcgcatcagtagaggcccaaaaacagctcgaccgtatcgtggctctcggctacccggatgtggcggatatttccgccgccgcattccgctcgctggcccgacccctgatcggggcgctcgagcattccgatttgggatcgaacatcctgctggtgcccacgcgtgaactggtttcgcctgagtcgctgattgcacgaacctccatcaatcgcatggccggcttcaccaccatgccgccgcgtgacatcgccagcttcctgcctcaagacggcttcatgccgccggaaggcccgttctatctggtcgtcaatccgcacaccggcacgtgctatatcaatcgcgagccggatgtggcccgcaagcttatcgactccgatgagcgcctgccgctcaccctcgaggaaggcttggccatcgccacccagcacccggagtggctgctggaagagaacggcttcaatctgctcggctcacgctccgcggacggccgcgtgccgagcatctggatgagccagaacgcaccgcgactgggagctgtctggcccaattcccgccatacctggctgggcaacgcgtattgcacggcccgtcgcggggtgagtctgttccgttgactccgccagtgtgcgttttctctgtacaatgaaaggcatattgcatcatttcatcagagagaagacgcgataaactgtgataggtgcggtgctgccaatgacgataggtcccgtttctgcacggaatgcggtgctccgctggcaccgaaacttgccgtgggacacaatacggtcactgatgttccgcctgtgccgatgccacccgccggtcccattcccggcccccggtctcagctctagcctcggcccagcgtcgtctgcgcccgccactatcgcggtaccgcagacgccggtaccgggccataagcgtcgccaaggccgctgcggccgttaaagatatgggtgtgccgatttatgccaagcgagtagccgcaacatccaaggccgatacgaagaaagtcgtgtatacctacccggctgggggcagccagtggacgataatggtgcgatttatcttggtatcccggatccctcagtcgagggcatgccggccgacgttatcggtatggataaggatgaggcgaaaaccgcagtagaaaacgcatcgaacaacaagatcgaggttattctcgagccgcgattttccgccaagaaggattttggcaaaatcgtagcttccaattacatttttggtgcgccgtttgaggcgagcaatgaggaaaatgattataaaatattgcaaccgatacgtctgtactacggtgtgggagccgacaacactgaagatgtggtgaccaccggttcaggtagtgattatgatttcgacccgcacgcggattatgccagcactagcaagagtgacaggagtttgccgtatatctcggctgcgggcgaatggcgtgttacgggcacctattgcaaggatggtttcttacctggctcgggtggatgcatctcgctgatttcgaagggtcaagacggaatgaaatacgggtccggttacccgtatttggtgcgcaaaggcgatgagtccaatggcatatgggacgatcgggtcacactgtgcacgcccaccggagacattggcgggtgcattctgcactacaaggatggttcgattcccgataatgaaaccaatatgcgcaaccacttgttggccaaacagtggggcatgttcgagatgtaccgtggctacggatggccggtatgcgacggcacggtctaccgaggctatggggagacggaagggtgtgaccatggtcaatatgtgaggactgatgatatccctgatggtcagcaatccggtgccacctacgaaatggatgacttctacgtttacttcccggtgggatcgaagagcagcaaactcgaggattccgactatttctccaacaaggcgctggctgcggcgaacaaggcggggaagccagacaccgaccggccgttcttcatcatgcgcgaccccaagggatacaagaccacaagcgtcgaagcatacaagaacggcgagcaaaccaccaatccgttcgtacccggtataccgatgagcggtggatacaacccgctagtgaagatggatgtggctcccagcgccgatgcgtcgtctgaagactcggccattgccaatacgtcgcagtcgagtaagaagttcgttgccgcaggcctgtatctgccggtgtatcttgcctctcaaggcaacggcaatgcggaaggattggcaaatacgatgatgaccggcatggacaacagtgccggcaatcaggctgtcggggcccttggcggatggagtgctgtcaattcatggctgagttcccatgggtacagcggcaccagcttcaaccgtgatttcggtgatgtacaggccagcaatgctggatatgagaattacagtaccgctcgtgacgcggcccgcatgctggttgccgttgatgcggtcggtggcactggtctgatgaacactgatattgcttcggagggcgtggtgattccgagcggcatgaccgtgcatgcacatcgtggcatgggcatccagaacacgtggaattacttcgccatcgtggaggtgaatggcaacaaggccgcggtctctgtggtcacgcaaaaccaaggtcaggatcgtgccgctcagctgatgagccaagtgcttgcctcggtggatagcacgttgcgcaaatagtacaagcagtatttgcacatgcaactgtgtatacggaccacgccttttggttggcggctgagtggggactattccatcgcgtcatttcccagtagaatgaggctatagtgcgtcattcgaccagagagaagagcaatgatgatctgtaagaattgtggtgctgacaatgatgggggaagccggttctgcatgcactgtggtgcgccgctaaccgacgtgagtgctcctgctcctcaggcggcggccggcccgattccagtgccgctgccggacaatactatgacggtgcttgatcacccgccgctgcccggcccaaacgatgggaacgcctatgggcagcccggcgtgccgacatcgagcggtgtggcaggagcgccgaccgcaccgggagcaagtcatactgggtcgatcgcaccgggagcagtgccgcaggccgctccgggtgctcctgtcgctccgggcgcagccacgccgccgagcggcacaacgaccgcaaccgccacattgccgaatctttcgggcaagcgtggcccgaatacgctgattatcgcgctcgtggcggtgctgctggcgttgatcgtagccggtgtggctttattcctgacgtatcgtgccgaggtgtggggtggtaagtcgctgcctgatccggcgtccatcgcctccagcgtcaccgataagaacggcaagaaggcatcggtggtcaaggccaaggatgtgaccgaggcgttgaaggccaagggcctgaacgcgaagacggttccggtgttctccggcgaggatcgcggtgtgttcctcggctacgagggcacgaatcctggcgctcgcgtcaaggccggttccacggtggtggtgcaggagtcggccggtcccggtgtgccgaagggcacggtcggcaaggatgtgaacaaggtgacgaacacgttcgcgaatatgggcgtgccgattcactataagaaggttgtgatttcgccggacagcaagactccggaagggcaggtcagcgtcacgtacccggctcccggtgcagggctcaccgatgacgagaagggcaacggcatttacattggcgtgacctccaagggcgatggtatcccggtggatattcttggtgcggacaagaacaaggccgtcagcgacttggagtcgcaaggctacagtgtggatttggaaccgcattactcgtcagagaaatacgtgggcaagatttccggctcgtacccggctccgggatccacgttgagttccggccagtcggtgaccttgtattacggcatcgataagtccagcaacatggacgtgctgagcaaaaccaactcgtatgacaacatcaagatggccagcatccacgcgtccgcaatgatcggtatgtactgcaagagcgaggtgacggatgccgccaaggactgcatcacactggagcaatcctcgatgaatccctttggctccacttcatccgaggattatcagtacctgcaaatcaaaggccatgagcctgaagacaaggccgatgtgttgggcctgaccaacttctctcaggacatcagcggcgcgatgctggaagcggattcggaatacggcatggccgcggacaaattgccgatgaaaaaccatctgctgttgaaagactggggtatgttcgagctgtacgcgggcatgggtctgccgaactgcggctcaaaggtgatgtccgcttcgataggcgagtactgcgtgaacggcaactatgaacgggcgtcgttcgacgatggcgaaatgacgccaccggccggggctgagaacgggtcgaccggcatgacctacgacatgaaggacttcctggtctacttcccggccggttccgatgccaagtcattggatgattccggttacttcgacgccgccgaactggcgaaggccaagaagcagaaggccgtggataccagccgcccgtacgttctggttcgtgacaagagcctgtacagcgagatcagtgtgagcgccagccggggcaaggacgtggacccgtttgtgccgaccaacagcagtatcaataactatcagaacgcgctggtgccgatgaggccggctcccagcgattcgaccgtctactatctggtggagcagaacggcgatctcgactgggattccctgccggacgccgaggtcaagggcactggcgataaggccgcttccggtgagacgaccggtgacaagtccaaggacagcggcaaacgagacgccacattcaaagaggccatgaaacaggcggcaggtaactatagtttcggttccggtgtcggcgcatggggaaccgtaatgaaagtcaataaggatggcaccttctcaggctcctaccatgactcggatatgggggccacgggagacggctatctcataggaaacgacgtcgatacgctgaacggcaaggcattgctcaacgtgacgagcggagcggataagggatacacgttctacgatttctcgtagtgattcagctgccgtgcggagcggcggggaacgtgaaggaccggcgcgtatgctgtgcgaaacagcattacgtccctagactggtgaggcatgacgaacctgcgattccgcgaagacggcagcttccgcgtgctgcaaatggccgacatccaagacggccccaacgtgctccccgataccatccgccttatccgtgaagccattcgcaaagccgacccggatctggtggtgttcaccggcgaccagatccgcggttacgatcctgcctacatcgacactttcctgcgccgccgtggcgaggaaccgggcgctcgcgtgcgtgcggtcaccgaggtcgaggccaagctgcgcggaatcaagcggcgggccagagaccgcgtgaacaatcgtctgctggccatgaagtccgacggcagcgattccgacgcccaacaaaccgcgtccaccgcgtccacgctggtctactccacaacatccgatccacaggatgtgccgacgactttggacgagctcatggacgagacccgtgacaaagtccgccgcacgtttgccggcttccttggcccggtcatcgaagcggaagtgccgttcgctgccacctacggcaatcacgatttccagtgcggcatcctggccgacgagcaggacggcatctaccgcgaattccccggctgcctgaacccagtcgacagccttgagccaggcacttttgccctgcccattgaggcttccgacggatccgggcgcgtagctatgtccgtcatgatggtgaattccggcgattacgccggcaagcccgaagagaacgacgcccaatacccggcctatgtggtcaatccgcgtggtcttgatttggctgattccgatgggtatggcacgccaagccccgaggcgatcgattggctgggagccgtacagtccgaacttggcgaacgcaacggcgacggtaagccggtgcctgccatcgccttccagcacattccgccgcaggaattctacgattgcctcaaagaggttcccgcatggacgccgaacgcggtggaaggcgcacgtacccacgccggtcattgctacgtgctcaaccatgagatctgccggccgggatcgcggctgggtgaggcgattggctgtgcagacgagaacgtcggtgaagtggacgccttgcgtgaggcaggcggctacttcgcgctgttctgtggtcacgatcacaagaacgccttcgtgggccacgcgcatggcattgatttgggctacgcacccacctgcggattcgaatgctatggccccaagtcgcgctatcgaggcatccgcctgtttgaattccatgaaagcaacccggccggctacgtgacccgcatgctcacctggggtgatctggtgggccgatactccagcaacgaggtgcgcgtctggttcgaggaccactgcgtgaccggtgccatcagcatgcgtaacgaattgcgccgcccgcaggtattcgcagtgctggccggtgccatgagcctcggttttatggccgtcatccgctcgttggtgaagaagcgctaaaaacacgtgaggccggtatgaactggcctcactgagtattaagcgttggatccgcctgaaccctgcttaactgttatttatttctgggtgcggataaaaacaccagagccttcggtgttaatcagcatccaatcggatggttcatccggcgttccacgcttgacgagcatggcctgtgcttcagatggcaacgcatcgctggaggttccagatggatatccggtgaaggtgccacacgggctgaatcctgacttgtcggatttggacttgtcgtcaattttgaaagccgacgcatcacacttcagcgttaccgtgccatctgaattggatgtggcggatgcaaacttaccgctgaacttggtctggatacgtggcgcattcgctgcggaatcgccactgctcatatctgcctcgtccacagtgccggagaagttgccccgatcatccaacgaaatggtggtgaaggcgctgccatcgccagcaatcgtgtaagcgtattgggcaccggccaaatcagaaaacaccttcagtgaggccgcatccggtgtgccggatttcttactgctcttgttggaatccttggaatccttggagttgcccttgtccttggtgctgggcgccttcacgtccgcgtccggcagggaatcccaatcgggttcggacgcttcgaccagatagtaggcgtcggcgtcgcttggggccggcttcatcttgacgatgtcggacttactgccgttgtatccgttgtagggcaggaacggattggcgccgttcccggcaccgttgtatggagcggtggtagtgtcgtagagcttcggatcgcggtacagaatgaacggtcgattggtgtccaccgccttctgcttcttggctgcggcaagcgcgtctttgtcgaagtagcccttatcttccaacccctgcaagtcggagccggtaggcactacgaggaacagatcctgcatgtggtattcgccggatgtgggccaagaatcacccatatgcacgccattgccgtcatacattttgccgttggcccaaaagttggtcaggctgatatgcggaatgagctcgaaggcgccataatcttgtgtgactaggtagtcggctttcggactgctgcagtacgcctgctgaatggcgtcgcaggcaatcagagcaccgtcgtaatcgccggtatagtcagcattatcactgccgccttcagtcaccttgtaattgtcgatggtgatgcacttcccatcattagtgcaccactggccgtcggctgcgcgtgtggtaccgagcagcgcgtcaccgcctgtttcggccaaatcatggcctgtaaaggcttctttggtgtcgctggcatcgatgccctgatacagggtcacgtcttcgccggaagacagggacgatcccggagcggggctggcgccggaaaccttacccacgtaatccttggaagagaaacgctgttcaacggtaactgtgtggccctcagactcgagctgggatttgacggtatccacatcctgacccatcacgtcgatgggcagagcggtgtcgtcacccttggcggccacgccaatgtagatgcccttgtctttctcgtcgtccttgaccccagtgccggcggcaggataggtggccacaaccgaaccttcggggttcttcttggcgtcagagacaaacaccttcttatagtggaccggaacgcccatatcggcgaacgtctcagtcaccttattgacctgtgcgcccagagtgtctttcggcacgccggggccggcggattcctgcaccacgaccgtggagccggccttgacacgagcgcccggagcggcgttcttatagccgatgaactcacccgaatccttgccggagaacaccttctccgttttcgcgttgagtcccttggccttcagcgcggccgtgacatccttggccttgacggccgacgccttcttgccgttcttatcggtgacgctggaggcgatggatgccgggtcaggcagcgacttgccgccccacacctcggaacgatatgtcaggaacaaagcgacacccgcgatgatcagggccgccagcaccgccaccagcatgatgatgagtttgtttgggccgggcttggtcgcggcggttgtggttgccgttgccggggccgtctgcgtggccgtggcaacggtcgcagtgggctgcgtagccgccggtgcggagacgaccgccggagccgacatgccagcagcaccctgcggcataggaatcggcggcactgccgcaccgccggggccggggactgaaacggcagccggagcgggagtcgctcccgctggcgtgggcgcaaccggcgcgtcctgcggtgtcatggaagcactcgacgctgcagtattcgcttcggtggcggtgagcggcgtgccgcatgtttcgcagaacttgctaccttccgcgttatcggtatggcaattggggcaaagcataaatggaatctcctatgaatcaacgagactgcggagccgaacaataatggtctgattggtgcggccatcggcaagcgcagtaaaaacactgccccggcaaatatgtcggcaagtgtagaaggacgggattgtttcagccgcgcgcgttgtagtcggcggacagatcgttcatcgcatgcagcagcttgtagaagtagaccagcggtcccacgatgatgaaaattcccaagacgtcccacagccagaaggtggctgcggtaacggtgggagtcatgccgcgggcctgctgctcatcgccaatacgggcgctgaggcggtggtaccacaccagccagccgatgcccagcgtcaggccaccgatcaggaagaacatcaggcagtagtgcatcgtgcgcttgccgtcacggcgcgaagcgatgaggttcagggtctcgcccacttcgctcatttgccagatatcgtaaatgccgaaagtaataatgccgagcaggatgtacttcagcaggctgcgcttggtgcgcagttggttgaccgggcgcgggttataggtggcttgctgtgctgcgggctgctgtgggaatgtcggctgtacggcagccggagcctgcgccgggaactgcggcgcggcaggctgagcatattgtggcgccgcgaactgcggcgctgcgggctgcgcggggcgtggtgctgcaggctgctggaagaccggctgcggtgctgtaaattgcggagctgcgggccgctgaccgttcggttgagggatttgcggcattggaggcatacttggatttgtcataatggacctcttctctcgctgtggaagcccatgcgcctccacgcatagttgcaagtctagtagtactgcgccgggaagcgctacgtgtgctggcatattgtgagatgaacggggtgttggaatgggccgtcgctaggatggaggaagttacgcatgttaccaatgcgtaaacgaatatccaataagcgattgtatgaatggttcgcacagtaaaggaggaacaatgggtcagggtcaatcatccgtttttgatctcgcggcagtggctgcggcgtccaatggggggaacaacgacccgctgctgcctccggcacgattcatcggcgatccgcagaagccgagccgtatgccgtataacaagtacgccgcctacgacaagcagatcccgtttgattacccggagcgcacgtggccgggcaagcgactgcagcgcgcgccgcgctggtgctccgtcgatcttcgcgacggcaatcaggccctcgtcaacccgatggattccgagcgcaagctgcgtttctggaacctgctcgtctccatgggattcaaggagatcgaggtgggcttcccgtccgcttccgaaaccgatttcgacttcatccgtatgctcatcgagcgtgagctgattccggacgacgtgaccatcgtggtgctcacccagtgccgcgagcacctcatccgccgtacttatgaggcgctcaagggtgccaagcgcgccatcgtgcacttctacaactccgtgtctgtgctgcagcgcgaggtcgtgttccgcaagaacaaggaagagatcaagaagctcgccaccgacgccgccgaactgtgcaaggacctcgagaacgaggccaagggcatcgacctgtactacgagtactcgccggaatccttcaccggcaccgagccggagtacgccgtcgaggtgtgcaacgccgtgatcggtgttatcaagccgactcccgagcacccgatgatcatcaacctgcccgccaccgtggaaatgaccacgccgaacgtgttcgccgacgaagtggagtacgtctccacccaccttgacgaccgtgactccgtagtgctctccctccacccgcacaacgacgaaggcatgggcgtggccgccaccgagctggccgtgctggccggcgccgaccgtgtggaaggctgcctgctgggcaacggcgagcgtaccggcaacgtcgacttggtcacgctgggcctcaactggctcacccaaggcatcgacccgcagattgacctgtccaacgtgcccgagatccgcaagacggttgagtactgcaaccagatcaagatctccgagcgtcacccgtacgccggcaacttcgtgttcaccgcgttctccggctcgcatcaggatgccatcaagaagggtctcgaggctcgtcaggtggccgccgagcgcgctggcgccgatctcgacagcttcgtgtggcttgtgccgtacctgccgatcgacccgaaggacatcggccgcacgtacgaggccatcattcgcgtcaactcgcagtccggcaagggcggcatggcctacctgctcaagaccaaccacaatcttgacctgcccaagcgtctgcagattgaattcgacaagatcgtgcaggactacgctgacacgaccaagaaggaagtcaaggacgaggatatctggcgtctgttcaaggacgagtacctgccgatcgaacagtccggcatgaccgccgccggtgtggttgtgggcgatactcatgacgcctcgctcgcgccgtggggccgcttgaagctgctcaaggtggccgtcagctccggtgaggatggctccgataccgtgctcaaggctcgcctgctcgaccgcggcgtgaacgtcggggtcgatgcgcccgtggagcgcgaggtctccggcatcggcaacggtccgatcgccgccttcctcaacgccatttccaactttggcgttgacgcctcgattatggattacgtggagcacaccatgtccgtcggcaccgacgccatggccgcctcgtacgtggaatgccaggtcggcgaggccgatgatgcgcagatcgtgtggggcgtcggcatcgattcgtcgatcaccaccagcgctctgaagtcgattatctctgccatcaaccgttcccagcgcaagcgctgagcgctaacaacaaaacaaagctccctctgattgcatcagagggagctttgttgtctgtgcttacttactactgggtgacgccgttggtgccggtgttcccgccggtgcctccggaattaccattatcgttgccggtattgttcccgttgttcccgccggtattgccggtattgttgccattgttgccattgttgccatctccgccggtagtggtgccgggataattcggacactcggtggaatagctcggattggcgaggcactgctgggcgaactcctgggcctgctgttgcttcttggcttcctcttcggccgccttctgctgtgcgtcctgctcagcctgcttctgcgcgtcttcggtggactgcttgttggtgttgttggacaggccgctgctctgtcccttgcccaagccccaagtgccgtcgggtccaccgatcttgccattgtctttagcggtcgggaactgctccacctcggtaccttgcaaggcctgagccatgaactcatggaacaggtgggcggggtatccagtggaagagatgccgtatccggagaaggccggcaccgcctgcggattgcccttatcgtccgggttccagatagcccacacattcatcatgctgggggtgtatcccacgaacgacgaagccatttcgtcgttggcggtaccggacttgccggcgatgggtcggcccagcatgttggatgtgccggccgccgtaccgtacgtggtggtgccctgcatggccttctgcaccaaagcgcagtcgttggcatcgaacaccttggtgcctttgctgggcgcgttgtacatgtccttattgttggaatcaagcactttggacaccatgtgcaaggtgctcttcacaccattgttggcgatggtcgaatggccttgcgccaaatcccacacggtcagggcgttgatgcccagcacgttgtacatggagttttcatcgatatcgccctgaatgcccgcttcatgggcgattgcggccgtgcgcttcggcgtcagatgctcattgacgttcatgaacaccgtgttcaccgagttggcggtggcctgatacagattgatgttgccccagttgttctccagagcgttattcacctcttgatccaagccggtgaagtgctggtgggaattgccgttgaacaacgtatcgaagctgacgccggattgcgcggcccccagcaaagcgaacggcttcatagtcgaacccggttcgaatacggcctgatcggcattgttgagctgcttggacagataatctgaaccggcgtatacggacaatacttcaccggtcttcgggtccagcgctatgccgccgatttgcagggattcaggcatgtcgtccagacgggtgtcgccgatggactgcataaggtcctgcttgctcttgtcgatggtggtgatgatcttgtatccgccggtatccaaatcctctttggtaaaggccttggactgcaccagctcacggcgcaccatatccagcagataaccgttcggccccgcgtattcgttttgctgcgccaccgcggcagtctgcgggaacttggcatcagtgtgctgcttggcagtgatgtaaccatcctcctgcatgatgttcagcacacgcttgaagcgcgatttggccatatcggcgttatcggccggatcccacgtggacggtgacggaataatgccggcgatcatcgccgcttcagacagcgtcagatccttggcgtccttattgaagtatgccttggccgctgcctggatgccgtaggagttgcggcccagatagatggtgttcatgtaattgcacagcacctcgtccttggactcggtttgcgcgattttgatggccacgatggcctcgcgcgccttgcccacataggatgtggtttcgcccatgtaataccgctcggcatactgctgggtgatggtggaaccaccttggcgcgtgcccttggtcacattattaatgaatgcgcgggcgatgcccctcagatcaagacctttatccgtgtagaacgtacggttttcggacgccacaatcgcgttgccgatgtagtccggcagcccctcgcaagagatgattgaacgattctgttccgcgtaggagccgatcgcggtggtgccgtccgcgtaatacacggtggttttctcggccaacgcgaacttttcgggttgcgggacctcggtggtggtgtacaggtatgcgaatactgcgataccggccagcaagcccagtccaatcagggagaagaagatgcccagcacccatttcagtacacggtgcttgccttttcctgtgttctttttcttcctgttcggggctcgatggctattggaagccttgtggcttgcgtggcgggaacggctctcctggggcgtataggggccctcctgtgcggagtggtcggctctgctttgcgcggtgcgcggttgcctcagagcggggccattgcctcccgaatgtgcacgacgagtataagaagccatggtgtccaccgtaactgttggccttgaacaatcgtttgacgtgagcgtaaccacacgcatttatgccggtatttttccggaattcttacaattgggcacgttccttgatgctgcatgaatattgtctgaatgcgctggttggcctgccgtgcgacccggcgcgcacgtttcgtgtcgctgcgctggtccatacgtctccatagacttatccccagcctccacgcggcgctatgtcacccaactcccccagggcaggaatgcagcaagggtaagtggcctctgacgggtgcgtggaggttttccatttgtgcggatttggccgtgagctggcacgagcacggctccctgtccggggcgcggccgtacagtcgaacgtatgaatgacgcacagacccctagaattcgcgacccgcatgcggcggtcaatctggtcggctcaggcgcagcgcagcctgactcgtcgtcgaacgttgttgacccattggctgcgctcggcccggtctccggttcagatgcatcggcatccacatcaggctccttaggggatttcaggccgctgggcatggacgatgcggatggggcatctgatatcgaccgtggcttggcccggcttgacccgcttaccgtgcgcccgcgaatctccagccgcgtactgtgcgtggtattcggtctgctcctgatcgctattggcttcggcgtgtggtgggggtgcgtgtttaccgaaaacggacaatcgtacgacgaactggtctggaaaaacctgcacaacgatgtaccgtcctggaccaccggcatgatgaacgccgtcgcacaatcctggctggttatcgctgtcagctgcacaattgccgcaatcggcattattacggcgctgattcgacgccgctggtggttggccgggcaaatcgccgtgttcgccgtggtctgcttggccgtcacccgtatcaagggtctgttgccgcgtccgttcatcatcaacactgaatcgcctgccgctaattccgcgccttccggacacacgatgctggccgcagcctgtgcggtgattctgctgcttaccgtgcctcgcgcggttcgagctttggcgggcgtcatcggcgtggtttgggcggcgaccgtcggtgtctctgtgatatacgggcaatggcatcgcccttcggatgtggcgatgtccatcctgctggtggcgggattggccctgctcgctctggcggttacacgcaagtccggcatggacgagccgggccaccgcgtctcctcagtgagtgtgcagatcgtcggcagcgtgttgattaccgggggcctgctgttgctcgcctacagcggttatgtgatctggcaggtggtgccggggctcaatgtcagcgccagttgggcggttcagggggcgaatgtcagcgctgttgtgggcattacgggtgtggccatgctcgcattcggactgttgctggccctacgtcagatcactgcagcgcccttaagcaggctgggcctgatcggcgctccgccggcaccgcccaaacggtaaaacatgaggtgcgaacggccgaatttgcctggcacaacggcggaatttggcagttggatatgattcatgagtattatgacgccagaaacgtcgtgtgtttcgcgcaatacataaggagtgggtatggctaccaaactggtgattgtggagtctccgaccaaggcccacaagatcggtgactacctgggcaaggggtacaccgtcatggcgtcggtcggtcatatccgcgacctcgcgcagcccagccaggtgcccgcggcagacaaggccaagttcggcaagttcggcgtggacgtcaacgacgggttcaagccgtattacatcgtcgacggcgacaagaagcgtacggtcagcgaactcaaatcagccctgaagaacgccgacgaactctatctggcgactgatgaggatcgcgagggcgaggccatcgcgtggcacttggtgcagaccttgaaacccaaggtgccggtcaagcgcatggtgttccacgagatcaccaagaacgccatcaacgcctccctgaacaacacgcgcgacgtggacggcaatatggtcgacgcacaggagacccgccgcatcctcgaccgtctgtacggctatgagctgtcgccggtgctgtggcgcaaggtgggcccgggcctgtccgccggccgcgtgcagtccgtggccacccgcctgatcgtggaacgcgaacgcgaacgcatggcattcaagcgtgtgccgtactgggatatcgtcgccatgttggccgcgcctgacgcgctgggggagcgtgccgaattctccgcccgcatgatcgcgctcggcggcaagcgactcgccggctccaaggatttcggtgccgacggccagctgaccccggacgggttcgcggcgaacgttcgccagcttgatgaggctggtgccactgccgtggctgaagcgctgaggaccgccgatttcactgtgatgtcgatggaaaccaagccgtaccgccgccgcccgcagccgccgttcaccacctcgaccttgcagcagaccgccggcaatcgcctcggcatgggtgctcgcgtcgtgatgcgcgcggcccaaagcctgtacgagaacggctacatcacctatatgcgaaccgattcggtgacgctgtcgcaggaggccatcaccgccgcccgcaacgccgtctcctaccatttcggcgacaagttcctctccgccgagcccaagcagtacgccaccaaaaccgctggcgcgcaggaagcccacgagtgtattcgcccggcgggctcgcgcttccacgacccggatgagctggcttccaaacttcccggcgaccagctgcgcctatacacgctgatctggcagcgcacgctcgcctgccagatggctgacgccaccggctccaccgccaccgtgcgcctgtctgcgccggccggccccaccgagggcgaggccgtgttccaagcgtccggcaccgtcatcgaattccccggctttatgaaggccacgggggaggggcgcaagcccaaagccgccgctcccggcgctggggctggctcggaccaggctgctgccgccggcaagacggacgtcaaggccgtcaggggtgacgcctccgaatccaacacctccctgccgccgatgagcgtcggccaacaggtcgaggcaagcgacatcgaaccggacggccatgaaacccagccgccggcccgttataccgaggccacgctggtcaagacgctggaggccaaggagatcggccgcccgtccacctacgcgagcatcatctccacgattatggatcgcggctatgtgtatgagcgtggccgtgcgctgatccccagctggctcgccttctccgtgaccaagttgctcgagacgaacttccccaagctggtcgactaccagttcaccgccgagatggaaaacggccttgaccgcatcgcccacggcgaggaatccggccgcgactggctcacccacttctacttcggttccggcgagggcgccgcccgcaacgccgacgaggcgcacgaaggcctgcaacagcaggtcgcgcagctcggcgagatcgacgcgcgcgccatcaacaccatcgacatcggcgacggcctgcacgtgcgcgtcggccgttacggcccgtatctggaagacatggagcatctggacgtcgaaggcaacccgaagcgcgcgtctctgccggacaccatcgcgccggatgagctgacggtggccgtggcccgcgatttgatcgacaaccactccggtggaccgcgcgagctgggcgttgacccggtatccggcggtaccgtcgaggtgcgcaatgggcgtttcggcccgtatgtggcgctggtgccgccggctgaggcttcggctggcgctgctggcgatactgctggtgcttctgcggccaagaagggttcgaagaaggccgcggccgccgccgcgtcgcgcccgaagatggcctcgttgttcaagacgatgagccctgaatcgctgtcgctggaagacgcgctaaagctgctgagcctgccgcgcgaagtgggcacatacgaggaaaccaacgccgaaaccggtgaggtatccgaatgcacggtggccgccaacaacggtcgctacggcccctatctgaccaagacgggtgccgacggcaagtcggagacccgctcgctggcctcggaagacgagatcttcacggtcgatatcgacaaggccaaagaactgttcttgcagcctaagtacggccgcgggcgtggccgtggtgccgccaagccgccgctgcgtgatttgggcaaggacccgaacaccggcaagaacgtgaccatcaaggacggccgtttcggcgcgtacatcaccgatggcgagaccaaccgcacggtgccgcgtcagtacacgcctgaatccatcacccctgatgacgccttccgactgctcgccgaaaagcgtgcggctggtccctccacccgtggccgtcgcggtgctgggcgtgccggtgccgcgaagtcgggagccaagggagccaagaagggcgctgcttcggctgcgaccaatgccgccgaggccaagcgcgccggacgccgtgccgaggtgaagaagctggcaaacaagggctggtccaaccagcgcatcgccgaaaagctcagctccaccgccgccaccgtcaagaaggatgtcgactggctgaccgccaacgagggctacgagcgccccgccgtaattcccaagcgtggctgagcggaattattgctctacttgcgtttcaaagggctgatttctcgttttgagaatatctacttccgcttcaaggggctggtcatctgctgaaccacgagtatgaacggctccgcgccaacgtcattccgccgttttgggacgttgtctacttgggtaacagccccttgaaacggaagtagaccttcagaaaagaccaaatcagccccttgaaacggaggtagagctggtttaactgcctgttgggcacaactctgcgcctaacgctaaggtcaatagcatgagcggtctgtttgtttcgtttgaaggtgtcgatggcgtgggcaagaccacgcaagtcgagcggctgcgtgcgtatcttgaggctcaggggcgtaccgtggtcgttacccgtgagccgggaggcactgcgctaggcaaggccattcgccaactgctgttgcacggtgtggatgggggcgccgtcgacatcgcaccgcgcgccgaggcgctgctattcgctgcagaccgagcccagcacgttgccgaaaccatccgcccggcattggagcgcggtgaagtggtgatcaccgaccgctatttagactcttccttggcttatcaggccggtggccgcgaacttacgccagaagagattcgagccttaagcatgtgggccaccaacaacctgctgcccgaccgcacatatctgctggatatggatccggcgctttcccacaatcgtcttgagcataccgaagatcgcatggagtcggccggcagcgacttccagtcccgcacccgtcaggcgttcctcgacttggccgtggccgagccgaatcgtttccacgtgatcgatgccagccagtccatcgaacaggtgtggtccgccatcgaagcggacattcagacactgctgcgggacaatgttgcagatgtggatacggtgatggcgcgatccggggcgtctacaggagccgtgacgatgggcggtgtccgatgagcgtatgggattcactagtcggccagcagccggtaatcgacatgctcagtcgcatcgcgcagggcgacccgggtcagatcacccagtcgtggctgatttgcgggcctcccggctccggccgttccaatatggcccgagcattcgcggcggcgctggaaagccccgaccacggcatgaacgatgagcccacgcgcgtcacccaacaggtgctcgctggcacccacccggatgtcacagtgctggccaccaacaaagtgaccatcggcatcgaccaggtgcgcgagatcatcaccgcctccgagcaaatgcctgccacggcaccatggcgcatcatcatcatcgaggatgtggaccgcatgctggagcgcaccaccaacgtgctgctgaaggagatcgaggagccggctgaacactgcatctggctgctgtgtgcgccgagtgcccaggatgtactgcccaccatccgctcgcgcacgcgcatcgtgaacctcgccgtgccctccacccaggcggtggccggattcctgacctccaccaccaatgtcgagccaaaagtggcgcagcgtgcggcccgtctggccgagggacacatcggcatcgccaagttgtacgccactgacgagcaggtgatgacggatcgcgacgaattggtggtgggcgtactgaacctcgctcgcgcctcggacgcggtgctgctggccggcagccttatcgacaatgccaaggcccaggccgaggcggacgcaagccgcatcaccgccggccaggaagcggaattccgccgcatcaacggactggcaccgaacgaccgcatcccgccgaaactgcgtggcgcgttcaaccagatcgccaagaaagacgatgtgaagcgtttggtcacccgccgtacgcgcgacgtattggatcgtgcgctgaactccatcgcctccatctaccgggatgtggcggtgctgcagaacaatgcggaggattcggtgggcctcatcaacctggagaaccgctcgccgatcaccgaattgtcggtgcggttgaaccgggccggtgccgtgacccgtctggacgaagtggcccacgcccgcaagcgtctagccggcaacggcaacccgctactggtattcgaatccctcttctgcgccctaattccataacccgacgcaaccagccccctctgacgagggggctgtcgagcgcggcgagactgggggagagacccccgtaacgcacagcccccagtacgtcacacatatgagcgatactgggacatatgaagatttccgccgatttcaccgtcattccggacgattttgccaaggccgccgcgcctgagtacttcaacggcggcgtgccggtcgtctccttcccgttctacatcggtgatgtgaaccccgaggcccgttacctgcactgggagttcgtggacccggattcgattccggtctgcggcttcgagtggattcactggtccgtggccaatctgccgattgacgcgctgatgtacgacttcaatgattcgcatgcgttggccatcccgccggacttctcccgtcagctgccggccatgattcccgagaccgtgcaaggccgcaattcttcggcctccaagttcttgggccgcagcactgacccagcggtgatcatgcggtacaacggtccgcagccgccggacaaggaccacgagtactacctgcaggtgtgggccaccaagaagccgttgcccggcttgaatcagggcttctggctcaacgagctgttgcacgcgctgcgcaacagcggcgaagcgcccgacaccgacggcatcttcctgaccggtaaggcgtgatttttagttggcgtatgtgagctccctctgatgagggagctggccgccgtaggcggactgggggagagacagctagagtgactacccctcagtctcgctttgcgagacagctcgtcctgcaattacggacgggctaccgcccgcaacatctgtggtgggacttatctcccaccctcgcctacaaacagcccaccgggctgtttgctgaacggctcagcctgacaaggggagcttgaataagagaaaggacaccatcacactatggcctgcaccacgattctggtaggcaaagacgcgagctatgacggttcgaccatcattgcccgcaacgaggattccgcgaacggcgagttcaacccgaagcgcttcatcgtcgtgaaaccggaggaacagccgcgcgaatacaaatcagtgatctcccacctgaccatcaccctgccggacgacccgctgcagtacaccgccgtgccgaacgcggacctcaaggaaggtatttggggcgaggccggcgtcaacgaggcgaacgtggcgatgagcgccaccgaaaccctgaccaccaacgagcgcgtgctcggcgccgacccgttcgtggaatacacgccggccaagggcgatgagcccgaggtgcccggcggcatcggcgaagaggacttcctgaccatcgtgctgccgtatgtcaagaccgcgcgcgagggcgtccagcgtctcggctcactgctcgaggagttcggcacctacgagatgaacggcgtcgccttctctgactccaacgaaatctggtggctggaaaccgtgggcggccatcactggattgccaagcgcgtgccggacgaggcctacgtgaccatgccgaaccagctcggtatcgacgaattcgaccttgaggacgctctgggcgaccaggaagcgcacatgtgctccgaagatctcgccgaattcatcgaaaccaaccatttggacctcgcggtggagaacaccaccccgttcaacccgcgcgacgcctttggctcccactccgactccgaccacgtgtacaacaccccgcgcgcctggtacatgcagcgcttcctcaacccgtacgacgaggtgtgggacggcccggacgccgaccacaagcccacctccgacgacatcccgtgggcccgccagcccgagcgcaaggtgaccatcgaggacatcaagtacgtgttgagctcccactaccagggcaccccgttcgatccatacggccagctgggcgatgagcgcacccgccacatgtaccgcacgatcggcatcaaccgccagagccagcttgcggtgatgcagatccgcccgtaccgcccgcaggcctcccgcgccatccagtggatggcatacggctccaacccgttcaacacgctggtgccgttcttcccgaacgtggacaccacgcccgcttaccttgaggacaccaccacccgcgtgacgtccgagaacttctactgggccaaccgcatcatcgccgccctgtgcgatggcgccttccgctccacgtccaacgccgtcgagcgctaccaggagaagaccggtgcgatgggtcaccgcttggtcgccgccaccgacgagcagatcgcccgtctgggcttgacggccgccgaggaagccgcgcagtctgccgctgaagaggaattcgaggccgacaacgtggatggcgatgtgcagccgatgaccccggacgagaccatcgccgcgctgcgtaaccccgaggtgcgcgagattctcgccgccgccaaccagaccatggccgaccagctcaaggaggaaaccgacaagctgcttgactccgtgctgtacactcgcagcatggaaatgaagaacggcttccacatgtccgacttttagtccgtattgagctcccctccctgaggggaactgaccgcgaagcggactgagaggctaagctgttaagaaacagcccagtgggctgtttctaggcgaagaggcggcggcggccgccccaccaccccgctccgccatcatcaacacagaaaggcattaaatgaccaccatcgaagacttcaccagccagtacggcctggtccagaagatcgacgcattcggttacatgaagtacctggctgagaacccggacgccccgtgcaagcacggcaaggtggtgctcgtcaccgccgatacgccgctcaaggcatcgcgcggcgaaggcaagaccaccacgaccatcgccttgatcgacgccctgaacaagcgtggcattgatgcggccgccgtgctgcgtcagccgagcatgggcatcaccgcagccggttccaagggcggtgcctccggcggcggcaaggcatccctgacccaccccgagctcatcgactggggtctgtgcggcgaaatgggcgccatcgaggcggcccagaacctgctcgtctccttcgccgagaaggccatcgatgaaggcaagcttgacacgattctcgtgccgcgtgtctccgaggtgccgagccgctccctgcgctccaccgccgtggactacggcaagggcaacgtgccggagaaggtcgtgctcacgccgacctgcgagctcatgcagatcatggtgctctcccgctcgatggacgagatttccgagcgtgtatccaagatgatcgccggcaccaaggacggcaaggccgtgaccttcggcgagttcgtggatctgtggcgcatcaccggcattctggccgacgcggtcaagccggccaagaccgagaccgtgaacggctccccggtctacgtgcacggtggcccgttcgccaacgtgtccatcggcattccgacgctggtttccgtggaaatggcctgcgctctgcatgacgtggttgtggtcgaagccggttacggcaccgacgccggtgcccagaagtggctggacatcgcctgtcgcgagtatggcgcgcagtggccgtccgccgccatcgtggtgacccgcgcctccacctggcgcgacgatcccgagctggcctggcgctacccgttccacgtgcagcgcctggagaacctggacattccgaccttcccgctcatcaacctgtgggaaggcgaggacgatcaggttccgtccctgaaggccaccgccgacgagctgggcttccgcacgccgatcatcggcaacctgttccgcgacggcggcgaggcgctggccccgcagcttgacggtttcgtcgacgcgctgcagaacggctccatgccggccgaaccgcattcgcacaagggcatggccctgaccgagaacgccaagtgggtggccgagaacgcctacggcgtaccggccgagcgcgtgatctacaagccgggcttcaccgagtccgtgtccgaggccatggaactgtgccagagcgcaggcatctcgctggatgatctggcgttcgtggcggtcaagtccccggcgaccatgaccgacaacgaccgcgcccccgaagaagagcgcaccgtgaccctgaagaaggtcgaggtgcatgccggtgccggtctggtccacgtcaacctgaccaccagcctcaccacccccatgcccaagattgtgtgatgacaggcatgaggtgaggtaactcgctttcgaggggcggatttccggttttccggaggtctatctgcgtttcgaggggctcttcgattgcgaaacccggagtatgaccattgaaattgcaatgtttatactccgggtttcttgttttaaaagccccttgaaacgctagtagagcttctgaatgttggaaatcagccccttgaaacgtagaaagcccgccaccggcgggctttctacatctgagcttccctctttgagggggagctgtcagctaagctgactgaggggagccagaatacgcaaactagttgccaccctgagccattaaacggaaagcccactgggctttccgtaggcgatgcgaacagctatgctgcgaggggaatggtggcaactagaagttgccgccattccagccccaatcggtggtggcggtgtagcggatgtaggtgcggtcctcgggaatgccgagtgtggagttcagcgcggccataatgctttcggtcagcttttcccaagcagagcccggcacagagcggccgaatacgttgacctccacataggcggcgggctggtcatcgctaccaccgaagtagattggcatattgtcctcgaacgggcacatcagccagccttcggacttgcccggcacagcggtaatcgccttgccgtaggcggccttcagtgcctcacgctgctcgggggtggtggacacggacacatgagtgtgaataacgggcataattcctccttgattcggttcacttccagtctagcctcagcggctgctgttgaacatggcatgcggacgtaggaagctgcttgcagaacggaccggggcaaggccaattggggatattattggcctttccagccaatacacgttccgcagtcagcccaatagtgttgaatactcttgtgagaaaactgattgaacagctgatgaagttcggcattgtgggcgttatcgcctttgttatcgactggggtatcctcaacctattggttggcatattccacatgcacaacgtgctggctgccaccatctctttcatcatctcgctgattttcaactatctggcgagcatgaaattcgtattcaagcatcgtgatgacatggcacgctggatggagatccttatcttcgtggcgggtgctgtagtcggtctgttcatgaatgacgcgattatctggatttccacctatggtatgaaccatgatgcctatgtatcgcagcatgccgaatatctgttgcgcaccaatatcggcaagttggtggccactgccgtggtaatgatctggaacttcttgattcgcaagtggctgctcgacgatacgcacaccaatgcgatgaaccgtctgaagtccgctgaaaatcgactgaatgccgaggagcttgaagccaagtggcagaacagcttctcccacaagctcggcatctggtccttggagcacacgcccaaaggctggccgaagtagcgttttgacgtatgctaagccccctcgtcagagggggcttagcatacgtctcacacactcacttcagtcagggtcggctgctcggtggagcccttgatctgcttgaagccgatcagtgcaatcaccagcgaggccagtgccaaggtggtcaccaccatgaagcctccgtgcgagcccatgcggtcgatgaactggccggcaatcgccgaaccggcggaggagccgatagaattcatcgcacccatccacgccatgccctcggtcaagcgagagggcggcaccagatgcaacatgagctggttgccgttgatccacgtcggggcctggcatacgccaataatcaagtagatgatcatgatcacccacagatgcttggcgaacaggaacgtactgatgccgatgttcaccacggccaggcagaagtagaagcgcttccacagggcaatcgaccagttcttcgcgccatacaccaatgcgcccatcagcgagctgaaggagaagcaggcaaacacaaagcccgtgtactgcttcatattcgcttcggtggcaaacgcgatgatggagatgcccgtagccgactggaacgcgcccaaaccgaaccaggtgacgcacaccgcaatcagacccggaccccaaatggacgccttcttgcccgaacgcgcatcggcgaccgcctgcttaatggctgcgttaatcgtggcctcatcggtcacgccttcacgctcaagacggcggcgggtctcctcggcggcggtttccaccttcagcgcctcagccttggcggcctcgcgctcacggtattccttgcgggagatgccctcggcacgcgccagcgcggtctgcgacggtggctcagtggtcagctcggtcaggaacatcagcgcaccgaccaccacgcacatgccggtgaacgagaacgccagcaaaccggagatcacggccagcgtggaggccagcggattaccgatcacccacatgcattcgtcgagcacgccgcacagcgacagcgcgcggttcgtgcgctcccggtcacccttaagaatcttggtccagcgcgcgcggctcatcgcgccccacggcggaatggcggccaggaacggcgtcagacagtacagcacccattccggcgcgcggttggtaatcgccgtcaccagcgcgatggcggccacaatccaaacgataatcgtcggaatcgagacctgcctctggccgaacttgtcggtcagcttgcccagcagcggcgtggccacggccagcgcaatcgcctgaatggcggtgagcatgccggccagcgaatagttgccgtaataatgctgtacggaaatggtgatggtcatgccgaccatcgggaatggcatgcaggcgatgaccgagccgatggaataacgggcggtatgcggaatgcgcagtagttccgcatacccaccaaagactttgtggcctacttccttgatgccggccagaatggtgctcgagttcgagttggacgagttattggacataacagcactacgctcctttccgctcccgattggatgtcccccgctggcgtggcgttgccggcgaagccctcatcgaatgatgtgttgtccatggtcgcgcaaagtttgcgtcggattttcccatccgcatatttgcgtcacggatactctacgggtgtccactccgcgacacgcggtagattggagatattaagacaacgttctcatgcccttcagggcgggaagcagaaaggcggctcatgagcgctaccaccatccatttcgtccggcatggcaaggtatataaccccgaccatctgctctatgagcgactgcccgacttccatctttccgaccttggccgtcgcatggctcaagccaccgccacgtacttggccaagaatccccaaaccaatacgattgcagccgtctactcctcgccgctcgaccgtacgcgcgagaccgccggcgcgattctcgatgcgctgaaccccgtgcgcgaggctcgtggcgaggcttcgctcacgctcaccactgatgaacgggtgattgaggccggcaacgagttccgtggcaagcgcatcggccatggcgagggcgcgctgtggaagaacggcaactggaagctcgtcaccaacctgtacaagccgagctggggtgagtcctatcagcacatcgcggcgcgtatggacgacttcgcccgcgagaaggtggcccagcaccccggcgagcagattgtggtggtcagccacgaatcgccgattttcagttatcgccattatctggagaccggccaccccgagcactggatgttcctgcggcacacggcgctcgcctccgtgacctcggtgacgtacgacaacgaaaccggccgtgtgatgtcaatcacgtatgtcgacccagcagccaacgtcaagtaacggcacactggtgttaggacattggctcccctcagagaggggagccaagacgcactgcaatcgagtggtggacgcaaaggagcatagatgaccattgaactcaatcgtgaggcaatcgcacaggtcgcggcattgccggcggtaactgaggccgccgaagccggctcggcgctgatcggcctgtggccgctgaccgaagccatgcaaatggacaatgacgccaagtacgcggagaacctgcaggtgcgcgtcacccgtgcattcgcccgcatcctgaccggcgaggacgtcaccgtgccggacgccgagttcgtctacgaaggtgccgatgagattcccggtcgcccgcagagcatcgtggacgccctgctcgccgccaatgacgcctacgacacgatggccgactacgccgagtccggtgatgccaggctgatcgttgaggcggccgacgtgttgggaatcgactgggattccgcgacggcggaatcggtgagggaggcggtcgcggccatggaagcccaggtcgaggccgacgctgaagccgatggtcgtctggccacgtctgccaagcccgccgatgtggctgttcggttcgccaccgcgctcgccgtgtgcgatgcgttattgggtgaggtgtccggtgatgctgtggccgatggttcagcggacagtgtcgccaatgctgccgccaagattctgccgattctgctctacgtcaacgaactgcgcgagcagtgctcggtgccgcgcatctgcctgaccgacgagcagatcctcgggttgcttaatgcccgtgccaaagccgccgacgcagacaccctgaccgccaccgccgaatacatcgctcctctggccgttgccgaatggaacaagcaccgtgaggatgtgctctggaacccggacgaggctaagcgtcaggccaaggaagaagacgaaaagcgcaataaggaggctctggccgccaagttcgcgcatgtcaaggatgatcccggcaaagagaccgtggagttgtaaagagtgagggcgttgctctggccgatgcttcgctcgtaacggttagaggcctggtgcctctccctccgtcatcgctttgcgatgccacctccctcgtcagagggaggtggggttactgcttatcgattaccgagccgcgatcggtcagcgtcgggtccacgtagatgtggcgggttgtagaatccgggttttggatgcggttgatcagcaggttgatggccgcctcggccagatccttatcggacgagcgcagtacggtcagcgggcgggagctgggcgtggcaaagccgttgacggagatcatcgagatatcgtccggtacgcgcttgccgcggcgctccagggtctgcgcgatggcgatcgccagataatcggagtgcaccagcatggccgtcacgcccgaatccagaatggtgtccacgatttggttgacgtccctggtgttgtacggctgaatgccggtgatggtgaacgggcattcgatggcgtcgctttccgtcacgatttgcttccagccatcctgaatcagctccgaagtcggtgtatcggtgaacgccgcgcccacatgggtgtgaccgtgttgcaggaagcgcaccgccgccttacgcacgccatagggatggttggtgcgcactgaatcgacgtagcaggaacccagcagcggcagatcgctctctggcagcgagaaacgcatctgtagcccttagggcatcgctcaaaagcaacgagttcattggaccacagagcacaaggccgcgtcgcacatcgtatatggtgtgtgtacggcctttgtgcatcctgcggccatactttgcgattcttttttgttaaggaagtatcctatttagtgaaaagtatcgttcgcacaatgggaatgggaaacttatgggcaatggtgtcgatttgcgtatgctcgtcaacaatggcggcagcgtggtaatcagcgattacggagcgcatctgttgcgctgggccccggccgggcaggcggatgtggtgtggacgccgagtacgtggcatatcgaggccggtaagtcgctcggcgggggagtgccgatctgcttcccgtggttcggcccgggttttgcgcatggcaagcagctggcactcaatccatcccacggttttgcacgtctgcgtcggtgggcgttggacgagggttcattcgacgacagccacatacggtatgtgttggattcgcagcagctgaacgacaatgaagtgccttggttcgatgacgagccgggtgctcagtttcatgccgtgtatgacgtgcaaacgggcaatgcgctgaccatgagcctgaccgtgaccaacaccggcgcggcgcctatgtcgtacgaggccgcgttgcattcctatctgcatgtcggcgatgtgtccggtgctcagctggtcggattgcagggagcgacgtatctggatgccaccgaagaagggtttccgccgaaaacacaggacgcgcaagtggtgacgtttggcgagcagccggtgaatcgtgtgtattactcggatgcgcgtctggaactgcgcgatgacatgttggggcgtgcgattcatatcagccgtaccgggtcgccgcaaaccgtggtgtggaatccgggagcggacggcgacaatatgagctacaccaagccgggcgaatggcgcggtttcgtggcggttgaagcggcggtatgccgcgaccgcatcgtgacgctgggcccgggagaatcccatgtgatctcccaaacgctctccgtaggcagcttgtaggagtagctcggcgcagcgtccatcctccaccgtaacgcattccggggaatgttgcgcgaagagaggggccgcaataacgcacaatgccctgtgtgctggaatgatccagtacacagggcattggcttactgaacggcggggaatactaccgccgcttgatgagtggggcctcattgttgggcttcatgagtgatgaggcgaacttcttaagcgaacttcgccggcgtcagtcactggccttgccagggtttctgtgcgttgtcatcggtgggagccgtgtgcggagacagcacggtggacccatcatcaacgttttcgggaatcggcggaacctggccgtactgtggggcctgaacgtcgggctggccgtactgcggggccggggtctccggctggccgtactgcggggccggggtctccggctggccgtactgcggaaccggtacctgaccgtaatcgggcgtaggcacagcgggctggccgtagtcaggagccggtgcggtcggctgaccataggccggggctggctggttgaagtcaggagcgggtgcgttcggagcggcgaagttcggagcggcctggttgaagtccggggttgcgggagcgccgtacggtgcgccgtaagcaccctgaggcatcggggcagctactgcgtcatcgtcgaaacgtgcgccttccggcttgctgggcatagccatgaacacgatgtagacgattgaaccagcgagcgtaatcagtccgccaatggccatggcaccgaggccgccggttgccatggctccatagctggagttgctaaggctgccgaaggcgccatacagtgctgcgccaccgccggcaaccatgatgatcatgccgagggccatcgcgccatagaagatggcgacccaccagccgggcttgtccgtgtcatgcagacggcgaacggcgagcgccagactgggaatcaggatggccagactccaaatgctggaaaggaacccgagcttgtcgtccgtggcactgctgaggaggctcagcaggacgctgatgccgacagaggccaacgtccaccaccagaactcgctgcgggaggcacgtcccttgaagaccacatacttcttccagaaacggaggaatgcctcagggaaggggcagtcgtaatacggcttgttcaacggcacggctgctgtggcagtgggagcggcgtactggttgtatgcgggtggcacctgaccgtaagcgttggcgtccggtccgggctggccgtaggtaggagccgcgccgggagcggggaattgcggagccgcattcgccgcgtacgggtcggcggcgggctgaccataggcgggagttgcaccgggcgctgcgccgggtgcggaagaatcgggagcgggctgcccgtatgcgggctggccgtaggccggctgtgcgggggccggagcgttgaattgcccataatctggctgtgcgggggccggagcaggtgcgccgtattgcggcgtgctgggattctgctgggccggggtaccgttgggcgcgggcatctgcggcaacggcacgttgttgggatcggtcattgattcccctttcataagacgattgcgtcgactcctattcttccatcgtttgggtaaaaaactcaacagttgcgccaaatggtgtcgaagccttgcgtgcgggcgtgtggatggcgccaaagtaggtgtcaaaacaggtgtgaagacaggcatcaagatatcgggcactaccaaagacaggcaaaagagatttcgttggaaaatggccgttttgggatggtgttggcccgaaatgtcaataacgaagcaaaagagcgaggagcgctgctctccgcgtccggcgcgcgcggcacaataggggattatgactgatgctgaaaacaccaaacccgaactccccgcgaacgtccgcgtccgcttctgcccgtcgccgaccggcaccccgcacgtcggcatgattcgtaccgccctgttcaactgggcggaagctcgcgccaccggcggcacgctgatcttccgtatcgaagacaccgacgccgtgcgcgactccgaagaaagctacaaccagattctcgaatccctgcgttggctgggtatcgactgggacgagggcatcgatgtgggtggccctcacggcccgtaccgccagtccgagcgtaccgccatctacaaggatgttgccgccaagctgctcgaagccggctacgcctacgagtccttctccactcccgaggaaatcaaggagcgcaaccttgccgccggccgtccggccgagttcggctacgatggctacgaccgcaacctgaccgatgagcagaaggccgccttccgcgccgagggccgcaagcctgcgctacgtatcaagatgcctgatgaagacatcgccttcgacgatctgattcgtggcgccatcgagttcaaggccggctccgtgccggactacgtgatcgtgcgcccgaacggcgacccgctgtacacgctgaccaacccggtcgacgacgcgatgatggaagtcaatgtcgtgctgcgtggcgaggacctcctgagctccaccccgcgccagatcgtgctttaccgttaccttatggaactcggcatcgccaaggagatgccgctgttcggccacatgccgtacgtgatgggccagggcaacaagaagctctccaagcgcgacccggagtccaacctgttcaaccaccgcgacaacggcttcatccgcgagggcctgctcaactacctggccctgctcggctggtccattgcaccggaccgcgacgtgttctccatggacgagatgatcgagaagttcgacgtgcgcgacgtcaaggccaacccggcccgcttcgacatcgacaaggccatctccatcaatgccgagcacatccgtatgctcgagcccgaggacttcctgcgccgctcggtgccgtacctgcaccgcgatggtgtggtttccgccgacaactgggatgccctgaccgaccgtgagcgtgaggtgctgaccgccgccgctccgctggttcagccgcgtgtgcgcctgctgggcgaggtcgccggcatggtcggctccctgctgtccaccgaggagtatctggagcctgcggacgacgccaagaagcagctgaaggattctgccggcgaggtgctggacaaggccatcgccgcacttgaggctgtggatgaagctgactggaagaccgacaacctgcatgagaccctgaacaaggctctggttgaggagggcggctacaagccgcgcctcgccttcggcccggtccgtgtggccatgtccggccgccgcgtctccccgccgctgttcgaatcgatggagatcgtcggcaagccgatcaccgtcgcccgtctcaagggcctgcgggcgcatctgtgatgcgtcgtccaccgcacgccggcggatgatgggagcgtgacgcatggcgggcatccgtacatacggatgcccgctttcgcgttgcatggggtgttcccgcagaacggcggaaaatggcgcgacacgccgggatttgcgtgagagcagggtagcgcgtaatatatctacctgttgcgcggttcgccacgtagccggttgaaaaactgaatatgcccccatcgtctagcggtctaggactacgccctctcacggcgccaacaccggttcaaatccggttgggggtacgacgaacaactcttcggagttgctacgccaagccaaattggggtgtggtgtaattggcaacacagctgattctggttcagccattcttggttcgagtccaggcaccccagccaataaccctcgcggatttgcgagggttttttgtttttacacgtcctgctcatgagatacggccgagagggtaatcctgaatagacaactctggggcaaagactgggctatagtcccaatccgtgactcaaaaacggcagaaatcccgcgtccgaacgtaaggggcgcgggatttctgccgtttcgggccgtgcaggaccggccgacatcgcgcgttgccgcgacttgagcgctgtccgatcctgaaaacgtgagggagaccgccctcgtcttacttcttgaccgcgttgacggcgtcaacagccttctgcagcgacgtggtgtgctcgtggtaccacgtgacctgctgttcgagtttcttggtcgcggcctggtagcccttggtgtcgtcggccacgcagccttcgtacgtcggcagttccacggtcagttccttggacagcgcgtcgagagcggaggcgtccgagacgtctgccttggccagagcggcggcttctgcagcatcgccattgaccaagttgttgtagtcgttggtggcgttacgtacgtcttccgaggcggcggcgcaggcggccactgcgctatcgtactgagacgcgctgtatgcgcgggtgccgaacaccgcgaccgcggcgataatcgccaccgccacgatggcaatcactatagcgacccacttcgtcactcgcttgttgtgcggctgtgccgtcgcttctgcttggttctgggattcgggctggttgccgttcgcctgctgtgcgtcagtcatatttacctctccttctcactgcccctgtttgtatcttgcggagggcctgtttcaaacaacgggtatccaacatatcgaggagagccgagattgccgggcgtttcctactggttgcgctgtggcgtggccgtttttgtctcatatggcgaaagtatgcgccagaggctattgccggccggtgacccacggcgcatccgaatggacgtgcggaatcatcatcgcgatgaccgccagcagacacccgagcatcaccatcaagatgatgttctcgtgtccgtgcgcctgcagaagcgcgccggtcagcgcgccagacgccagcgccagcattacgaccgcacgccgcccgagcttcgactgctggtggccgtgtgccgaagcgtctgcgacgacgccggtcagcgtcatcgtgagcacggtggtgggcaggtccggcaccgacagcttgcgggcggtggagttctggatgcccattgccggggcgagcagcacgatcagcaggatgatgtgcaggtcgatgtgccgtgcggtggggaagttcaggctcggctgtgaggcctgtgaggcctgggtggtctgtgcaagccgtgcaatcgaggagacgccggacgcatcgtctgcggggccggtgatgagctggttcaaaagatagacgccgattagtgcggcgagtacgaacgacgcctgcacgcaggtagaaaccaacagatgcttgacccggttctcctcgaatcgccggatgatgcgcccgccgataagcgcgccgaccatgaaggagacgagcgtcagcgccgacgtccaccagacgaagccttgggcatgggcgatcgaaaacccaagaaacacgatgttgccggtcacgttggccacgaacacatgccccagcgacaggtagctcagcgcgtccaccagcccggcgacgaacgtcagcaccaccaaggcgggggagagcagaccgtatctgtcttccttgcggggaaccaacgtgcgtcctgcttcggcaagatgtgatgtcatggttgcgacaaggctccttttcgggattgaaattatggcgagaacatgcgtcggtcgacgccgccactctactccctactcccgtacggttcctccggtttccgctcgtgcgcagatcgtcgggacggagaagacgccggtgatgcagatcgatgtgccgaaatcccgcagcgtggtctcgaccaagtcgggcaaggtgttgcgacgtcgtatgaaggtggatggtacgccggagagcgtgccgatgtacccgtacgagatcgccacgcgcctgtccgatttgggacgtttggacttttccgcgcagccggtgccggatgcgacccgtgatgatttcgatccccttgaacgcgaccgtctgcgccggattatcggcacctaccaatccagtgaccgtaatttgttggaactgaccgatgaggagctggagaaatccctgcaattgacggtgaccgtcgatggcaagaccatgccgacgctgaccggtttgctgctgctgggcaagggggagtctctgaaacgcttcgttccgactcatcgggcgtctttccaagtcatgtctggtacggatatcaaagtcaaccaagactatgccggaccattgctgaagaccatcgagcaaatcaacgacatgttctctccttggaatccaagtgtcgagctatccgtcggtctgttctcaatgatggtgccggaattcgaccatcgggcgttccgagaggcgctggtgaacgccttcggccatcgtgactacaccctgctgggacgtgtgcgcgtgcagttggatgatgcggggcttaccatcgccaatcccggcgggttcgtggagggcatcaacatccataatctgcttaccgccgaaccgcatggtcgcaatccctgcctgatggatgctctgaaacgaaccggattggccgagcgtacggggcgcggcatcgaccgcatctgcgaagggtcgctgcactatggacgtcccctgcccgattacacggcgtcgaatgagcgtaacgtgtccgtgtacctgcagcgcagcgcacccgacgtcgagttcgtgcggatgcttgccgaggaacaggagcgcaccggtaagactatgccggtcaacggtctgctgattctgaatatgctcaggaacgaacggcgctgcacgttcgagaccatgaacaagaaactcgatatgagtgagcagcgtctgcgcgctatgctggggcagcttacggaatccggcatgatcaaaggttctggcaacggttctcggcggacatacactttggggtctacggtctaccggcgcaccggcaagaccatcgagtacgtacgtcagacgggcatcgaccgggtgcgatggccggagctcattatgaaattggttgcagagcagaatgatgtcacgcgggcggatgtcatggaactgctgcatgtcgatgcgaaccaggcgtactaccagctgtccaagctcgttaagggtgggaagctgagggtcattggccgtggcaagggggcgcgctatacgatcggtggctttaccgggcgaaagtgatgtgctggcagatgtgcctgtatgggtgctttgtgctgggcatcgtccgaacttgggaagtcgcttcggtacttaggaaggtacctaggaacctaggaagtggtgtgggtaaggttcctaggttcaggtatgcgttcgtgtggcgttcatcggagggggtcagggggaaccttcgcgctgggccgaccggtattcgctgcgatgcgcttgcgatacggaggctgggattgttgcgaaccaaaacgaaaaaactgcgcggagcacacacggggaacgacaccatgggcgctgcgcccgtccccgccagcccatcaccctccacccgcgacgaggttgcgcgaagcgaaagccttcccgaaccatatcgcggcccgaggcgcgccatagttgcaccataagtcagaccaccggcgcgaccggcccgcgaaaacggcggttttccaacgcccccacaagaaaaagataggcgggaagaatagaacaacatgatcgagcgattgaacaaggagatccgccggcgcacgcgcgtggtgggcggcttccccgacgggaacagcgcgttgatgctcatatgcgcccgcatccgtcacgtcaccgcgaacgaatggtcgacccgccgttatctcgacatgtcccggctcggtgacaacctcgtggaagcgaactgactatcgcgccatggacggccacgatccaaagtgcgcaacttttcgggcactaccagtgcattcattagggtgcatatgtctcaagcattatgccgtgagctggtttatagtcccatagccttagccatatggttgatctgagcgcgtccttttgcggggctgattggctccggcctcgtgtggagtatcttattggtacgaaaatcctcggggtgctggtcaaaatagtcaattgccatcttgcagattgactgtagtgcatttatcgtctcgatcagtttcgggcagtcttgataagacattgccgaataatcgtaccttttcgttaggcgatgtaggaagtcctgtgttttcagtttggcggtattccgcacgccggggctatcgacaaggatgaggaatccgcagatcgttgccgcaaaatcatgtgtcaaagggtaagtgcggaatgcgtcgaataattgtttggggttttctccatggttgagctctttgacgcagtttttcacatacaaggtcggtttaatctgtttttcgataccgatcattaggcagttgttgtgcgaagaggcattgcgcataatccggatggattggaacagattcgtcgcgttgtctttgtagctccgctggtttaagtatgccttgtagagtttgcatagtgtactgaagtcaatcacttcccaaagattccaaattgaaggatcttcgaaatacttgttcagcaagccttcggtgtaattggagtgatgataacgtgagttcacatagtctccatggaatgagaattcaccggcttcgtcgaagttgtgcacgatgttgtagccatcttcattagcgtcttccatgatgagttgattgaaacgcactttcaaggcgtgttcgaggttgagacaaaggtagcttagtagcgttcgcaggtggcagtcgatggtggatagatctgcgagatatgcgaaatccagtccacggtaccggccgttatctcgctcgaaattgttttcgaaggctttgagcttgaagaaatacgtacggctggttaggaactcttgcgcgtctgcttccgtgtacagattaaatgtgacgccatgcgatttcagagattcgatctgctgacttacgctgtatttcggacgccgcatagtacctcacaataaccaatggggcgcacgctacaagagcgccgcccca

SEQ ID NO: 2595 - DNA, 58477 bp, Unknown
  R222_15m  MAG No. k141_10292
catcgcaacgccagcgcgggttgcagccgtatggctttgatggccggggcaagagagccgacaagcgaggtgacgatggacgcacaggccgcaatcatcgccgccgtatatgggtatgcgggcggttccagcggcgagtcggcgggcatcatccacggaattgcccagaccagcaccgcggagatgagcaccgcggcgaaggcgatgatgaggccgagcagcacggacgagccgatgacctgtatggctatgctggctctggtcgcgcccagtgcgcggcggatgagcagctcgtgcgagcgttgctcgatgccggccaatccgatgttgatcatgccgatggcggataccgacaacagcaatatcgcggtgacggtgacgccgagttggagaaaaccgataacctgctcgtaatcatcggcattgtcggaacggttccatgacgatatgctgccggccccgacgtcggacaacagatcgtccaacgcggttttggcgtgttgatcgtccacgccttcattgggatggacgaggatggtcagcccatccggttcccaggcttgcggccagtagcgttgcagtgtggtcgcgttgacgtagatggtgggtgtgtccgtcccgtcggcgatgacaccgttcacccgtgccggcacctgttgcggatttcctgtccgggcgagtgccacggtgccgtcatgcacgtattggcgggcgctttcgttgactgcggtttccagcgtggcgggttcgtccgctccggtcagccatgtgccctcgatgatgggggcgggcatgattcttgtccgttcggcgtcggtgatgatgatggtgacgcggcgtatctccgtgttgccgtcaccggacgacgcccatatggcgaggtcgttgaggtgatattgcgccgatgcgattcccggacggaaatacgcgaggcgttcctgcaaagccgtgacgacttgcatgttcgccgatgatggcacgtcgacgatggcgctataggtgggtgacttgcctcccagtcgcgcgttgaccgcttccagatagtcgcgtccgagcgtgccgacgagaacgccggcgatgagggcgatgatgccgatgaacatcgacagggcggtgaggctggtacgcaacgggttgatgcgcagatccttggcgatcatgcggatcacgacagtcgccccctgtcgatcgtcagtcggcgttcgcatcgggcggcgagctgcgggtcgtgcgtgacgaggatgagtgtgaccccgagttcacgaacatgtcggaacagtatgtcggcgaccatgtcgccggtttcggtgtcgagcgcgccggttggctcgtcgcagatcagcaggtcgggatctcccaccagcgctcgggcgatggccacgcgctgctgttcgcctcccgacaggcgcgacggcatgctgcacaccgtccggctcccgagcccgacggtgtgcagcatgcgcgaggctcgtcttctgatgacccgcagggggatgcctccccggtattgcaatgggagtgccacgttctcccatgcgctcagatgcggtatgagggagtagttctggaacacgaagccgacatgccggcagcggaagcgcgcccggtcggcgtcgttccacgcggcgcagtcccgcccgtcataggagagcgttccgtcatagtcgttgttgagcagcccgacgatggaggcgagactggttttgccggatcctgatttcccgatgatggcggtggacgttcccctctcgaacgatgcgctgacatcgtccaccgtcgtcagacgttcgccgtcgggcagccggacttcggcgctcagatgttccaactggatgagtgtgctcatgattgcgctcccggtgtgagattcggagctgtcgcggacaccatgtcaccttcctcgagaccgtcgaggatgatgatcgacgtgccgtccgatgcccccaacttcacgttcacggtggcgaacgaatctccgtcacgcctgctgacctggccggaggcgagcctgccggcgactgcggtgacaggcaggatcaaggcgtcctcgaccgccgtcgcggtcagtaccacggtggcgttctgcccgggacgcgcctgcacgtcttttgggaacaggcattgcagtgtgcgagtcgattccgtcccatgcgcagtcgtcgccgatccggccgtatcttccgctgatgagggcggagtggcgacgccgtcattcactaccgcggcacagtccgtgggcccctgcgcgtcggtgatctggaatcggcccgtcaacggctggtccgggtctatggtcgccagcagcgcggtcgcgtccacgctggcgctcatgccgccataccgtatcgagaacagcggatagtccgcggccatgtcgttgtcctgcgcgaccgtttcgatcacgccgtcgaccggagccgtgacctgctgatcgccgacggtacccaacacgtcgcccgcatgcacgtatgctccttgatcagtcgtggagtggaaccagcctttcgccggagtcgtaagcgagaacacaggagccacctgcacgccggtggaggaagaggataacggcgtgatgccgcccctacgcacctcgaccgtggatgctggccgcttcgccgtggaggaggcgtcggacgatggcgtccgcgacggcgagcaagccgtcatcatcgcgcacatcgtcgtggccgtcacgcacgccaacaggcatttgaacggtgcgatcgcattcatttcgtcggtccgttctcatgccggtaccatgtgcagtccgtggtgtagaagtcccgcatggtcgaatagtcgccgagttcggatttgccgatcacatcgttctcgtatatgccatccttgtcctcgtagtagttcttgaaccagtcggtatccagcagcttgcgcagctgctggagggcgcctcgggctgcttccgcgttggtctggctgttgtcgagaatgtcgcgttccaccgagcactgccagtagacatacgcctgtccttccccacttcccttggcatacagcgaggacgcggcctgcgccttgggtatattcgctggaaacgcatcgccgttcatcagttcaaaggggaaatcctcgacggtcgccttgtattcctcgttcgcctgctgccaggtcagcatgccgccacttcccgaggtgccgccgttcggagtcgtcccgcaaccggacagcagcagcatcactgcggtcagaatggcggccctgcgtcgtgttcccgatttcatcatcatgctccttcggacgattgcacaactgtcgccaaccattagcccacagacggcgatccgggagcaaaagactgtcatgcgcgcgcatgacaacgatacgtcgaggagcatgggatgcgcatacgatgggtggcatgacagacctatcggactcgcataccatctccatcggggtgctggacaacgattcgctcgccctcaacgccatagccgtgatgacgagccgtctccccgcggttccacatcatctggagcaccacgtccccggcgatggcattgcagcgctgcatgacccacggcgcgcgacccgacgtgctggtcgtcgacatggccttgggaggcatcaccggcgcggacatatgcgccagaatccgtcggcgcactccgacgatcggcttggtgtgcgtcacctcctatgaccttgatccatatcggcaagacgcggtcgaggcgggcgcgcaatgcctgatagccaaagatgacatcgtcaaagagctcccgcaggccatacgatgcgcggcacagggcgagcccgtccccggcaccggattccccaccgcacgggaagccaatcgcaaactcaacgaaggacacgcgaccgagggccggctgccggaaaacgacaagccatcgctgtcctccagggaacgggacgtactgcgcctctacgcgcatggatcatccaccgacgagatagccgcgctcctgaatgtcagcaagggcagcgtcttcacctacgtcaacagggcatgccgcaagctccatgccgccgaccgcaaggaggccctcgccatatgcgcccgatacgatctgctttgaaccgtatacaccacccagccatactggccgcggggctggtcctcgcagtggcgatccccgtagagatgggcgtgtactcatcccagaacctgctgtcatggtcgaccatacgcatatcgctgctcgtcgccgtcctgtgcgccatgctcggagcggcaccggtatgggccgcctgtctgctgttcgcggtctcaggatacgcgttgctgtggctgttctcgccgttgacgaccatcatgatcgccgcactgacctccatagcggtcctctcgttcgtcaaaccccgccttggagccgcttccgcactggcggccctcgccgccctcgccgcgaacaacatgcagaacaacctcacctcgtcgaacatcgtaggcatgatcatcatgtgcctatgcccattgtcgctggggttcagtctcaacctgctgttcgcccaacggcaggcgaccgcgacactcaggcaacgactcgaccgcgaacacacggcgcgtcacctgcacgacaccatcagcaacgacctcgcctacatgatcctgcgcatcgaccaggcaagccgcagtgattgccccgccgatcgggagcaatatcagcgccaactcaccgatctgcgcgccatcgccgaaacggcgctcgaccacacccaccaggtgatacgacaacttgaacgcaccgacaaaccagacgatcgcagccgcatcgtcaaaacaaataacgacgacaaaaccgacaggaaaatcgaacagcagcgtgaacggcttgacggcatcattcaatcgcaacgacgtcgccttggcggcctcggattccaaggtgacgacatcctcgggacgttcgaccatccactggcggacgacatcctcgaccttctcgaaggactgctcaacgaactgtacgcgaacatcgccaagcacgccgccccgcacgaatggtacgccgtcacgatctccttcgaccggcggcacgtcatcatttcggcaagcgacgtactaaaggacgaagcggtacggctcggactcggcagcggcctcaagagataccgaaccgttatcgaatccatgtccgggacgttcgacatcaccgatgattccgacaactggaacgcgaacatcaccattccattgtctgtaacacgccggtaaagggaatgacggcctccagctgccagtgggcttgttcggtgtccggctggcttgcgctggtgtgtgttcttcgagcgagtcgatgacctcgtgcgtgtggcccatggcccggctggcggcgtcgcgcaattcgtcgagctgttgctggtattcgtgttcgtcggcgggcatgccgtcggtcccggcgtgaccatcgggacatccagcatgaggattacgcccgtgacaagcgccggccacaggaaccggtccgggcggaacatgccgccgaccaagccggcaagcacagccagagccaacatgatatcgcgcacggtcgcggtgccggggacccgtgccgccatcgagaacacgtactccgcgagcaccgccacggacaatacggcgcaggacgccgcgatcaccggatgcccggcatgccgcaggccaagccggtcggaaagccggggcagagcagatcgtatctggcgcatgcgtccagcacctccttgcggctggcgactcccagcttgtcggccacgcggtgcacgtacgtgaacacgctgcccgtcccgccgctcctgcgacggatgcgccggcacacgtcagcgcccgtgatttttttttccccccaacgccatatccaacaccagcgcatccggcctggtatgcgggttatggcaatgctcgatcgccaccgcgggcgaacccgtgcccccgcattacataaaagtccttggaaacggccgagatcatcgcgcacatcgcatccagggcgaacggatcattgtccaatacgggcgatacggatcgaccgcgccgcagccccgatcatgtcatcatgtcccatgccgctcatcgtggccacggtcgcagccggacgaaacctgctatcatgcgattacttgacacgatgttgcgcttttggccatgcgcaggttgaatgggattgcgccacgaaaggatatgccatgaacgatctgctgattatcgacatgctgcccacgtacgggctgctgttctacctgctgatctcggtattcgtcttcgtgggatgccgtggtctgcgccggaggacctcggatcgtggcctgctgcgttttgccgtaggcgcgttcttggttgtttccgcgctcggcgccgtgttcgctgcgctggtgtatatcatggcagcgcctttggcgcagccggatatggtcgacttctaccgcacgtaccagtcaggagctctgatcttcctgctgggattgttcatcatacaatttgtcttcggcgtcgctgccgtgtatcggggaaagtaacctggtatatcctgcgataaacgcattggcagacacttgctgcctatctgtaaacacaccctagataaggcttgcggccgttggccgagcacagtagtagtgtggtctgctgtgtcaacaggaggagtgtgaccaatgcggctgattgagacatggctggcggaccaggaacgcgcgtttgacttgttcgcgaaattcccggcggaggagacgggattcgagaacccagcggccggcatgaatcgtgaacggttcgccgcatatgtgcgagggttgcgtgatgagtcgcttggcgtcggcctgccggacggctgggtgccagccaccaaatacattctcgtcaacgatgagggcgactatgtgggcatcttcaacctgcgtcaccggctcaccgacttcctgcgcaacggtccgggccacatcggctacggtgtcgcccgcgaataccgcggccacggctacgcgaccgccgggctcaagctcacgcttgccaaggcccgcgagctcggcatcaaggaggcttacctgagtgtccacaaaaccaatccggcaagtcttgcggtgcagcagcattgcggcgcacgtatcgaccatgaggacaagacggaatactacacacgcatcgccacctgcacggagagcgatggcctctatgcgcgaggcgattgacggcgcctcttgcgtgtaaatggccgattatcaatcggttttaatcgatttcgcctcggtcgataaagtcgccgtcgaggaaccaataatcgtgcggatttccgcgtaacgccatgaacggcgtgagttccacgccctgtgtctcagctctgctcagcagataggcgcggataatccacggatactccagcacgcccgacttgagggtgatgatttgctccactctgctgccgctgacgccaaaatccctgccgccgttcggcggtcagacccagccggctcatgttctcctgaaattcgcggatagtcgccgcgcgttgctcactgttcaaagacatggcttcatgaatgttgcattggcgccttaatcatccatagttaaggcaccacgcaacatacgattcgcttacgcagccatccgacgatggttgggatagattgttcggcgaagcggtctatggcgtcggcggtgacgtaggcgtgggcggtgaggcgcaggtacagttcgccgccgaccgcgctggccgcctcggatacccgacgctccgcgtaatcggcaagatcgggcatgtaccggcgcacggcatcacagccccacagtcgctcgatctcgcgcagggactcgggcgcggcgatcggaccgcataaatcctgggtgccttgctcatcgaatcgctccgggaacgggtcagcgaaaccccacgagtcgatcagtggccacaaatcctgaccatcctgaccgccttcgggcggaatcaccagcaatgccgtgccacgcggcgcacacgggaacttatgaaaattgccgacccaccaatcggactgcagtccgccggccggatcggccagttgggcgggagcgtgcgcgccatcaaccaaaatgcggatgccgcggcgatgggcttcggcggcgatgcgctgggccgtaaacagcatagcggtggcggaagtaatctggtccaacacgatgaacgacgtacgctcgctcatctgcgcggtcacggcgccgaccacgccatcctcgtcggcgtcaatggtaactggtgcatcttcctcatccatgcgaatgagacgaatcgcctttcatcccaatgatttcgctctcatggctgatacccgcatgccgtcatgttccgtaccttggaatcagaagtcgagagtcatggtccaaaaccgaatggagcggaccgaagcagggagcattgaagatgggatttctcaagaacttttccgaaccgtttgcgttcgcgctggcattgtggccgtttgtgtccatgctgctgaccgtgccggtgctggcgttgctgtatcaccgcgacaatcgcatccgactgtcgtcggccatagtggcgtatggcacggtgctgtacctgctcggcctgctgtgcttcacactgtatccgatgccggccgatgcggcagcctattgcgccgcgcaccatctgacgccacagctcaatccattgcagttcatcggtgacatccgtaccgatggtctcaccgccgtactgcaaatcgcgtttaatatcgtgttcttcctgccgttgggcttcatcatgggccgtatctggcgttggccgctgccggttaccgcagtactgtcattcgccacgtcgctgtttctggagacgatgcagctgaccggcctcatgggcgtgttcccgtgcgcctaccgtctgttcgacgtggacgatctcctgtggaacacgaccggcgcgctgatcggattcgcgctggccatgctttcgctgcgcctgattccggcgcgggtcgccgatatgacgccgaccaccacacctggcttcatgaggcggctgatcacgttcatcatcgacatgacgctgatcgggttcgccgtgatgccgacgcatctgttcgtcatgatcgtccgcccaaacctgccctcgggctccaacggctcatggcagtcgatggaaccgttcgactggaccggctcgatcctcttcctggcggcgctcatcctcttcgagggcgtggtgccatggttgcgcggcggctgcacgttcggcggcagcttcacgcacatgacgatagagacccggccgcgcgaagggtggcttcgcgtggcgttctatgtggcgcgcatggcgacgctgatcgccgtggtgtggtggcatagtggcggattcaatctgctggtgttcatcggcctcggcatcttctggctggtcaagcgtcagatgccgtacgacctgatataaaccggcgctccgctgcttggcgttacaggaaaacctccgaccactggtcgggattcggaatgctgcgcagcgggccggccaacgatacggccaatcccgctacggaacagaccacggctacggccatcaccgccgtgaaaccgagatctggctgttgcaacagccagccgaccatcgccgggcatgctgcgcccagtatgccgaccgtggtttcaaatacggcagaagcccgcccctgcatgttgtcgggtgtcttgccgtagagaaagcccagcagaccagcgttcaacgcggggaacggcaggccggccagaatctggcagatcagaatggccgcgtagctgtgcaggaatagcagtggcatctggctgaccacgaacaacgccagcgcgcccgcaatcagtttccctgtgggaaccatatcgactagcttgttggccaacagcgagccgaccaaagtactcacgcccattgccgtgccgagcagtccgatcatgaccgcgttggcgccacgggcggccaacatgatctgcgcgccggtgatactgactacgcaggcgatgttcacaattgcccccgagtatgatcgcggataggaagacgcgcttggtcagggcccatcgccagccttcgaccaagtgcgtgggaaatggcacaacagaagtgccgtgggcccaaacggtgaccacggcttagcgcgacgagtcaacgcgcattagctgtctgcgaacgacaccaacaccttgtccataacaatgccctttgcaaaaaccaaactccaattgttgtaccagttcgagcacgggaccaggcacgtcactgggctcaacataatcggccatcaatggtttctcggcttcgaggggctgatttcgtccggtggggacatctacttggctttcgaggggctgctcaaacgccaaaccacgagtataaacggctttgcggcaacgccattacgccattgtggagccttgtctactcgggcatcagccccttgaaacggagatagatctccggcaagtgccaaatcagcccctcgaaatcgagttaggcgttgttttcgcgtttgcgctgccgttcgagtgcgtaataggccgcgtagcagcaggcgacgaacgggatcatgcaatacagggtcgaacgctgcgtatcatcgagcaccacgagcaccagcgcgccgatgcacatcacgatggccagccacggcagcaccgggaaaccgggcgcacgatagccgagctcatcggcgctgtgcccatcccgcgcccattcgcgccggaaacggatatggcacacgcatacggagaaccacaccaccagcgtcgccaaacctgacacggcgaccaacaccagatacacggtcgaggcggcgatcacggaagacagcaacgccagcagtgagcccgccatgctgaacagcacggcccacaccggcacaccacggaaattcgtcctagcaaaacgttcgggaatcagccgctccttggccagcgaccacaccatgcgcgaacacacgtacaggccggagttcgcggcggaaagcacggccgtcaacaccacgaagttcatgatgtcgccggcgaacggcataccgattgactggaacaccagcacgaacgggctcgtatccacgccggcctgatgccaggggatcaaggccgccatcaccagaatcgagccgatgaagaaaatcgccaggcgcagcaccgtggtgtgcacggccttgggaatcgcacgcgagggatccttggtttcgccggccgccacgcccaccacttcggtgccggagaacgcgaacaccacggtcagcagagtcgagaaaatcggcgcgatgccgctcgggaaccagccgtcggccacgaagttgcccagcaacggcgcggaatcatgaccggcaatcggtatggcgccgaagatcgccagcaggccgatcacaatgaacgcgatgatggcgaacaccttgattgacgcgaaccagaattccgcctcgccgtacagccgcacggacatgatgttgagcgcgaacaccaccacaatgaacacggccgaccacacccaggacggcgaatgcgggaaccatcgctgcatcaacagccctgcggccgtgaattcggaggcgagcgccaccgcccagttcagccaatacaggatggcgatggtgaacgcggtgccggggccgatgaaccgcttcgcatacatgtggaagctgccggcgtacggcatggccacggacagctcgcccaacgacaccatcacgcagtatacgagcagagagccggccgcgtaagcgaggatcgcgcccaacggtcccgcctgatgaatcgcgtagccggagctgacgaacagaccggtgccgatcacgccgcccagggagatcatcgtcaggtgacgcgactccatcttccgttcaaggccggtatcgtccttgggtgtgccggctgccgccatgctcgggtctcctttggtcgggtgaacagttgtgtctcgtgtcggttgtgcgggcggcgctcgatgccgcctaccatatgatagcggtaacacgaacagcgagtggaacacgaggagtttggaatgatggaactgtatatcggatcgcatctgtcgacggccggcggatggaatgcgctgctggaacgttcccatgaggagggcggtaccgcgttcgcgttcttcccgcgttccccgtacggcaagcgttcgaaggcgctcgacccggccggcgcggcggcgttcggtgcgcgtctgaaggctgagggctatgggccgttggtcgtccatgcgccgtacgtctacaatctggccggcaaggatgaggccaagcgcacattcgcgatcgaggcgttggccgaggacatcgagctgctgaccgccatccgcgaggccggccaggaggtgtatatcaatattcatcccggcgcgcatgtgggccaaggctccgagaccggctgccggctgatcagcgagggactgaatcaggtgttcgagcgtacgaccggcgtcatggtgcttctggagaccatggccggcaaaggcacggaatgtggccgcaatttcgatgagctcgccacgatcatggatggcgtggagaataaggcgaacgtcggcgtcacgttcgacacctgccatgtgttggatgccggctacgatttggtgcacgactacgacggcgtgatgcgccagttggatgaggcgatcggcttggccaaggtcaaggcgattcatgtgaacggttcgcagttcggcctcggctcgcacaaggaccgtcacgccaatatcggggagggccagctcggcatcccgttcttcacgcgactggtcaacgacccaaccatggccaagctcccgatgattctcgaaaccaaggagcagacgcccgccacgcatcgcgacgagatcgagttgttgcgcggattggtgcaaaagtagtcgtagtcgaccaatgtcgagcagaagagacctgtttttgactgatggctatacgaggttagctatcagcggggcgttgattgacccgtcttcatatacagctgcatagccggttccagctgcaagagctcaaaacagacgcatgggttcggcggaatccaatggctgaataagacgtttgccgtcgctgttcagtggcgcgacttcgtgaaattgcagatgccgagaaagcatggtacccgcttcccgcatggaatctaacagtgcggctccgtcaacggagcggtccagccatgaggcaaccatattccgaggcgccagcaggggcatgcgatcatgcaccttgacgaactcgtccgcggcagggcaggtgatgatggttgcggtcagctgccatggcgatgcgggagacggcctccaccatgagtacaggccggccaaagacaatagttcatcatgtggtgcgtgaaaatagaacggcctgcgacctttccattcgtagtagccggaagcggggatgatggctcgcatggattttgtggattcggcgaacgccggcttgacatgcgcagactccacacgcgcattatatgtggggtagctcagcactttgctggcgctccatcgcggcaccagcgaccaataggcaccggtcagatgacggcggccatccttgccctgtgccaccacgccaatgttctgcatgggtgcgatgttgtaggaaggctgtggcagagtgtcaacgcgcacgtcatcctcgtctaccgcgaactgtgaggccacggcatcccaatccaaatcaagcgcgaatctcctgcacatgcgcccagtctatgccatcaatggaatcaatcccaggccgtatgaccgatattcatggcgattttcctttttgttggccgctctggttccgtagcgatacgaaccaacgaggaatagcccagaatgtaggacgggttcggcaatcgggacggggcgtgacctagagtggcgcatgaccgaacaccaacaaagggaggaccatgtcggttttggacgaactggtggcgggagcgctggaggatcagcgcgcccgtgagctcaccgtatcgcttgaggacgtgaagaaggccgcgctggcggccccggctccgattgacgcgacacgatggcttaagcgcgccgacggcatccccgtgatcgccgaaatcaagcgcgcgtctccgtccaagggccacctgtccgacatcccggacccggccgcgctggcccgcgagtacgagaggggcggcgcaagcgccatctccgtgctcaccgaaggccgcagattcctcggcggccttgacgatttcgacaaggtccgcgccgccgtgcacattccggtgctgcgcaaggacttcatcgtcaccgactaccagatcttcgaggcccgcgcccacggcgccgacctggtgctgctcatcgtcgccgcattggacgacgcccagctcaagcacctgctcgacctggcgcacgagttgaacatgaccgtgctgatggagacgcatacccgcgaggagatcgaacgcgcacgccaggccggagccaaggtgatcggcatcaatgcgcgcaacctgaagaacctcaaggtggacgtgaacaaatacaacgaactcgcggccgatctgcccgataacgtcatcaaggtggcggaatccggcgtattcggcgcggtcgaggtcgaagactacgcccgcgcgggagcggatgcggtactggtcggcgagggcgtggccaccgccgatgatcatgaacttgcagtggaacgactagtaaaggcaggagcacaagtgaaagcatccgaaaccaccccgctcagcgaacatcagggaccgtattggggccagttcggtggccgctatgtgcccgaggccctcatcaccgccctcgacgagctggagcgcgtgtacacgcaagccaaggccgaccccgaattccacaaggagttcatgacgctccagcagcgttacgtgggccgcccgagcccgctgaccgaagccccgcgcttcgccgcactggtcaagcagaagaccggtctcgacgcccgtatcttcctcaagcgcgaggacttgaaccacaccggcgcgcacaagatcaacaacgcgctcggccaggccctgctcgtcaagcggatgggcaagacccgcgtgatcgcggagaccggcgccggccagcacggcgtggccaccgccaccgtgtgcgccatgctcggcctcaagtgccgcatctacatgggccagatcgacgcccgccgtcaggccctgaacgtggcccgcatgcgtatgctcggcgccgaagtggtcgaggtgaccctcggcgacaagatcctgaaggacgccatcaacgaagccctgcgcgactgggtcaccaacgtcaaggacacgcactacctgctcggcaccgtcgcgggcccgcacccgttcccggccatggtgcgcgacttccagaagatcatcggcgaggaagccaagcagcagctccaggactggtacggcatcgaccatccggacgcgatctgcgcctgcgtgggcggcggctccaacgccatcggcgtgatgaacgccttcctggacgacgagcgcgtgaacctctacggctacgaagccggcggcaacggccccgaatccggcaagcacgccatccgcttcgcccccggcaccggccagctcggcatgttccagggcgccaagagctacctgctggaaaccgacgaaggccagacgctcgacacctactcgatctccgcaggcctcgactatgcgtccgtgggccccgagcacgcatggctcaaggatatcggccgcgtgaactacagctgggccaccgacgaggaggccatgaacgccttccgcgacctgagccagaccgagggcatcatccccgccatcgaaagctcgcacgccgtggccggcgcgtacaaggccgccgccgatctgaaagccaagggctatgacaaggccgtgatgatcgtgaacatctccggccgaggcgacaaggacatggccaccgccggcaagtggttcggctacctgaccgacgatcaggccgccgcgctcgatgtgaccggcgcccacggcaatactgtcgcctgaacaagaagaggagattgttgattatgaccaacgaagcaaccacgccgtccggccagccgctgggcatcagccacaagcccagcaagtcggtcgctatgttcaccaagttcaaggccgagaacaagcctgccttcatcggctacctgccctacggcttccccaacccggacgtctcgcttgacgccttcaagacgatggtcgagcacggcgtcgacgccgtggaaatcggcctgccgtactccgacccggtcatggacggcccggtcatccaggctgccgcctccatcgccctgaacaacggcgagaccatcaagcgcgtgttcgaggccgtcgaaaccgtggccaacaccggcggcgtgccgctcatcatgagctactggaacctcgtgtaccactacggcgtcgagcgtttcgcccgcgacttcgagaacgccggcggcgccggcctcatcaccccggacctcatcccggacgaggcgggggagtggatcgaagcctccgaccgtcacggactcgaccgcatcttcctggtctccccggactcgtccaccgagcgcctcgaaaccgtggcccgcaacgcgcgcggcttcgtgtatgcggccgcccgcatgggcgtcaccggcgaacgcgccaccatcgacgcctcgcccgaactgctcgtggagcgcacccgtcaggccggtgccgagaacgtgtgcgtgggcatcggcgtgtccaccgccgaacagggcgccaaggtcggctcctacgcggacggcgtcatcgtcggctccgcgctcgtgcacaccctgctcgcggacgacaacaagaccgcacgcgacccgaaggaaggcttgaagctgctcgccgccaagagcgaggaactggccgaaggcatccacaacgcccggtgaacacccggtgcgcctcacgcgggttgtgccgtgacacggtagggtagtcacagagcatcaagcacaacccgcgcgtggacacaccatgagcaccagcaagtagaggcacgatgaatctggcttatattccctcgccgaccttctccaagttcgagatcggcccgttcaccatccacatgtacgcgatctgcatcctgatcggcatctgcgtggccgtatggatcctcaccacacgttggaagcggtacggcggcaccttcgaccagattctcgacaccacgctcgtcaccgtgccctgcgcgctggtgggcgcgcgcctctaccactgcatcaccacgccggccgactacttcccgcccaccggcaacttggtcaacatcctcaaggtgtgggaaggcggcatggccatcttcggcggcatctccgtcggcaccttggtggcgttcctgtggtgccgccacaagcactatccgttcgcgatcttcgccgatgccatcgcccccgcgctgcccgtggcccaggccatcggacgactcggcaactggttcaaccaggaactctacggctggcccaccacgttgccgtggggcctgaagctcaacgacgcggacgccatcggcaaatccgaaatctgctattccggcgcgcaatgcccggactacaggaccacgctgttccacccgacgttcctctacgagatgatctggaacctcatcggcgccgcgctcatcatctacctcggccacaagctcgccgaccggctcaaggccggccagcagttcgccatgtacctgatgtggtacggcctgggccgcacctggatcgagaacgtgcgcatcaactactccacggtgatcctgggcctgaggaccaacgtgtggaccgcgatcatcgtcttcgttctcggctgcatcctgttcgtcgtgctctaccagtacggtccggaccccaaggcgcaggcgcgcgggcttgcggcggtcaccgccgacgagctcgaacgccagagcatcgaagaggaacagcttcgccagaagaagcaggccaagcgcactaagtgacaccacaataaacagcgccgaaacagcgcgaaacacgggaccccaagtcccattgcacagataaggtaggaaaccatgagcaatatcgcaatcgcacccagcatcctgtccgctgacttctgcaacctcgaacgtgatctcaaggccatcgccaacgccgacctggtccacgtcgatgtcatggaccatcatttcgtgccgaacctgaccctgggcgagccgatcgtcggccgcatctgtcaggtcaccgatctgccggtcgacgtgcacctcatgatcgaggacccggaccgttgggctcccgaatacgccaagctcggcgccgcctccatctccttccacatgggtgccacccacgcccccgtgcgtctggcccgacagctgcgcgagatgggctgcaaggcctgcttcgccgtgcgtccggccgaaccggtcgagccgatcttcgatatcctcgacgagttcgacatggtcctcatcatgaccgttgagcccggcttcggcggccagaagttcctcgacaaccagatggccaaggtccgccgcctgcgcgatgagatcacccgccgtggcttgaagacccgcatccaggtcgatggcggtgtgagccccaagaccgcgcacatcgtggccgaggccggcgccgacgtgctcgttgccggttccgccgtgtacggcgccgagaatcccgcccaggccatcgacgacatccgcaccaaggccgaggccgcgttcaaggcctgagctccaagcctgaaccgcaatccacctttcatccataaccgcaagaaaagaatctgaatcacatgaagacgtttgaatccctgttcgccgaactgtccgaaaaggcccagacccgccccgaaggctccctgaccgtcgacgagctcgacaagggcacccacttcatcggcaagaagatcatcgaagaggccggcgagacctggatggccgccgaatacgagggtgcggaccgcaccgccgaggaaatgagccagctgctctaccacgtccaggtcatgatgatcaagcacggcctgacgcttgaggacgtctacaagcacctgtgagaggaacgcaaatgctgagaatcgcagtgcccaacaagggcatgctatccgaacccgcgtggaacatgctggccgaggccggctaccgtctgcgcaccaaccctcgccagctggtcgtgcaagatcccgacaatggcatcgagctgttctacctgcgtccgctcgatatcgccgtatacgtgggccgcggcgccatcgacgtcggcatcaccggccaggatttgctcaagaactccggtaccgccgcgctcgagcacatgccgctcggctttggtgcctcgacctttcgtttcgccgcaccgaacgaatccccgatcaccactctggaggatgttcagggcaagcgcgtggccaccacattcgataagctcgtacacgactatctggtcgagcacggcatccaggccgagaccatccacctggacggtgcggtcgaatcctccgtgcagctgggcgtggccgacctcatcgccgacgtggtctccaccggcaccaccctgcgcaacgccggcctgcgcgtgtttgccgaaccgctcatgcactccgaagcctgcctgattcgctcgccgcgtctgaacgagcaggatccgcgtctggccgtgctgacccgtcgtctgcaaggcgtgctcactgcgcatcagtatgtgctcatggactatgacattccgatcagcaaggtcgccgccgccgtggccgtgacccccggctttgaaagcccgacgatctccccgctgcatgacaaacagtggaacgccgtgcgagtcatggttcccaaggccaaggtcaaccagctgatggatgatttgtacgaagtcggcgcacgcggcatcatcgttaccgctctgcaagcctcccgcatgtagactgttagtcgatatgaccaaccagaaagtcaacgccagatacagtccggaagcacgtgacatctatttcaccgtgcccaatttgatcagcgcgctgcgaatcatctcgattcctttcatcagcgtgctgatctccaagcatgaggtgattgcggcgctagccctgatcgccatttcctcggcttcggacggactcgacggcatcatcgcgcgcagattcaaccaagtgagcaagatcggtcagattcttgatccgatcgccgaccgactgctcattttctgctcgattctggccctcagcgtcgccggcatcatcccatggtggatgctgattatcgtgggactgagggatctgtggatggcgattcaggtgctatggcttgcccagtacggttatggtccgctgcccgtgcatttcgtgggcaaggctggtaccgcgctgctgatgatttccatcgtcagtcttattttcgccgatttgggcaccagtacgttcttccacttgctctacatcgccgcgctggccgccggcatctggggcatagccatgtattggctcgccggatatatctataccaagcagggcgtcggattgctacgcaaggaactgggggagaagtatggcgcttgaggccatggccccggtctcgttccccatacccaaggagaatgagccggtacgacgccgcgccgtgttctcccactcagtccgaggcgcggaatcgcatcatgcgctttccccggatgacgccgccgccatccgcaccagacgtcgccgtaaaaccaacgacgattcgcttcagctcatcgatgatcttgtcaatcgtccgatggatccgatgttctccgactcacgactggtccatgagcatcgttcgaccttctccatctggtttaatcgcatcgtcgtattcatcatctgtgtcggcgttggctttgcctgcagcctattcgtgcaacagttgcaatccgatccgcgtaagcaggtacggcagactttggccacgcaattggagaatcgcaactcgcagatagacgaactcaccacggacgtcaataatttgcgatcccaagttgacgaacagtccaagaaaatctccggcagcgtgaaaagcgacacgcttatccaagacgaaatggtcaatggtgccacggtggtcgaaggcgaaggaatcaccatgacgctggccgatccaatcgcggcaagccagtcggatcaatcctcctcgacgagagtcggcacctccacgaacatccgagtcatcaccgatctggatctgcaacaactggtctccctgatgtttcaaaacggagccgaagccattgccatcaacggtaataggctcggcgcgcaaacctcgatacgcaaggccggcgggcatattctcatcggcatgaccgcgatacaaagcccctataccattgaagccataggcgataagagcgccttggccgaagcgatgggggagaagagacttgcaagtctttacgattccttcaaggaagccggtatctacccgcaggtgagcaaatccaattcgattacacttgaggcagcagtcactggcgaagtgaagtacgcggaaaggaatgaataatggcagccgttctgggactgatcatcggcgtcgtcatcggcgtgttcgtcaagccggacattccgatcatcgtgcagccatatctgccgattatggtggtcgctgctcttgacgccctgctgggtgccgcgcgagcctatttcgagcgcagcttctccgaccgcgtgttcgtgatctccttcctcgccaacgtggtgacggcaacactgctcgtgttcctcggcaaccagctcggcgtcggttcgcagctgcagacggccgtcatcgtcgtactcggcatccgcatcttctccaacgtgtccgcgatcagacgcttcatcttccgaggctgacaagggtactgacgtatggcacgtaaagcacaatcagacaacatgctggagaaaatgcgcgaccagcatgcacaagacaaggtcaacgaccggatggaaaccgggtcgttccccacggtgcgcaagaagccccggaaggatctcaaccgggccagcaacaaatcacggctactatcctcgattctcattgctctgatgtgcgcgctgctgggtttcgcctacatgagccagatcaataacactaaatccacgtacgaaacgatggacgagagcgaactggtaaggctgctgaacgagtcgaatacgcaaatctcgaatctcgagcagcgtaaaacccagttgaacagccagctcaactcactgaaatcggcggctaacgagcaggagcaggcgcgtaagatcgccaagcaaaacgaagagaccagcggcttgatctccggcagactcccggcgaagggccaaggcgtgaccatccggatcggacgaggctcgacgactaaagtggacgcctcaatcatgttcaacctcatcgaggaactccgcaatgccggcgccgaggtaatcgccatcaataacgtgcgcgtcatcacctccacctacattcaggacgccgaggaaggcttgatcgtggatggcaccaccatcaagcccacatacacggtgaaggccatcggcaatccgcaggagctgtccaacgcagtcgatatcgccggcggtgtgggcgctcagctccaggtgaaatacggatccaacgtcaacgtgcagccttctgacagcatcattatcgacgaagtacgcgaagctacgcaaaaccagtatgcaaagacggtagaataggggattatgaccaacccgattcctagcgcaggcgaaaccaccattatcggcctgcccgcgattaatgtactgcccattaccaccaccggcgatcgaccgctgactcaagaggatctggacaccatcaccagattgtccgagggaacggcattgctgatttccgccaggggagcggtctcaggttctcgttacttgcttgacgaggatgaaatcaccgtcggtcgtgatccgcgagctgatattctgctcgacgactccaccgtatcccgtcagcatgccgtgttccgcagggtcaacggtcagttctttgtggttgacgcaggaagtctgaacggcacctacgtgaaccgtcagcgtgttgatcaggcgtcgctgaagaacggcgacgaaatcatgatcggtaaattccgtctcgtgttcttcacgaaatccgccattatttcccaatagtccacacccagcacggggttagactgattgcagaaattgcaatcatgtgattacaccagtgtgagtcacatgcgagacacgcatgagttaggggagtgccatgggacagacagggctgcatcttcatgtttcgcttgaggaccgtcagaatctgaacgctgacgcgattcagggggagttgttctccaatgtcgatactgaggagatcaagcgcggctaccgtggcactgtggcctccaaggtggccggcatcacgtaccgacagctcgattattgggcacgcaagcagattgttgagccgtccatcacgccgtctcatggctccggttcacgccgactgtactcgtttaaggatgtggtgattctcgctgtatccaagaagctgcttgatgccggtgtgaatctgcagaacgtgacggcggccatcggattcttgactcaacgcagcaccgatcagctggccaatgtgaccatcatgtgcgatggtcaaaacgtgcacgaatgcactaccagcgaacagatgctcgaactgttgcaaagcggtaaggcagtgttcgccgtgtcggtgggttcgttgtggcaccagattgagacggccttggaacaggaagaatatattgatcttgaggccaagccgctgacgattgccacgggccgtccgattgatgaactgactgccatgaggatgcgcaagaagctcgaggcacagcgcttgcaacgcgcaaccgcctgatacatgtatggttgttggcgacttgccggctttggtcggcaggtcgctttgttgtatgtgttgcttttgttgcctgccatcttatgtttttatatgttgcggtgattattatgactgattggaggaccgggtgaacgggattgttgttggattgttgccgggcgttctgtggatggtcgccgtcatctttgctgtgtccatcatcactataacggtcagccgaggccatctgttcacgccgaaacgccggcgaccgccggtcgatccggtcgactggccgatggtgaaaacgcatttcatgtcgtttgcggcggcgctgattccgtttcccgtattgacgtttacagcggatttgatggatgctcgcatgctcgcgttctacgaccacgcgcaattgcccggagcaatcatcatattcgtgctggtgctgctggaactcatcgccatgtatctgcaggcacgcaacgcctcagaaaccgaaatggacaagcgtttgggcgttgcttctcaccggaataaggatgatgttgcgaagtagccgattctctgcggcgaggctaatccgcagctagatactactggttcggctaaaatcaccacatactattaaccgataacgtacgttatgtcagattagttatccttgacgaggattcagtcgcctgtatcaactagtccacgcataccaggccgacagccaaaaggccgacagccaaaggagcaccggagcgaccaccgcaattgcaagaatcgccgtgcctttcagccaatccttgtcatctcgtttccagtggaatgctcgccaaatgaaccatatcagcatgggaatctcatacagcgacaacaatggcaaaccgatgaaaaccaggtcgaagcccgcggcgcaggctccatcgcatcccatcatgaagaagtcctcgccgttgtgtttcagtgcgtttggaaataacggttcacggcttcttcgatctgctcgggcttctcgaggatctcgtacgcgccgtgttcctccatctcaccggccggagcgtagccccagcggcagccgatggcgtccaaattgcaggcgtgggcgccgtcaatgtcggtgtagcggtcgccgatcatcacggccctgtcccccgctgcagcatcaaaaccgattttgtcgaagcagtaccgaatcacctgatctttgtccagacgggaattgtctttggaagcaccatagatgccgtccaacagttcggtcaggtggaaatggtcgcagataggcatgcactggtattcgggcttgcagctggccagtgccaggtagtaaccgtcggcatgcagtttgagcagctgttcacggatgcctgggaatacgacgttcaccagtcgtccgggcaccttgttgccgggctcgttcggatcgtcgaacacggcacggtctccgtagtagctgcggtagatgtccacggcccgatccagatcttccgcaggcacatgattgcgacgcagagattcaataatcgccggtccgatgaagcgtcgcagttcggcggcgtccggaaccggtcgaccgatctcttcgaaggtcttgatgacggagccgataatgccgccgtcggacttggtaagcgtgccgtcgagatccaacaggaccactttcatcggatgctgtgccattgagattccactcccccttgttcatgtcgactgctttgaatggtcgtcaaacaatgcgacttgttccaacaatgattatgcccagtcgggatgactgggcatcaagttcacgtgttgttcagtaggagatcactcgtagtcgggaatccaaccgtcacggtgcatttgcaggcgcttttcgagcagggtggccagttcctcttcgctacggcgttccagcagcatgtcccagtgggtgcgggtgggtttgctgatttcgtcgccctcacggtcggcgtcgccctcacggtgggccacggaaccacaacggcactcccactcgtccgggatttcggcaccctcggcaaacggcaggatggtgcggtggcccttcgggcatacatacgccacatcgtttcgcgcggcgaaatcgacgttgtcgtcggactccagcgatttcgctccgatgctcatgcccctgaggctacgttctgccatatcggcatcctccttgaaagatctttaaccctactaatttacgcaacagttcggacttggccgctattccaagcttccgacgtcggctgacaaactcccgtcaaacagccccgtcagtccacgccggagtaggccaccacgccacgattgacccggtcggccgcttcgtgggcgaggcctgccagccgctctcccccgtcgaacggcagcggctgggcgacagcaatctgctgcagcacgtcagccagtcgtttggcagtgcgcacgaagtcgccgccggtcatgtcggtgccgtacaggcacgatcccagcgaaccgccatccgcccattcatacatgatgtcgagaatgccgaaatccggccgctgcatctcgtccagaccgtgatcctcgcacaggatatcgatgtcttcacaaatgcccttgagcttggacgaagcgatggcgatgggcccggagatgccgcccgggtagtgcctcggttcgccgtctcccccgcgtctggcctcgtataccagtgaagagagcacagcggccagtccgttggcgttgagcttgtcgaacgtgccggcgagcagcgcctcgcacagttccaggtcatgttcactgtagatgcggcgcagcagcagacctttttcagtcaacgtcatgtcaatgtggccggccgcattgacatgacgttcgaggtaaccaagcccggtgagaatatcgcagatgcaatcgaactggcgtgccacggacccggtgcgggagtcgtagcgatcggtgacgcgctgcagttctcgagtctcgcgggcccagcggtggccccatttgaggtgttgctggaggtccgggcagttgcggcatggatgctcgtgttccgccttgcgcaaatcgcgaatgcgctggtcgaggttctggaaagcgcgtgaacgctcctgatcggtcaggaacacttcgtgcttcagtttgcggcggccttccttttcgatgtcgctcagctccatacgcagggtcatgaactgtttgaagtcgccgtgttcgcatgcgagcgcctgttcgtatccggccagcgcgttcttcagtgtgttaatctgcgattccagctgccaggccgattcgttggcctcccactgggcaaacgactggtccagggtgacgcgcgcggtctcgtagtcgctggagttgagcaggttcacggccatgttgaacgtgggtcggaagctcgagtgcagcgggtagacacgcttggatgacagcgaggcggccgtggcgggcacaaaaccgtgatggtcgaccacgatggcgtggccgatggtgtcgatgccgcgccgaccggcacgaccggtgagctgcgtgaattcgccgggcgtcaggcccacatgaccggtaccgtcgaacttttcgagtttctctaccaccacgcagcgggccggcatattgatgcccaatgccagtgtttccgtggcgaacaccattttgaccagaccttcttcgaacaatcgttcgactatctgacggaacagggcaatcatgccggcatgatgcgaagcgaagccttcttccaatgcaaagcggaacttggagaactgcagggctttcaggtcttcctgagtgagttgcccctccaccatctcatccacgatgcggcgaatcctggtcacttcctcatcggtggtgagctccagtccagcgttgatacactgttccacggcctggtcacagccgttgcgcgagaagatgaagtagatgccgggcaacattcccaggaagttaagctcgtccaccacggcccagcggcgcggggtgtggcgttccgctttcggggcacggtctttggcgcctttgccgccgcggcctctgccgaagcccttgcgcttatcggggcgttcctcgccgcgccggcgtgcggccttgcggtccaactggtcgagccggttgatgagttcggcgttgagtttggtggtctgctcgccgttgccgtcgcggcgatagaggtccagcacctcgggctcggtgtgttcgtccgcctgcacgatgacgtgctgttccaaaggcacggggcggtgttcgctgatcaccagttttgtgtcgcctcgcaccgaggcaatccagttggagaaatcctccacgttggacacggtggcggacaggccgacgatcttgaccgtcttgggcaggtggatgatgacttcctcccacacgggcccgcggaatcggtcggccagatagtgcacttcgtcgagaatcacgtagcgcagtgcgttcagcgtggtggaacgctcgtagagcatgttgcgcagcacttcggtggtcatgaccacgatgtccgcctcggaattgatcgaggtgtcgccggtgagcaggcctaccttgtccgggccgtacacgtcgaccagatcatggtatttctgattgctcaacgccttgatcggtgtggtgtagaaggctttgacgttgcgttcctgggcgaggtaaatggcaaaatccgccactacggttttgccggcaccggttggggccgcgaccagtacgttgctgccggcttcgagcgcgtcattggcttcggtctggaagtcgtccagttcgaaaggcagggattcggcgaatcgcgctgctgcggacgcccgatggcgttggaccttttggaatgatgcgtaccgctgcgaagggctcagcgtctgggaatcggcattgcccttatggtgttggtgacgtgccattgctgctttccgttagttgttgaatcgcttccagcgggcccatgcctgggtgtggcgttcgcgcttggcggccttgccgcgaatcacgttcgcatgggcctcggcataacgattctgtgccacgctgagcggctgagtgaacagaggcggctcgctggtgtcggcagaggtgccgggctcccccatcgcggccacgcgttcaccgagttggccgccgatgtcggacatgtctttcaaggcacggagtccatgaagggctgcatagatgagtccggcaacaatcatggccagcatgaacagggccagaatcagccatatccaccaaggcatgaaaggctccttacttgttctcgctgatgctcagttcgcgttcggcgcgtgccacgatcatggtgcgcaacgtttccggggcgaccgccgtgatatgacgcgcgtgggcgatgcagaaggccacgaaccaggaatcggaggaaacggtcagatgcaccttttcaccggcaccgcattgttcgacggtagcgcccggcaatgtcttgatgaatgccagatcgcgctgatcggtgatgaacaccgcgtcggtaccgttgtcgaaactccacttgcgcagttcgctcaccggcatgttcgggatgttgatctgcttggtgggcttgaccagttccgccttttcgatacgggccaatcgcagtacctgccagatgcgcggcttgccgttggccttgtcgagggtcttgtctttggagacgtaggcctttttgtccttgggtgcggcggaaccaacgtccgtgtagacggcggcataatacacgccttcgtcaatgaagatcttggcgggggccaccagcttgcggcgggtacgacctgtaccgtcggtgtactccatgtccaacagcgaatcggtgttgatcgcacgcttgacgatggagaagcttcggggctccagctcatagccggtcaggctcagccacggggtctgaccgggactgacatgacggcgcaaacgctcatacagggattcggcctgcccacgctgcttgtccggcagcaacggcgaatgcgccaggtagctgaccgaggcggtgagcatgctgaggtattgcggcgaaatgccggcaagacgttcaaggcccagcgaattggtggcggaaacaataccctcggcatccagcagcggccagtcaatatcgaagaactggctgccggccatctcaccatcgtcggaaacggtggtcagggtgttgatgtccttatggatgatgttgacgaatttcttgagttcatcatcgttctttggcttgccgataaagcgttcgcccagctcgctcatcgagaattcctcacccagatgagcggagaggaacagcatcagacgcaggcgacgatcaacctcactgcccgtttggaaagcggagccgttcttcttgttctgagccttgatagactcgggatcacccggctctcgcacatcgcgactaatcgacggggaaaccaccgaagcgctcacaggactggcggattcgtcggccagagtgaaccggctggcggcgtgcaaacggcgatgataagcgtccacagcctcttgcgggctgacaatcgtggcccccggatgctcaagcacaaacatggccaaatcgtcggaatcggtgtatgccacgttcaggtgttcgccatccacgtcaacggtggcggcgaaacgacgcgaatcaataaccttgaccagtgaatccggaatgggctgcgtccccaagccaggcgcaatcgaatccaagccaagcccgggaatcggggtctgcggcacacgcggcgtagtgcgcgacacatgctgggtgagctgggactgatccggctcggaagaaatcgacatcgaacgagccagatagttggcggcggcaagcaccggcatatcttccggctcgaacatcaggcggatgcgcggttcgtcgcccaactgcagacgataggacgcgaagtcctggccttccgacttggacgagtactcaggctgccgtgattcgatggcaatgcccatcgcagcgagcttggcgcgatcacgctggaactgcttggcgaacgcggccttggcggcctgatctgccagctctccatacgagtcggcgtaagccttgacgcgctgcgcaatttggcgggatgtgagccattgcgggaacgcggatgacaacacagccagtacgtccagctcgtgcttgccccatttgtcggaaaaacgccgacgtccgcttgtgccctctgccattagtcctcacgtatagttattgtttcgttataagtgcgtatgagtttccccacactcactctatcttagaggctttttccacagttgagcgccatttcacaaaaataatatcttttttatcgttcgaccgtgttgtaaatcacacccaatcgtccggttcgatgccttgcgggccaacgtattcgccgttcggcacgtagctcggctcacccttatcttcaagtttggcgtcggcgaacatcatgacgtcacgtccgaatgtccagtcgccctgaatggaaaccgagttggctgcggccaaagatggcacggcgtaggggaaccgttcgtcgaaatcgcggatgttcttgtagtatcgcggatcaagttcgacgttcgggaagatgtaattgccatcttccatctcatacgtgtccgtcaggtggaagcgatcggaacgcataatgaacaaatcattggtggttttcaccggaaggaagcgcatacgatccacttggacgcagatagaaccgttgaacagaccgattgcggcacccatggcggtttccagctgaatcacctgttcggagttcgggtccgtgggattcacggtctttttgttacgaatcaccggcaacggcaacacaccatcgcattcggcgagcttgtctttcaaagcgtcgatgcgaatccagatcgagttggtgttgaagtaaggatgcttggcgatgtcttgggccgcttccttatcatccggatggacctggctcatttcacgcagtatcaggcgaccagtggccttgtctcgcacgatatggcctcccttgcgatcggccttggtgcggatagccacttcggccatgaacggggcacctgtgttttcgaagtgctgggccaacgtacgcgaggggcgtgcaccgagattgtcggaattggagatgaacaggtacttgaagccgcgctcctccaatacgtcaagcaggccggactcccagatggtggagaacaggtcgccgtggccgggcgggcaccattccagctccgggttcatggggtagctcaccggttcgccggtggcggccacgagtttgggttcctgatgctggatgatttccatcggcacgtcatgctggctgaacttgcgatgatgcttgagcgccttcatcgtgtccgccgaagtgcggaaagaattcatgaacgtcagcggcagttcgacgttcaggcgggtgcgagcggtaagcacctgaccgatgatgatgtcgatgaagcgcatctgcttggccttgtgcctacgcaccggcaacagcgacttggccttgtccaatcccatggaggtgcccagaccgccattgagcttgaggaatgcggtcttggcgaaggcgtccacggccttgtcgtggttgatggtctcatagacgtcgtggaagctgggcacgtggccaagcggctcgatgtcgtcctcacgaatccagctggaggcttcttcatggcgccatacgtcatacaaatggcggaactggttgatggcggtttcgctcatgccgtgctcgcgcatcttggcggccgaaagctcgaaagtctcatccacttcgggggtgtttacggtttcttcggggatatccgaggtgacggcgtcggtgtcgtcagcggcggcgatatccagttgggccttatcgtttatttcggtcaattcgggtccctttcatcaaatcaataggaaccagtctagcccctgtttggggcaaacacatacgacggggggcggaggcggtgaattgtcggtgataattccaataacacgccaagatgaagtccgtgtttaatccattacgaatggcttacaaaggtaagtccgtcgtcatgttgtctcatgttgtctgaaaacggaaaagccccggaaggcaaccactcagaagtggcggaattccggggctaatcggtcgggccggcgggatttgaacccgcgaccccttgacccccagtcaagtgcgctaccaaactgcgctacggcccgatggtgcaaaagcaccgagtagataatctaccagatatatgaaatctggcaaattacgcgcgtgtcacttccgcttcttcttctcgcggatgttcacggagatctgaatcggcgtgccttcgaagccgaattcctcgcgcagggagcgttcgatgtagcggcggtagccgtgctcgaggaagccggtggcgaagatcacgaaacgcggcgggcgcgtggacgcctgcgtggcgaagaggattcgcggctgcttgccaccacgcaacgggtgcgggtgggcggcctggatcttgccgaggaaggcgttgagcttgcctgtaggaatacgctgatcccaggattccaaggccttatccatggctcgcgtcagacggttggtatgccagccggtcttggcggacaggttcacacgctcggcccacatcacacggtcgaattcggtgttccacaggcgttcgagacgctgcttgtcgaactcgtccatcgcatcccacttgttgaatacgagcacgattgcacggcccgcatccacggcggtggacatgaccttcaaatcctgatcggataccggctgcgaggcatcaaacagaatcagcgccaattcacagcgctcgatggcggcctgcgtgcgcagagaggaataatattccgcgcctgtgagcttgtgctggcgtcgcttgatgccggcggtgtcgatgaacagccagtcctcgccatcgatgttgacgatttcgtcgacggggtcgcgcgtggtgccggccaaatcgttgacgacggcacgttcttcgcgcgccagctgattgagcagagacgacttgcccacgttcgggcggcccaccagagccacgcggcgcaggccggaaggcgtgaggtagccggaagtcttctcggcctgcttgagcttgtcgagcgcgacgtccagcaggtcgcccactcccctgccgtgcatggcggaaatcgagtatggttcgccgaggccgagtttccagaattcggcggcaaggtattcgctggcctggtcgtcgatcttgttgacggccagcacgacaggcttgccggcggcacgcagcatcttgacgatgcgctcatcggtggtggtcatgcccacttgcccatcgaccacgaataccacggcatcggccaaggtcacggcaatctgtgcctgtgaggcgatggcggattcaatgccttccacgtcggcttcccagcctcctgtgtccaccagcttgaagtcggtgccggcccattccgcgtcatagctcacacggtctcgtgtaacgcccggcgtgtcttccacaacggcggcacggcggccgaggatacggttgaccagggatgatttgcccacgttcggacggcctacaacagccagcacgcccaccggcttgggaccggccttgcgcgcgccttccgtgaaaccacggccggaaatcagatcctcatcgccttcgtccagctcatagccttcgagattggcggcatactgctcgtattcttggttctcgatggcgtcctcgaccacaccgatgagcagatcgagcgtgtgggcgaagtccagatcggaattgtcgatggtggtaacgccatcggcggcggtcaggaagctggtgaccttggaatcggccttgtcgcgcgcggccacatcctcagcgcccacgcccttgacagcctggccggtgcgacgggcctgacggacctcctcacgggcggtcagcagcacgcgcacctcggcgtccggggacaccacggtggtgatatcgcggccctcggccacgatgcccaaccccccggagaaggagtcggccgacgcctcgcgggcgatgtaggcgcgctgggcggcgatgagcacgttgcgcaccgggatgacgttcgacaccttggagacatggctggagacttcggaggaacgaatggcctcggagatgtcctcgtcgtcggcgaatacgcaggggttgtccgggtccacggagatatcgaaatggtcgccggtgaagaactcgcccaccgcttcggtgatgacacgctcatccacggtttcggcgtccagatcgatgccctgcttcaggcaccaccaagcgcaggcacgatacatcgcgcccgtgtcaaggtaggcgtatccgaaatacttggccagcgccttggacgtggacgacttgcccacgccggcggggccgtcgatggcaacgcgaatcacaggccaacctccttggacagcgaacggacttccgtctgggacagcacgcggtaggaaccgggcttcagatcaccgagtttgatcgggccgatctgggtgcgcaccaagcgcttgaccgggaagccgattgagccgaagatacggcgcacgatgcggttcttgccggagtgcagcacgaccttgaccatcgtgtggtcgcgtgaggagtcgatgatcgcgcagtggtcgagcttgatccagccgtcgtcgagctgtacgccggtggtcacgagtcgacggcatacggtgccggagatcttgccttccagtgtggcgacgtaggtcttttcgacctcgtacttggggtgcatgacgtgctgcgagagttcgccgtcgttcgtcatgaggataagaccctcggaatcgtagtcgagacggcccatgtggaagatgcgctcgtacttgtcgcccacgatgtcgcgcaacgtgtagcggcccttcgggtcgtccatggcggagagcaccttgcggggcttgttcagtgccagagtgacgtggttcggattgacgcgtacgcgcgaaccgtctacgcgcacctgctgcttatgggggtcgacgcgagttccgagctcggtgaccagttcaccgtcgacctcgacacggccttcggtaatcatgtcctcgcacttgcggcgggaaccgaatcccgcttgggcaagcagcttctggagtcgaatggaattggaatcgtcttgcgctttcgcagcgcgggaatatgcgtttggcatcgttctcccaacgtggccggacagactctgtcatcgcagagactgtcgatttgtatacatacttcagagttggcggactggaatcccagccaattccaacctatatatcataccgcaacgtaggactgctgctagactggcaaccgtttgtgcgggttcgcccgtcttccaacagatgaaaaggaatgaacaatcatggaagaaaccaagcaacagccgctggccctgcgcgtgtgcgccgaattggccggcagcttcctgctgtgctttgccatttacgccttctccacatggggttcggccgtgtatggcatcaatatcgtgttcttcgcgttggctaccggcttggcatatgccgcagtcaccgccatcttctcccgcgtgtccggtggccagctgaatccggccatcaccgtagcctccgtgctggtttccaagacgaaaatcctggatggcatcctctatgtgatcgctcaggtcatcggtgccatcgccgccggcttcgccgtggtcaagctgctgcccacatccgagcaggtagctgccaaagtgtggctgactccggccgttaacggtttcgagaacggctccgtgtcttactcgctgctgacccagtatggcattacgttctcgattacgctggcgattgtcgtcgaggtcgttgcctctctgattgtcgttgccaccgccatgtcttctctgggtgatcacggcgagtcctcggaccgtcatgtcattgccatgggtcttgcctatggtctggccgccgccatcagctacccggttaccggtgccggtctcaatcccgcccgttccaccggtatcgcactggccgcgatgaatgagggtcttacgcaaaatccgctgcaacagctgtgggtgttctggattagcccggtcttggccgccgctgtggtggcgttggtcatgatcatcgcgcagatgatgaccactcccaaagtgccggctgccgccgatcttccacagacggatgccgatgcgaacgcggacacgctcgacgatggcgaattcttcgatcaggccgcctcgtctgatggcgattcagcggaaaaagatgttgccgaagagtccaaagaagctgaagtaggtaatcagcaggccgattcccaaggcgatgccgatgaaggagtcgaacgccactgagcgcactttccatgggcttttgtcctgaagaatcaggcgaacaagcccggtgatgatggccgtcacggcaagtatgaccgtggcggccatcgtatatccgaaagcaaccagcagtgtgatgacggcgacgacgccgagtacgcaccattcaaaccatggcttgccctcatgcgcttcggatacatagggatggttgtgcatgttgcgattccttctgtcgaacggttacgtgaccacaatagcaggcgaatagcaaaggtgggattccgcttggacccgttgacgggtcaggcggaatcccacctttgtgcgttttggctgagctgctcccctcagagagtcccgatcagtggaagaagtggcgggtgccggtgaggtacatggtcacgccggccttcttggccgcttcgatgacctcctcatcgcggatggatccgccgggctgcacgatggccttgacgcccgcgtcgataagcacctgggcaccatcggcgaacgggaagaacgcatcggatgccgcgaccgcaccggtggcgcgatcggcaccatcggccagcgtgttggcgcgctcgacggccaaatggcaggagtccacgcggttgacttggcccatgccgatgccgaccgtggcctggtcgtgggccagcaggatggcgttggacttcacgcagcggattgcacgccatgcgaacacgaggtccttcagcgtgtcggcgtcggcggcatcgccggccacgagcttccaggcgtccggatcgtcgccgacggcgttgatcagatcggtgtcctgcacaagcaggccgccatcgatctggcggatggcctcgtggcccttcggcggctcggccaccttgaggatgcgcaggttcttcttcttggtctgcagcagttcgagcgcggccggctcatagtcgggggcgacgatgacttcggtgaaaatcgggcgcacgctttcggccatctcaagagtgaccttggagttgcaggcgatcacaccgccgtaggcgctcatcgggtcgcaggcgtgagccttcttgtgggcctcggccgcggtcgcgccgatggccagaccgcacggattgttgtgcttgactacggccacggcaatggcgggagccatatcccatacggtgcgccaggcggcgtccgcgtccacgtagttgttgtagctcatcggcttgccgccgagctgctcggcgtgggcgaaaccggtctggttgagcgggtcaatgtagagggcggcctgctggtgggagttctcgccgtagcgaagggtgtgggcgcggtcccaggtgcgggtgaactgggccgggaacttggcggaatcgacttcagtgccctgatcgtccttgtccacctcgacggcgtccagagaggccggcttgggccagtgcttggcggtccactcgttgatggtggcgtcataggcggcggtgtgcgcgaaggccttggctgcaagccacttgcgctcgtcgagggagaagccggtgccatcggccacgcgggaggcgaccagtgcataatcggccgggtcggtgacgatggccacggtggcgtggttcttggccgcgccgcgcaccatggaggggccgccgatgtcgatcttctcgatggtatcggcctcgttggcgccggagcgcacggtgtcggcgaacgggtacaggttgacgaccaccaagtcgaacggcttgatgccgaactcctcgagctgcttggcatgctcggggttggtcatatcagccagaatgccggcgtgaatgtacggatgcagcgtcttgacgcggccgtcgaggcattcggggaatccggtgacatcggacacctcggttaccttgacgcccagctcggcgagcttcctggcggtcgaaccggtggaaacgacttcggtgccggccttcacgaacgcttccgcgagtacttcgatgccttccttatgaaagaccgagaccagtgcccgacggatcggtcggttcgtgtttgtcatcctgttcctccttggattcttgtggttgtgacgccagggaccgcgcctgacggacgatgacggtcttcggggtcgcggcggtggtgcgggaatcattgatcctcccaaccaaccagcctatcgaaaaaacgagcgctgtgccaatcagcgcgagcagccatgccgcggtaaatcccaatgcggtcgaatgaccgacgactctggtagaggccatgacgtcgacgccaatgtgagcgagacgatgatcgccaagcgatccattggacagagcgaacagcaatgtggatgcaagtgagatcagcatcgcgctcaggcagaatgacccggcggagtagatcagcgaaaccagtactgggccgcgggtggacgcattccgtatattcaacggtctgcaggcgaatccttgcggcaggaatacagccagcaggcccacgagcgcagcgatggcgagaggcgcgttcaaggcaacggtacgccatagttcgctgctgaccggttcgggcagaataccgaatgccggtattgcaggaagctctttggattggccgagccataacgtgaaactggccaaatcaccgatggcgaatccgccgccgaagagccaggaaacagcccagagcatgacgttgggtagccagatcagcatggcgacggtggtgagaattcgtgaaccggtttccatcccggacaattcgaacaacgatacgacagcggcatggttacgtaccgcccatacgatgacggtaatcaatccaattgccaggtatatgcccagtatcgcgacggccaagacgacgccgattttcaggcagtggcgtatgtccgccggcacctgcttgcgagtccagtccctgaatgctcgcatcttggctgattccggtacggctgcgcataggaaaccgatcgagaatacgatggctgctttcagcaacaccagccactggtcatcgacaagacctaggtgtacggattgccggaatgcctcgttcaacccgagccaaacattcaatccggcaacatacgcatgcggcccgtatgctttgattcgcatggtgactgcattgatcagccatatcagcagtatggtcaacatcaatggcgtgatggtgagggtgaacgaatcggttctagagcccgatccctcactcagaagcacaacggcctgtgtcagcgaggttgtgccgacggtgagattgtcgccgccctcttccatggagacaaccaataacatcagcgctgtatagcaacctaatgcaacggcatagatggccatggatgcgagggcgactatggctccccgcacccattggcgaatcacggctttcatcacgattggttggaaccgatcagtcgatgttggccttggcgagtatgtcgcgcatgatttcagcggcctggcccggggtcttgcccacggggatacccgccgcttcgagcgcgttcttcttgtcctgggcggtgcccttgcctccggagacgatggcgccggcgtggcccatctgcttgccttcgggggcggtgaaaccggcgatgtaggcgacaaccggcttggtcatgtgctccttggcccatgcggcggcgtcctgttcggcgaagccgccgatctcgccgatcatcatgacagccttggtgtcggggtcggcttcgaatgcctgcagggcttccagcagcgtcgtgccgacgatcggatcgccgccggcgccgagacatgcggtgaagccgatatcggacagttcgcccatgagctggtaggtgagggtgccggatttggagaccagtccgagcgggccgcggccgacgatgccgtcggggatgatgcccaagttgacgccagggttgccgagcgtgatgaaaccggggcagttcggtccgatgatgcgcacgcccttcttgagcgccagttcgacgaagtatgcggaatcggccaccggaatgccttcagtgatgaccacgatgagttcgatgccggcttcgacggcttcgaccacggcggacttggcgaacttcggcggcacgaacaccacgctggccttggcgccggtggcttcacgtgcttcaccgcaggtggcgaacacggggatgtccacgtcggcaccgttcttggcaccggggaaggtgacggatgtgccggccttgcgcgggttcacgccgccgacgatattggtgccggccttgagcatgcgagccgtgtgggtcatgccctgatggccggtcatgccctggacgataacgggagcgccgtcttcgatgaacagcatcagcgaacctccttggactgggtcgcctcaccggcgagctgcgcggccttggctgccgcgccttccatggtttcggacacatggatattcggattgttggcggaagcgaggatatgcagaccctcggcggcggcgttgccatcgaaacgcacgacgatcggcttggaaccgccgagcttggcgaccgcttcgaggatgccgttggcgacttccacgcaggaggtgatgccgccatagacattgatgaacacggattcgacctgagggtcggacagtacgatctccaggctttcggccatgacggctgcggaggcgccgccgccgatgtccaggaagttggcgggcttgatgttggtgccctgttcctcgccagcgccggagacggcatccagggaactcatgacgagtcctgcgccgttgccgatcacaccgacctcgccgtgcaggtgcacgtagtgcaggccgtgttcgcgggcgcgctgttcgaaggggtcgggaacgatgagatccacgaaacgcgcccagccatcatggcggaaggaggcgttgtcatccaaggagatcttggcgtccaaggcgctcagctgcttggtggattcgtcatccgggtcgccgatcttggcgagcggattgatttccacgagcgtggcatcgttgtctttgaagcagcgccacatcttgagcagaatctgcgcggcctgatcgacgtccgcgtggtagaagccgatgctctgtgccatttcggtggcagcggccaggtcgaagtcgccgagcgcatcgatgtgcaggcgcttgacggcctccggatgttccttggcgatttcctcgacttcggtgccgccgttggcggtggccagcacgtcgaagtcgcgcgaggtgcggtccacggagatggacacgtaatattcgtgcaggatgttcttggcttcggccacaagcacgccggaaaccttgtgcccgtggatggtcatcggcaggatggactcggattcaagaatcgcctcgtcgcggttatgggcgatcttgacgccgccggcctgaccacgatgaccgatcttgacctgcgccttgattacgcagggatagccgattttgtccgccgcttcggcgacttcatgggagttctgggcaaagatggcgtccggggtgggaatgtcctgttcctcgagcagctgacgcgcctggtattcgtaaagatccatcgatccttccctgactatgtaattggtccggcatataactgtacacagtacatgccggaccttgaaaactaactgtacgttgggtgagacggaatctcaggccggcatcgcgatcagcgagctgctgggcttgccgccgagcttatccagaccgtcgagaccatcgagccgcatcacaaaactgaagcccaccacagtgccgcccgccttttcgataaggtcggcgccggctttggcggtgccgcctgtggcgatgagatcatcgacaatgagcactcgctcccccgcctgtacggcgtcggtttcgatttcgacgctggccgtgccgtattcgaggtcataggattcaccgatggtttcgggcggcaatttaccggccttgcgcacggcgatgaaacccttgcccagatgggcggccatggccgggccgaacaggaacccgcgcgattcgagaccggcaatggagtcgaattcgctcggggacaccggcagagccgtttcaagcgccttgagcagaatcttcaagcccttggggtcggcgagcactggcatgaaatcacggaagataatgccttccttgggaaaccccggtatggaacgcaccaaggacaccagatattcggcgtcctgttgccctaccttgctcaatgcgtcgatggtgatgtccgactgtgccatagtgctcgccccttttatgcctttgcgatgcgatactcggatggtgctaccgaatcgaacagcttacttcgtcttggtttcgttgtcgtcaccggtctcgtcagcggtgtcttcctcggacacgacggacgcctcgatcggaacctgaccagcctcatcgttagccggagcctcggtgtcttcgtcgggcagcgggttgccgttctcgtcgacctcatcatcggacacataggccgggcgggtgtactcacgggcgatggcgttgaagccgaaacgcagcttggagccttcggagtcgatgacgatctcctcatactgctcgtcgacttcgacgaccttgccgatcacctggccgatggtgatgacctcggtgccgggctgcaggttgcgacggaagtcctgcttctcctgctgttgctgcttggccttcttggactgccaccacatcatgccgccgaacacgacgacgatcacgatgagcataatgtactgttgttccacgaaacaactccttcaaacgagcgacattgacgaaacgccgccaagtgtgcaaacaggagaaagtctagaagagcttgctgacatcatctttgggcgtaattcccaaatgctgccatgccttctcggtagccacgcggcctttgggcgtgcgaatcataaaaccttcgcgcacaagatacggctcgcacacggtttccacggtttccgattcctcgcccaccatggccgccagattgttcaggcccacgggtccaccgttgaagttgcgcacgatggcattgagcacggcgatgtccagccggtcgaggccttcggagtcgatctggtacagggccagcgcctccttgacgtcgtccggccgcaccacgatcaggtcgtggacgatggcccagtcgcgtacacggcgtagcaatcggttggcgatacgcggcgtgccgcgcgaacgcaacgcaagctcatgagcggaacccgcatcaaggtttacgcccagtacgttggccgaacgttcgatgagcttttccaactcctcatgcggatagaagtcgagatgtgcggtgaagccaaagcgtgcgcgcaacgggcttggcagcataccttcgcgcgtggtggcaccgatgacggtgaatcgcggcagggtcagcgggatggagcttgcgcccgggcctttgccgaccatcacatcgacgcggaagtcctccatcgcgatatacagcagctcttcggcggcgcgcggcagacgatggatctcgtcgatgaacagcacttcgccgacgtcgagggagctcagaatcgaagcaagatcaccggcatgttgaaccgcagggccggaagtcacgcgaatcggcacttcaagctcattggcaacgatcatggccaacgtggttttgcccaagccaggagggccggcaagcagaatatggtccggtggcacatcgcgtttgcgggccgcgtccaggaacagttgcagctgggccttgagccgtggctgtccgataaagccttcgagaacatgggggcgcagctcctcgtcgctgaccggctcgttgccgatcggctgggaggagaccatgcgcaacgactcttcgttggcaccggtgtttgaggtaccgtaatccgttgtctcgctcatcagcggcccctatccatcagcgccaaagccagacgtagcacacgcggcacatcgtcggtggcaagcggcgtgggaatatcgttttcggcgcaagcctcggcaacggcctgctgggcgtcctgctgacgccagccaagtgaaatcagtccttcgacaacctgttccgtaccggtatccaccggagacttggatattgccgcctgagcggaagcaccctcgatctgactcaaatcaatagagcccttaagctcgaggatgattttctgtgcgcccttcttgcccagccccggagccttggccagcgcggtggcgtcgttgtcggcgatggcgtgggccagctgactcggcgtcagtgtggagagtaacgattgggccactttaggtccaatgccggagaccttgatgagttgcagaaaggttttcttggcgtcccgatccaggaatccatgcagggtaatggcatcctgagagaggttcatataggtgaagacgcgggtgtcttgcccggcgtgcagacggctcaggtcggtggcggacatgcgcacttcgtagcccactcccccaacatcaatcaatgcggtatcggtttcgaccgattcaacccgcccggtcagcatgccgatcatacaggtactccttcagggctccaggattcaagactcgaacaactgttcgaaagtatactacatgcctcggtcgtggttgatgcggcggcgcgtggatttctgtgcggcctcagcccactggcgttgcgcggcggtcagatgttgttcgcgttcgccgccctgcaatgcgcctgccgggcgcagcgcatggcaaatggccaaagccaaggcatcggcggcatcggcgggagtcggcattttggtgaggttcaaaatacgtgtcaccatacgctccacctgaatcttctgcgcctgcccgttaccggtgatagccagcttggcttcggtaggcgtatgcaacgccacgggaatattgcgttgcgcggcggcgagcatggcgaggccggcggcctgtgcggtaccgagtacggtgttgcggttggattgtgcgaacactcgttcgatggatacggcatcgggtgcgaagcgatccattttctcggacaggccgttgtagatggccagtagacgcagatcctgggtgatatccggtgaggaccgcaccacgtccacgtgaataaacgaaagccggcggtgctcgccggcttcgatcacgccgaccccgcaacgtgtgagcccggggtcgacgccaaggataatcacgaggattactcctcgtcgagctgggccatcacctcgtcggaagcggtccagttggagtagatgttctgcacatcgtcgagatcatcgaggttgtcgatgagcttggacaccttgcgggcatcgtcgaggctcaactcgacctcgttcttcggctgcatgacctggtcggcggaatcgtagtcgaagccggcgtcctgcagagccttgcgcacggtgaacaggtcggacggaccggtcacaacggtgaacacctcaccgtcatcggtaacgtcctcggcaccggcttcggcggcggtttcgaacagcttgtcgaagtccacgccctcggacggcaccacgatctggcccttgcgctcgaagttgaaggacacggagccggaggtggccagggagccgttgcccttggtcagggtggaacggacttcggcggccgcacggttgcggttgtcggtaaggcattcgatgatgaggccaacgccggcaggagcgtagccctcgtagacgatgtcttcgtagttggcggcgccgtcttcagcaccggcaccacgcttgacggcacgagcgatgttgtcggccggcatggaggccttcttggccttgtagatggcatcgtacagggacgggttgccgtccgggtcgccaccgccgaggcgggcggcgatttcgatgttcttgatgagcttggcgaagagcttgccgcgcttggcgtcgatggcggccttcttgtgcttggtggtcgcccacttggaatgacctgacataatgctcctagcaattattgaaacggatgatgtcaaacgaaacgattgtaggccgttaatcagacatacccgtgatgtttccgatgattgtcttgttatgcgtaccgataagaccggtcacgcggggtgccgcacctgtgttaggcaagcggcagatgatactgcggagccagctgttcgaatgcctgggcataggcttctcgctggtcggacagcagaataggcatggtgcgtgtctgggcgacgatgggcatgaagttcgcgtcaccattccagcgaggcactacatgctgatggaggtgagcggcgactcctgcgcctgctacttcgccctgattaatgccgatattgtaaccgtgcggacgggagacggtttccatcaccttcatggcgagggtggtggccttctcgaattcgaacagttcggcatcgccgagttcggtgatgaatccgacgtgacggtacgggcagatcatgagatgcccgacattgtatgggtagaggttcatgatggcgaacacgtgcgtgccacgccaggcgatgaggccgtcttcgtcggatttcttgggtccggcgcagaacgggcattccttcgtcttgggcttggttgggcgattctcgctgttgcgcagcacataggtcatgcgctgcggagtccacagtcgttcgaccgtgtcctcctgaggcggaaagtccgccggattatcgacacgcacgtcagtcattttcgcaccctttcttggctcccctctctgaggggagctgtccgtgaaacggactggggggagtgcgagccatgcaggactcccctcagtcgcctacggagccagctcccctcagagaggggagccagtaccattcacatcactcagccacagcggcgttgaagtcgtcggcggagttcacctggacgcgcttcttgatgacggtgaggatctgctcgcgggccttgtccaccggaacgccgttgagctggctgccgtcacggaagcggaagctgaccgcgttgttgttcatgtcttcctcaccgacgatgaggatgaacggcaccttggacttggaggcgttgcgaatcttcttgccgaagcgatcgtcggagtagtcgatctcgcaacggaccatctcgtcctcaagggacttgacgaaaccggccagatgcggggcgaactcgtcggcaaccggcacgccgagcacctgcacgggggccagccacgccgggaaggcgcctgcgtagtgctcgagcagcacggcgaagaagcgttcgatggagccgaacagggcgcggtgaatcatcaccggacgctggtgggtaccgtcctgcgcgatgtactcgagctggaaacgctcgggcaggttgaagtcgagctggatggtcgagacctgccaggtgcggccgatggcgtcgcgggcctgcacggagatcttcgggccgtagaaggcggcgccgcacggatcgtcgacgagctcgaggttggattccttggcgacctcggcgagcgtgttggtggcctcctcccagatctcgtcggagccgacgtacttgttcgggtccttggtggacagctcgaggtagaagtcggtcaggccaaagtccttgagcaggttcagcacgaaggtcagcaggctggtgagctcgtctttcatctgctcgcgggtgcagtagatgtgggagtcgtcctgggtgaggccgcgcacgcgggtcaggccgtggacctcgccggacttctcgtagcggtacacggtgccgaactcgaagaggcgcagcggcagctcgcggtaggagcgctgacgggacttgaagatcaggttgtgcatcgggcagttcatcggcttcaggtagtagtcggcgcccggcttggtgatgttgccgtccgcgtccttctcctcgtcgaggtgcatgggcgggtacatgccgtccttgtaccagtgcaggtggccggaggtctcgtacaggccgcccttggtgatgtgcggggtctgcacgaagctgtagtggtgcttgcggtgcatctcacgggagtagtcctccatcgcgttgatcacggcggcgcccttcgggtggaacacggccaggccggggccaatttcatccgggaaggagaacaggtccatctcggcgccgagcttgcggtgatcgcgcttggcggcctcctcgagacgggtctggtaggccttgaggtcttccttggtggcccacgcggtgccgtagatgcgctgcatggtcgggttcttctcggaaccacgccagtaggcggcggcggaacgctcgatcttgaaggccttgatgtagcgggtgttcggcaggtgcggaccgcggcacaggtccttccaaaccacattgccatcacggtctacgttgtcgtagaagctgagctccttttcggagatctcggtggcggcggccgggtcgaggtgtgcttccttgtcttcgatcagttcgatcttaaagggctggtcggcctcttccttcagagcctcttcctcagtcacggaacggcggcggaaggactgggaggacttgatgatgcgctgcatgcgcttctcgatgtccttgaggtcgtccggggtgaagggctggtcgacctggaagtcgtagtagaagccgtccttgatgacggggccgacgccgagcttggcgttcgggtagacttcctgcacggcctgggccatgacgtgggtggccgagtgacgcatgattgcgaggccgtcttcggagtcgagggcgatggggtcgacggtatcgccatcgttcagcggcgtgtacaggtcacggttctcgccgttgatcttgaccgcgatgatgttcttgtcttccgcgaacagttctacgccggtggtggttgcttccacctccttcgcttcgccgttgacggttatggagatggtagcttgcgccatgatttgtcctttgctatcggggcccacggtactaatgtgcaggcctggactggttaatcaacgtaggacacgataggttgggcgtgcgacaaataccaccagcatctgaaccaatacgaaaaaaacctcgccgaagcgaggtttcgttgtggagcggacaacgggactcgaacccgcggtctcaaccttggcaaggttgcgctttaccaactaagctatgtccgcaaaggaatccgccgtgagaagcggaatccagtgggcgatgtaggaatcgaacctacgaccccttcggtgtgaacgaagtgcgctagccgctgcgccaatcgcccgaatactcggttcttcagttatatccagtcgaattgcttcgactttcgtgggcgatacaagattcgaacttgtgaccccttccgtgtcagggaagtgcgctaccactgcgccaaccgcccgggtcatatttcatcccattgaattgcttcgccggtctgagaggtgggtacgagagtcgaactcgtctatacggctttgcaggccgctgcctaaccgcttggctaacccaccgtaaggtctgtcaactcacggacctagagcggacaacgggactcgaacccgcggtctcaaccttggcaaggttgcgctttaccaactaagctatgtccgcgtgtgtttccttggcgaggtctccctgccgaagcacgagtgtttactatactcacatgcgtgtagttcgtccagctgcggcgtgtcgcctgtaattgcatactctcgcttatggctaaagcgtgcgcttcgggcaatgaattccagttactctagaggtatgagtgaagcagcgaaggacaccggcgcagtattgatcgccgcattcgagggatggaatgatgcctgtcaggcggcgacgaacgcggtgcgccatctggtcaagcgatatgagtcccgcgagattcgtcatattagatgtgatgatttctatgactatcaggttgcccgtcctatgctgtgccatgttgcgggacgcaccaatcttatctggccgcagaccacgttctacgacatcacgttggacgcaggcaagcatatctatgcgcagatcgcccccgaaccgaactatcggtggaaggaatactgtagccagagtctggccattgccgatgagctggatgtcaatcggatcattacgttaggttcgatgttctccgattgcccgcatacccgcccgttgcccatcgccgtcagcgacggagactgtcaatgcgaaggagaccggtcgtataacggcccggtaggcattccttccgttttggatgtggccgccgcgcagcaaggttttgctcattcctcgatgtgggtgtccatcccccaatatttgggcagcgacgaatgttctgccggcactatgcgattgctggatgcgttgggcaagcatatcggcttcaccttcgatacggcagatctgaagcagaaagccgaacagtggaaggcgcaagcctcgatactggttcgttgtaatgaccagcttcacgattacgtggagcatttggagcacgactacgacttgcagcagaaagccgaggcggaggcttccttgggagcgccccaggccgaacaactagtcaaagaagcagaagcgtttctgcgccagatgggcaattagcccatatatggtgtgctcccgctggatgaacagccctgtgggctgttcatagcagtgcaccatgtgcacgtcgcacaaaatgtcgggagctggctcgcgtagcgagactgagggtggttctgctggcatattccagtgaccacccccagtcagcttcgctgacggctcccgccagcgggagcaccattatattggagtcgtctatcgacccgtcttatgccgcagccgccacggagggatcgatggccggcagcacgcccacaatcagcagcaaggcgacgaccacagccaaaccgatgcggtagatggcgaaggccttataggagaagttcgatacgaacttcaggaatccgatgatcacgatgtagccgagtacgaagctgatgaccatggctacgagggtcggcccccagccggggaacatcgcatcggttttgtagttcttcacggccttgatggcttcgagcaaacctgagccgaacaccgcggggatggccatcaggaagctcagacgtacagcggcctcacgcgtgtagcccagtgcgcgaccgacggtgatggtgccgccggagcgggacacaccaggaatcagcgccatggactggcccaaaccgaagaggaacgcatcacgatacgtcatatcattcatggttttgttctggcgagccttggcatccaccatccacagcagaatgccgaataccaacagcacggttaccgtaatccacaggttgcgcaacgaggtctcgatgacgttctgcagagtgaagccgaggatgataatcggaatcgagccgacgataatgttccagccgagtgtggcgtaattgtcgccgcggcccatgcgggccttccaatccttgccgttcttgccgaacaggcagctgaaccagtgagtaaggatattgatgatgtcgtgacggaaatacagaatcaccgcaagttcggtgccgatttggatgatggcggtaaacgccgcaccgggatcagagcccagcatcaaatcgccgaaaatacggatatgcgcgctggaggataccgggagatactcggtcagcgcctgaacgatgccgagaatgatcgcttggaaaaaattcataacccctcgtgatttctaagtatttgatgtgttatgacgatgaacaccctacccaagggggtgtagaacaacactaagaatcggtaacatccacggcttctacaatgaaagtggatatagtacgtaagcgacgaagggagcattatggccacgtatcgcaaaagcagggcattcgcaccggaaggattcttcgaatgcgagggtcgaggactcgaatggttgggagcggctcatgcgcagggcggcccgcgcgtggtgcaggtatacggctggggcaaggattatctggatatcgaacgtgtgggcagcgcgtcccccacgcctcaggcggcacgagcttttggtgcggctctggcccatatgcatgatgtgggtgccgaatatttcgggtctgcgcctgacggatataacggcacatgctatttcggaccattgcaggacccagtgaaaatggataccggcgagtggaccgacccgatcagctatttcgctgatggacgtctgcgcccgatggtcaaccttggtgtgaggcgtggcgagctggataagcgcgatgtcgaactgaccgagcgcgtgattgaagcgttgccggatctgatgggccgagccgcgtccgacaagccggcgcgcatccacggtgatctgtggagcggcaatgtgatgtggaccgccgattccgggcagcccgaggctgtgctcatcgacccggcggcacatggcggtcatcgcgaggaggatctggctatgctgcacctgttcggcatgagctatctgagcgaaatcaccgagggctaccagtccgtgcatccgttgaaggccggatggcaggagcgtatcacgctctggcagctctaccccatcgccggtcactgtgtcttcttcggcggcggctacgtcaacgaataccgctccatgtgccgctccctgctgaagtaacagacttggctcccctctctgaggggagccaagaacgcatccactctcagctcagcgcgtccttcaacttgctgaagaagcctttcttttggccagcctgtggacgggatgcctgggagacgtgcgtggcgcctgaatcatgcgaggcggcgaactgttcgatgaggccgcgctcggtttcgttgagcttggtgggaatcagcacattgacgtgggcgatgaggttgccgcgctcgtccttgttgcggatgttcgtgacgcccagtcccttaagcgtcacagtgtcctcaggctggcagccggccgggatggacacggtcttctcaccatcgaacgtgtcaatggacagatcgtggccgagcacggcccagctcatcggcacctgaatccagcagtgcaggtcgtcgccatcgcgggtgaattgcttatccgccttgatgcgaatgtcgatgtacaggtcgccggcagcgccgccgccctcacccacttcgccctggttggccaaacgtagacgcgcgttgtcgttgatgccggcgggcacggtgacgcccacggtacgtgtggtacgcacacggccgtggcccatgcagctggggcacgggttcttgatgatggtaccgtggccctcgcaacgttcgcagggggcggaggtcatcatctggccgagcatggtgcgcacgaccttctgcatgaatccctggccgtggcagtcggggcaggtgaccggctgtgcgccgccctgggcgccggagccgccgcactcctggcacagggagaacgtgctgatcttgacgtgcgcggtgccgccgaacacggcggtcttcaggtcgatggacgcggaggccagggcgtcgcggccgggctgggtacgcggcaccgggccctgtgagccaccaccgaacgcggaaccgaagaacgtggagaacacgtcgctcatatcgccgaagcccgccccggagaagccgccggcaccggcgttcggatcgttcgggtcgacgcccgaatcatacatacggcgcttgtccggattggacagcacatcgtaggcgttgttcacttccttgaacttgtcctcgaattcagggcccgcgatgtcggggtggtacttacggctgagcttgcggtatgccttcttgatctcgtcgtcactggcgccgcgttccacacccagcgtctcgtaataatctgccacttgattgatcctttgtgttcgtttggtctgcgggtcattgtgccacagacggcggtcagtcttgggtccggccctcggagaggaaggcggtcaaatatctggctacggccctgacggcggccatagtggccgcatagtccatgtgggtcggccctatggagccgacgaaggcgatgggttccgtgtcgttcgtctggctctccgtctcggattcggtttcgggttcgcctacgggatcgttccccgccggttcgcccgccgcaccgctgcgcccatagccactgctgaccacggaggcatgcagtaggccgggggtgtgcatttcggagccgatggccacgcccacgccggatgcattcgtctcctcgcccaggttgctcatgagcttcatcagcacgacctgttcttccagcgcgtcgaagagcggggccagatcggccagggaccgggagtgggccaggtgcgaggtgccggacatgtacagttcgtccgcgcgttcgtccaatgccatcgattcgaaggcgtcggccagcgcgtcggccacgccgcgcaccgactcgtagccggcgctggcggcgatggatcgcacggtctccgcggatttcgatagggacagtccgacacattgttcgttgacggtgttggagagccggttgatctcgtccacggcgggcatggatgcgatggtcaggccgtgctgggccacgcggccggtgtcggtaatcaccaccgcgagcaacgtggtcatggcaacgggcaccatctccacgtgccgcaatgtggccttggccagcgatggcgaggtgactatggccacttgaccggtgatttcggacaacagtcgtgccgaacgctgcagcgcgtccttgagactcaccgatccggacaggaagctgttgatgccgcggcgctgcgcctcgctgagcggcaccacggtagcaagtcggtccacaaagtatcgatagcccttttcggtgggcacacgaccggccgaagtgtgcggctgaatcagatatccttcatcctccagagcggacatgtcgttacggatggtggccgaactgacgccgagatcatggtcgcgcgtcagcgaagtggagcccacgggctcctgagaacggatgtaatcctccaccacggcgcgcagcaccagcatgcgtcttgattgcgtcatgcgcgcctccttatatatgcatacatattcatatcagtcacggttcactcagggcgtaccccgacggtcggttcgccacgccgcgacacgcgggaacccagaaatattgcctctttcttggctccgccacgtgcaggtggcgcacttcaccttagaacattgtattagcactccttaggcttgagtgctaatgcgttcgtttgcagcgtagcaatgttcactgtgaacgctaacagaacacaaactaccaaaacacgccaaaattgcaccgcaacgtcgcaaaccgacgctagcatggtaatcgcaatgtgagggcgtcaagcgcccggcacaagccggatacgcggcccgaccaattggaaggaaagtaatccatgaccgaattcaaggagaccgagctcgacgagcgcgccatcaagatggcgaaggtcctttcggctgacgcggttgagaaggcaggctccggccaccccggctcccccgtctccctggcgcccgtcgcctacacgctgtaccagcacttcatcaagcacgatccgaatgatcccaactgggaaggccgcgatcgcttcatcctttccggtggccatgcctccctcacccagtacgtccagctgtacttctccggctacggcgtgaccctggacgaccttaagaacttccgtggcggcgctgccacccgcaccccgggccacccggagtacggcctgaccccgggcatcgaaatgaccaccggccctctgggccagggcttcgcctccgccatcggctttgcctacggcgagcgtttccagcgcggtctgcttgacccggagaccccgaaggaagattccccgttctaccacaagatttgggccatctgtggtgaaggcgacatcgaggagggcatctccggcgaggccgcttccctggccgccaaccagaagctcggcaacctgaccgtgatcttcgacgccaaccgcatccagatcgaaggcgacaccaacctggtgctggccgaggacgtgctcaagcgcttccaggcctacggctggtacaccgacgagttcagcttcatccagcccgacggctcctacaaggaggacatcgagggtctggccgacgtcatcgccaaggccgaagccgccgccccggaccagccgaagctcatcaaggtccactccctgatcgcctggccgaccccgggcaagaccaacgacccgtcctcccacggctccaagctgggcgccgaggccgtcgccggcctcaagaaactcctcggctacgatccggaggagtccttccacgtcgacgaagaagccctggcccacgcccgcaaggtcgccgatcgcggcctggaggcccacaaggcctgggacgagaagttcgacgcctggcgcaaggccaacccggacaaggccgccctgtacgaccgtctgaaggccggtgaactgccggaaggcttcgacaaggcccttgacgaccttgaggccaccttcgaagtcggcaagggtgtcgccactcgtggcgcctccggctccgtgctcaacgccatcgccgccgtcatgccggaactctggggcggctccgccgacctcggtggctccaacaagaccgacctcaagggcgctgccaccttcgccccggccgagtgcgccaccaagcagtggccgaactgcaacgagttcggtcgccagctgcacttcggcgtgcgcgagttcaccatgggctgcatcaccaacggcatcctgctgggttcccacacccgtccgttcggcggcaccttcttcatgttctccgactacgagcgttccgccgttcgtctggccgccctcatgcagatcccgaacctgtacatctggtcccacgactccgtcgccgtcggcgaggacggcccgacccaccagccggttgagcaccttgcttccttccgcgcgattcctcagcttgaggtcattcgcccggccgacgccttcgagaccgccgaggcttaccgttacttcttcgagaagaagaacaccctgcctggcgccatggttctgacccgtcagggtgtcccggttcttgccgagaccgctgccaaggccaaggacggtgtcaagaagggcgcttacatcctggtcgacaccgagggtactccggacgtcatcctcatggcttccggttccgaggtccagtgggctgtggctgccgccaagaccctggccggcgagggcgtcaaggctcgcgtcgtgtccgtgccgtccatggaatggttcgaggagcaggacgccgagtacaaggaggctgtgcttccggccgctgtcaaggctcgtgtctccgtcgaggccggcgttgccatgccgtggtacaagtacctcggttcctacggcaagcctgtctccatcgagcagttcggcctgcagggtgacggcgctcagaacatgatcgacctcggcatcaccgccgagcacgtggtggaagccgccaaggcctccatcgccgaagtcgaagccgccaagtgagcaactaagcaataattcaataattgttggctcccctccctgaggggagctgtcaggcgaaagcttgactgaggggagcaatgcttgagcccactcccctcagtccgcgttgcggacagctcccctctcccaggagaggggagcctagggcttgaatccaaggagaaaataaatgactgaagcaactcagcgtacgtccgacaacggcgtttccatctggctggacgacctgtcccgctcccgcattgagtccggctccctgcaggacctcatcgccaacaagaacgtggtcggcgttaccaccaa

SEQ ID NO: 2596 - DNA, 117104 bp, Unknown
  R222_15m  MAG No. k141_10892
cggccgatcctcagggctatctggcgcacgccgagcccgtccctgttgcgcaattcgtcgatccggatccgttcctctgccgacaggtgggaataagctttcatatcgagcgcagcactttctctccggttgtggacttgaacacttccaaccatagagcaggtgttgcgcttctatctagaacccggggcgtagcaatggcagcggcgggtaatctacgatgggacaataggtcagggccgcgtccgaaagccgctcatccacgatgagcttctcgtaagcgggattgcgccagctgttgtggcgctgtgtgccgcctttggtggtcatttccggctgatacttgatgcggtcgatgatgtttcgtacgcaatctttggccagttcaatagccacgtcgtgccattcttccgcgctgagaccgccgtatatgcgcaacagattgcgcagcttacccacgtaatgggtgtcggatttgtcgttgcagaaaagaagtcggtctcgccatcgacctcgttcgtatcctcgtcgtcctcgtcgctttcttcgctctcttcgttgaacgagtattccagattacgcgttatcgcgttctcgattacgtcataggcccacatgcgtttgtcgtcatattgggcgaaggcgagcgcgctggaaatcagcaacatgttgttcaatggttcgcattgccgcatgttcttgtcattcgttgcctgtgcaatggtgttcaatgctttgccggcggtaggggagtcggcgaattccgccacattctccatatagcatcgcacgcgcatcgccagaccgtccataagcgtgagcaaaggctcggaatcatcatcgttttcggacgagagcagaagcgcgtggacttcgtgtatgcacaatcgtaagttttcgcatgcgcttgcgtaatcactggattgcagggcattgcccgcgatagcctgcacggttttgatgaattcagtgtaatcgaaggatttgctatatgcatttcctggcttattgacatgaataatgaagcgttcatggcatcggtggattgcgtcggagagcatggcttgcgcgtcggtgcgcgaaatcagcggtcgttcttcgcttggttgggcgcggaaagtatctgcggcttcgcgcagttgggtggactacaggaacagcagatgaccgttgccttgctctgcacgagcgttgcacttacaaattgaatccgggcgctggggtttcccacgtgacccccgactagactggatgaatatgcgatccttcttcgaagccatatccgtgtcctgcgtcgtccccgcgcgatcgccggcggacgacgaacgcacggtgttcgacaacctgtccttcagcatggaacgcggcgacatcatcgacctggtgggcccgtccggctccggcaaatcgagtctgctgaccgcatgcgcccgactcaacccgcacgcgcacggcacgttcgtcctcgacggcgtgggcagtgacgaattcagcgcacagcagtggcggcgggacgtctcctacctgccgcaaaaaccgatactgaccggcaaggacgtggccgaggcgatccggctgccctggacgctcgcgattcgaggcaaggggggcagggccgcacggttgctgcccgacgaacgtatccgcacgaccctggacgcgatgggatgcgaggacatcgacctggcgcgcgcgccacatgacctgtcgggcggtcaggcggcacgcgtggcgttggcccgcacgctgctcaccgacccgaaggtgctgctggccgatgaggcggacgccggactcgacgacgacaacgcatccaaagtggccgcgatcatggcggacgcggccgcacacggcatggcgatcatccgcatccgacaccgtccgccggacggacgcgccacccgcacgctgatgctcgatgcgggacggctcaccgatctgacgcgggataaggaggtgcgcccatgaacggcgcctacgacatcgacacctggggtcttgttctggcgttgggcatggtggccgtggcggccatcgtcagcgaactcatgcacatgggcatcggcaggaccctgatgtggtcggcatgccgcgccctcgtgcagctgtgcgccatgggattcatcatcagctacgtgattcgttcgaacagcgtgtggatggtgttcgctctgatgacggtcatgctggtcgcggcggtgcagatcgtgatatcccgcgcgcgcggcatccccaaaggtcttgccggaccgatcttcctgagcctggtcatcacgatgctgctcatgctggcgttggtcaccgaactcatcgtgcgcccacacccatggtatgcgccccagctggtggtgcccctgaccggcatgctgctgggcaacaccgtttccgcgctcgctgtcgggctgagccgattctatgaaagcatggaggaacgccgcgacgaggtggatatgatgctggccttgggggcgacggcatgggagtccgcccgtccatccgtcatctcgtcgattcggctgggactgctgcccaccaccgcttcgctggcctccagcggcatcgtgaccatcccgggcatgatggcgggccaggtgatagccggcggagatccgctgaacgccgccaaataccagttcgtggtcttcggtgccatcgccgcgctgaccttgctggccgacggtctgatcatggccatggtctatcgcacctgcttcactaccgacgaccaatatcagacgcctaaagcacgatagcctcagtatcgatctcaggccaagcctcaggcgatggtgaccggcgtgccttccggaatttggttgtagaaccattcggcatcggccacagtgagtcgcacgcaaccatgtgaggccggctgaccgagcttgttgccttcctcttccatatactcgccggagttcgccccggtcggcaccgagtggaagaggaacgggccgttgaatcgcacccaataatcagcacccatgccttctgcgggattgtagaagtgatcgcctctcatcccgataacatagttgccgcgcggggtcgtatcgttgagcccggtgctggcgatcatcgtgtagatggtctcaccgccggattgcacatacacttcctgcttggcgatactgactttcacgctgagatcggagtattgcgacaaatcaggctgcttgccggtgggattcgtccatcgcgcacgttgcgcttccttgtcacgctgctcctgaatcgcctggttaaagaccggtacctgctggcggtccaaggatgaggccgatgcagacactcgcgatgccgactgttgcgcggattgactcaccttctgcgcctgcccctgaacctctgcctgcccctgtgcgaccgactcaccgcggggccacacccgttgggcgtcaatcgtcgagaagacggcaagaacgcagcacaacaatgcgcataccgcaaccacaatgcgccgtacaacgtaaattcgttgacgacgaatcctcatccgtgctcgacgccgctcagtcatgtcttccttctcgttgcaaagactttttccgtaagcattgtagccgcttttacgatacgtcgcgtaccaatatcacgcgcgctattccgctgtcactattcctattccgttgccgtccacttacgtctcagcaacatccacaggccgatgatcacggccaccacgccgagcccgatgccgaacagtcccgaggattgcgccgcgtgcgcggttccctgggattccaacagcacgtcctgcgtgaccaccagcgacagcatcgcatcgagaaggtcacgaatttgaccgacgaatcgatggggttgtgcgtcttatgcgaaatcaccataccgcgaatcgcaatcaagaagaacccgcaacttacgcagcagacggtcaatcgccttaaggaggcgttctggaagctgtatgaaaccaagccgatcgagaagatctcggtgcgtcagatcaccgaactcgccggctacaatcacgccacgttctacctgtatttctcgtccgtgcgcgacgtgcgtgaccagatcgaagacgacctcatcgcccagcgagacctcatattgaagcagtgcatgcatgacggcacactccccagcatcgcaccgcatatgcaaatgccatcgcaatcggaagcagcgcagcagccagcggcatcaccgcaagcccagtagcgaggtcaacccacagctggcggcgcgggaaacaggtcgcgccgcccagtacacgaatccggcgagcttctaccgagtcgcgaggaagaagaaacgcgggaaggggaagatgatgctgccgtccgactgtgtggggtattcctcgcggacttgggagaacacttcggcctcgaacttcttgcggccggcgtcgtcaagcgcctgcagatacggacgcatgccggtgccgcgataccagtccataatcgcctcatgcgagggcagcgtgtgctcccgtttgaatcgcagatactgttccgaatcccgggtaaccatgctccccacgctaatcagccgttcacatatcggccgatattatctcacaattcagccaagcagggcgtcgcggcgggcgatgagcccgtcaatcgcggcctcgccttcgatgacggtgaaggtcagggacttacgttcgctggtctgcggggcgatggtgtgcaggtcgccgcgctgctcgtgccagccgcggccgtggacgctggagttcgagggttcgaggccgaccacgtagtcgcccgcacccatcgacttccattccatgaagtatgggaagaggctggcgtcgaagtcgatgacgactccaagtccgagcttgcggttgaccacggcggcgaagctgcggccgttcttgtcggcggcgagctcgtgcaggtacacgctttcggggcggttcgcctcgggtgcttggatttcgttccacggcgtggtgtcggctgcggtggtctcgtcacgcggggtggccttgcggctggggatcacgacttcggcgccttcggcgagcaacggccagccgaagttgcagtggtacatccacatcagcggctcgtcgcggaaggattcgttggtcacctcatcctcgaccgtgatcgacggctggccgtacacgctggtgatcttgcggcgcatcaccagattctcgccgaacagttcggcctcgcgcatttcgccggagacctcgagcacgtagtcgccttcggcggtccagtgggcgtcggagcccacatgctcggccggcgtggtgcggatgcggccgtgcatcgggaagctgccggccgggtacttgccgccctcaggcgtgacgtacggcgcgcagatgttctcgaagccgcaggtgaagaacaggccgcccatgatggagcgctgcgcctccagcccgttggtgtcgaactggttgcggccgttcaggcccggcttggacaggaaggtgaggttctcgccgcggtattcgaactggcagacgtcgagggcgcggtcggccatggatacgaagcgtagcgggccgttcttcacctcgatggccttgaggccgtgggcacggccctcctggtactcgatcgggcgcacgtaggcggcctgctgaaggctgcccatgtgggccaacatgtcggctcgcatattgtgttctgtggatgtcatcgtcgtcaccgctccttgcaatcatcggcttgttgtccgtgtgcacatcatactgtaagcgttttccgcaattgtcgctatcaacaacgtatacgcatgtcgaaaagttggaccgaagaacaacgcaagcacaacgaaggctccccgaagggagccttccatcgtagcacacgttacgcgagaattcgtcgctcgcgctttacgcttccgcggcatcgtccttcagcgcacgcagcagggccttgttgcgggtttcgatgatgcgcttgccgtcctcgccctgccaagagaagaagccctgaccggtcttggcaccgaggttgccttccttgaccttttcggcgagcagcgggctcgggccggtgccgttgtccatgtcgtcgaacaggtaggtgctgatgttgtagaacacgtcgagtccgccgaggtcgatgctggcgatcgggccgaccaggttccagcggcggccgaggctgtacttcatcacgtcgtccacggtggccgcgtccgctatgccctgctggacgatgtagaacgcctcgcgcaacacggccagctgcaggcggttgcccacaaagcccagcgattccttcttgatctttgccggcttcttgccgatcttggccatgaggtcgaaggtgatgtccaccaccttcggatcggtcttttcacccggcaccacttcgaccagcggcatcaactgcgcggggttccagaagtgcgccaccacgaagcgctcggggtgccccatcaccgactgcagcgcggtggggctcaggccggaggtgttcgtggacagaatcgcgtccttgggggcggcgtgctccacttcggcccagacggacttcttgatgtcaaggttctcggccacggattcgatgacgaagtccacgtccgccacgccgctcgcatagtcggcgtaaccggtgatgcgggccagcaccgtgtccacggtgtcgccggccttgagcagtccggcttcggcgaagtcctcggcatcagaacggatcgccttcatcgccttctccagcgaggcctcgctgcggccgaccagatgcaccggatatccggccagcgcgaactgcaacgtgatcgcatggcccattgttcccgtgccgacgttcgcaatcgtcttgatatcgtccgctgtctcaatcatggagaccccttctttccggcggttcgcctggcgttggcgtacgcaggaacagcaccgtgccgttatgcgtttgctcgcattctatgccgatttcgctacgtgaacatttactgaacatttcgcggattcgactagcacaaatccctatatcagcacaaaagcccgttgtctatttagaagtgcaacatccttgttgttcggttaatgatagtagttcgtcggcgaatgcctcggccggggtgcggtagccgagcacgcgcatgggacggttgtcggtctcgtccacgatggcctgtatctcgtcggccatggacgagtcgatgcgcgtgcgcttgggcaggtagcggcggatcgcgccgttgcggttctcgttgccgccgcgccggtacgacgggtacggggcggtgaagtaggcggccatgccgagccgttcgcgcagttccgcgtggcaggcgaactcggcgccgttgtcgtgcgtgacgccggtcctggcgcggcggcgtccggccttccggtgcgcggggccggcgatgtggcaccggccggtccacggccccgtcttgagacgctccggccggtacggccggtaggattcgttctcgttggacgggaaccatgtgttgcgtttgattccgcggctgaccgtggaggcgtgtctgccgatcaggccggcgatccgccgtatgctcgtcccgttgccgatctctatccggatgatccgccgttcctcttccgacaggtgcgaatacacttgccccaaggcgcgacaccccttcactggttatctggacaatctccaatctaaagggtgtcgcactttcaaatagacaacgggccacattttcatgctttatgcaaaaaatgtgaggcatacgcacatttcccatcaaacgcacaggtgcaagaatggcagcaattcgccattttttgaaatcaccatgtgcgtttgacggcgcgtaagcctcaccttgttctcagcaggaccgaatttctgtgagctccctatagcgctcccctacgcaatatgtccgcaaacgaccacaccacatgggcgatacgcgccaattcggcgtagcggccgatggacagccactgcacacggtaccgttcgaaccacaactccagatcggcggcaagacgggcgcggcgcgaggcatccagcgcacggccggtcacatccttggtgtcacaggcgtcctcgccgccagccagtaccagcagttcctcgcccagtctattgaacaaccgctgcccatccagcatcacccacagcagttccgggttcaatcctcctcgtgccgagccatcgagcaccgcaacaaccgcactgccgcaatcgatcaacgcccggtcgcaatcccggcgtcgttcgagtcgggcatggttccgcaggagcagccggcggcgcgcatcggcgcatcccagcgtacggtcaaacacgagctctcccccgcacgaccgttccacatacgatgccacatccgtattcagcatgccggtgccggaaccgtattccagctccagcacctgcacggcaaggtcccaggggaatgacaccccatcggagtcgatgcggacgaggcaatccatgatgcgaccggactcgtcgccatacaccagaacggagatccgacggttcatctcatgcgcatcgatctcaatcggattccacgcgttctgagcgccataacacaggcccggcacgctcagacgcggatcgttgacgtggccgtaatcgccccaatcggtgaccaccatgccttccgcgccatacttgacacccgccaatgccatgtgatacgtgttcagccaggcacccgcataatcggggaagaaccggctccaagcccgcaccgcggggcacacgaactggcgacggccctgcgcggcgatggtctggatgttgctctcgtcgatctgcggctcgtacatccagttgagcatcgtgatgtcgccgggcagcagatccatcgtgcgcgggctttcgagcgcgatgtccgcccacaacatcggctgccgaccatggcggacgagcgtttcgcacaaatccctgacgaaaccggcatacagttcatcgcggccggcttccggcgcgtcctgcgcggacctgccacgtcccaagtcgaacgtctcatcgccgccgatattgaaggacttcgaacggaacagcggcgcgtattcctcaatcaggcgcgaggcgaaatcatgggccttgggatcggcggcgttcagcgtgtgatgctccatgcgttcgatgaagctgaacgggcggtcggcgtcttcggggaactcacccagcccgcgatgctcacgggtgcgcagattcatgtacatgtgcccgaacgtggccaacgacggcaccaactcgatgccgcgacgcgcgcagtactcgtccagatacgtgatgtcggcggccgtgagcggatcggtgccacgccacgcctcgctgagctcgacgaacgcgaaggcatgctcgacatacagctggaactgattgtatttatataaggccagctggtcgacgaaccaggtgaggaactccatcgtcggcactcgtccgcgtgtcacgtcgagactgtaggcgcgcaccgcgaacgcgggcttgtcttggatatgcaggcagggaatggcacgcgaggtctgcccgatgatctgccgcagcgtctgcagaccgtaccgcagcccgctttcgccgccgccacgcacggcgatggtatctgaggcgaacacatccagcgtgtattcgtcatgcgccaatcgtgaatccaggcccagggatatgacggtgccgttcatcgctgccggcgcacccgcacgcgcatctcgcgcatcttcggcggcattggcgctggcgtcgtcttcacctgtggctgcacggacacggcgcgtacggacggtgacgccgcagtaacgctcgagctcgctggacagctgctcaatcggcagcgtttcccaagtctcatcggcaccttcggtggcggcatattcgggaattcgtttctcgatcgtcaccagggacccgatcatagccgtgccatgcgtgtattccaatgtcaccggagcgggaatcaggataagacgccgcgttgcgtcgtcggccttatgttcggaagtgggcacagctactcctttcatgtggttttcgttagcacgccaggggatattgtacgacaccggcgaataggcgcgaagagaaccgttctctattggccgattggcaccgctcctggaccatcaccccttagcaccgctccagcagacgctcggccagtccccgaaagacctgaccgacgccatccgtgcgcaaggcgccatcgacatccagcaccgcgggacggcctgcttcgccgatctcgcgcacttcgggttccagcggcagctgggccatcagcggcacgtcatagccaagcgccgcgcttaactgttcagacacgcgctgaccgccgccggcaccgaaaatctccagcttctcgcccttgtgctcgtagtagctcatgttctccaccacgccacgcaccttcatcggcacctgcagggccacgagtccggagcgcacggcgatgtcggaggcggagggctgcggggtggtgaccaccacgagttcggcgttgggcagcgcctgggccacggaaatcgccatgtcgccggtgccgggagccaagtcgagcaagaggacgtccggctcgccccaccatacgtcagacaggaactgttccaaggagcgctgcagtcgcggcccgcgccacagaatcgcccggtcggcaccggcgaacatgccgatggagatcagtttcacgccccacgcggtgaccggcataagcataccgttcagattggtaggctgcgtgtgcacgccgaacaggcgcggcagtgagaagccatagatgtccgcgtcgatggcggccgtgtcgaagccgagggccgcaaacgtggcggccaggttcgcggtaaccgaagacttgccgacgccgcccttgcccgaggcgatggcgaagatgcgggtcttgacgcccggcttgctgaaggggttccgcttgcgttcggccttgaggtcggcaaccagatcggccagcttgtcacgactcattgaaccgacttcgatatgaggcagcagctgtacgcccggataggagctgaccgcgccgttgatctggttggtgatggtctcgctcagtgggcatccgggaaccgtcagctcaacgtgcacggtgacgtcgtaagtgccggcgtccgacgatgcgggcgcggcttcgatggcggcaatcatgccgaggtcggtgaccgaacgaccgagctcggggtcgatgaccttgctcaggcgttcgtagatgtcggcttcgatctgacgtgcgtcgctcataaatccgtatcctcctttagggcctgttctaccctagcgtgtgatgcggcggcatgccagagggagtggagtaagtcacactggggcgggattcgctttttctctcccccagtcagcctaaaggctgacagccccctcatcagagggggttaatgaagcgtctgagggggctattttagatggtgccggtggctaggagctgggcgaattgggtttcgctcagcatggggatgccgagttcctcggccttggcggccttggagccggcgtttgcgccaatcaccacgtaatcggtcttcttgctcaccgaaccggccgccttgccgccgcgctcgataatcgcctctttggcggaatcacgcgaatagccctccaatgaaccggtgaccaccacggttttgccggccagcgtctgcggcaacgaactggtctcggcctcgtcgacgcccacgccggcggcctgccaagcacgcaaagtcgcgccgcgccagtcaccgggttcgcgggtggcggcgaaccagttcaccaccgattcggcgatttccgggcccaccccgtcgatggccgtcagatcttcaatcgtggcgttttcgatggctgccagcgagcccatcgccgaggcaatcaggcgtgcggtaggcggaccgagccggcgaatcgacaacgcgaccagcacacgccacaggtcggcgtgacgggccttgtccatttcgtcgaacatcttgcgcgtgttttcgccgggccgaatgatcaccggtacatccgtgacgccagtgcgcgtggtcttgtgatccacgcgcacgataaccgcgtcggccggcacgtcatactcaggataggaggctgcggcaaagcccggaatagtaccaagtggcgcctcagccccggtaggtgcgccggtcgtctcgctggcggtacctccctgtgtttcggcagattcgattgcggtctccccttgcgcgcgttcggccagctgcttggccgtgagctttttggccggcgtgggcgcggtccagaaagcaggcacctgatgccacaggccagagccgccgacacgcttacgcacctttttcttcttaccgttcgcaccgaccgtctcatgcacctcgacgattgcggcctcacgccacacgcgcacgtcgcgcagatcggcggcggtcaggttgaacaacccggattcgttagacaacaccggcttctgcgcggccggcaattccagcccttccaccggctcgtacgggtcaggctcttcgccgggggcgaccagaacctcggtgatgttcggcgcgtaggtcgccaccgaatcaggccggttctcctccgggttggtcagagcgatggccgattgttcgcccaagtgctcgatgtcgaacgccttgcgtgaggccagcgaaatcacgcgctcggtcaactgggccgggcagctctccacattcgggcagcgaatgtccttgtcaccctccttggcgggtgacagtttcgcgccgcatgaagggcagaactcgggcatgacgaattcgcgcagctggtcctcacgccctttgcgccgttcaagcaccgggccgaccagttcgggaatcacatcgccggccttgcgcaccaccacggtgtcgccgatcagaatgcccttgcgtttgacttcaaatccattgtgcagcgtggtacgagccacggtggagccggccacgtagacaggtttgagcacggcgaccggcgtcacacggccggtacgccccacctgcacggtgatgttgagcagttcggtgttgacctcttcgggcgggtatttgtaggcgatggcccagcgcggcgcgcgcgaagtggcgccgagggtacgctgcaggcccaggtcatcgaccttgacgacgatgccgtcaagtgcatgctcgatgtcgccacgatgctcgccgtagtactcgatcatgtccaggatctcctggaatgaggtcaccgcacgattgtgcggggagaccggcacgccccacttggtgtatagatcgtaggcctgcgactggtcggcgaccacgtcatgggtgccgcgcggatggtccggcccccaagtgagctgccccagaccatgcgcatagaagctcaggcgacgggtggcggtgatgcgagggtctttttgacgcagcgagccggcagccgcgttgcgtgggttggcgaagggcgctcgtccggcgtcctcctgctcgttgttcagggtgtggaaatcatcccaacgcatgaacacttcgcctcggatttccacgaagtccggaacgtcttccttggggccgccgaggtttgcgggaatggagccgatggttcgcacattcagggtgatgtcttcgccggtaacgccatcgccgcgcgtcaggccctgttcaagcacgccgttgcgatagatgaggttcagggcgaggccgtcgattttgacctcgcagctcatgggcaggggcttggattcgggccaatcgaggtcgcgaatcaccgagtcgtaccaatccttgagttcttcgatggagaagacgtcgtcaaggctcatcatgcggctggggtggcgcacggaggcgaagtcgttggagaaggaaccgccgacgcgatgggtgggcgactgcggattgtccagtgaggggaacgccgcttcgagtcgttcgaggcaacgcatgcgcgcatcgtaagcggcgtcggagctgacgggtgagtcgtcgatgtagtaggcgatctgatcggattccacccatgcggccacgcgagcccacaggcgggcggcggcctcagcggtcatcgtgttcacgtcgaaacggtcgaggcgtatcgcgtcgtcgtcagtgggctgcagtgcggctatccattgttcggagccaggggcaaaacgtgcaataccggtatcaggccggacctcggccacatccccatcgtcgaaatcccatgccagttgttcgttcgtgctcatggttgtctatcctagcgggctcggctcccctcggccggctataccgtcaactcccctcaggcggctacgcggatagcgagcgcaggaactgggcttggatgatgtcgatgttatcgccttcgccgtcattcatgcgggccacagccaccgagagcgtgcgggccggcacgaacatgccctcatccacgcacacgcgagcggcgtcacgcacgatgtcagccacttcgatatgcggccagaccggcagatcatgcgtggcaagcacatgggcggcggcctccaccgattcaggcaccggtatgcactgcgagtccgcacgggaaaccagttcctgcagttcgctttccagcgaaccaatggccccgggagcgatgtgatcgctcataatgtaggctgcggcggctgtgtcgaaccggtcgagcatccattcggcgtacgcgaaccggtagtaggcgaacgcggcatcgtcgcggtccaaggccacgcgcagagcattcaggcaggcggcgcgtgccgaatcccaatcctcattgcgggccagttgaatggcgagcttcagatgtgagagcgggtaggcgggcgcgtacgccaccatacggttgagatgcgggatcgccgcctcggcacccttgatctgactcaacacgtcagccagctccatgtgcgcgtagaacagattgtccgggataagcaccgtacgctcgtccaatgtggcgaacagccggttgtagaccacgcgctcggcataggaattgaagtatcgaggtacgccatggcctgccgcatacacctggtccaaatgggccacggccgcttcggccgcttcgatggcctgatcggcttggcccgagaacagcatgtctcgggcgcgcagacgctccttgtcaagatcgtcggcaagcgtgaacgtgaagtccggcgtgtccttgccatcgatcaacgcactggtgacctgagaggccaaatcggtcagttcgggatcgcatatcgattcgatgacctgcatggctcgctgggccttttccacggagccgagcgacgtgttcctggcgatatcgtggaattcgttgacgccatgctgcagcaggtccactcgctggatagccagtccggcactattctgtgcgcccagcacgtgagcggtcgccgggctgaattgacggtcggccagttcgggctcctcctgggatccggtgggagagaaccggctgtccgccaagtcgaagtcggcgctgatgggtttcagaccaccttcgccgtccacgtccatcacggcaccgaacatgcggtaggtttcctcgggattgtcaagcccagcggtgtccagtcgcttgaggaaggcatcacgggtgaaggtgacggtgaccatattgcgcacggtgggattgcggcgcagcacgctcatcggatcatcgtccatgccggcggccccatcagcaccgtcagtgccgacgccctcgccgccgataccgcccaggtcgtcgcctgcgccggtatcgtccggcatgccgaacgccatttcgtcgatatcgatgcccttcatcaggtcttcgaactgcgaatcgatggacgcagcgccatcggcgtcagcgtattcggccgcggcctgatccgtagcatccgcagacggtccggtaccgttgcctgctcccccggccgtgccgcgttcgtcaccggacgccgtctgcccgaacgtctcctcatgggtgatggggcgggtcgggtcgccatggaaatcaccatctttggggtcggctttggaacccacacgccccaaatcgccactgcgtagatgttcgaaggcgcttagggcctcgctcatcatcgcctcgatggcggaatcctgttcggcaatcgcctcttcaagaccaatggaatcgatgtgcaacgacacctggcgcacggattcgctggtgccgaaacttagcgcggccatcatcaggccgacacgcaggttgtaggcggcgctcattgacgcgcgttcgacgctactcagcgcacgccacgtacgtcgagtggtgtcataccggctatcgggcatcatcgaggtgccggcggtggtgaagccaatggccacttcacccgaatccaagcgcgaccggaactccacgtcaaaccgatacggcaaccgtaaccggcgcaacagtgaagagagggtctgacgatacacccattcgtcgctcctcgccggcgaatacgaaggacgagcggcttgagtgttggtgtcgctcttatcggtccgttctacagcgccctcagcactctcagtactttcagcgcccgcagcattcgtcacacccgaatccggcacgttctgctgggtcagcacatctcgaggatcggggaattcactgcgaatctgtccagccgtgcgtgcggcgatatcgaccaggctcagcacggcccgacgttcctgctcgccatcatacgggtcaagcgccataatcgcagggttttcgatgagtttcatgtcgatttgcgcggcctcggcacgggtcaccgtatcttccgtagggttgcgtcccaaggaagcgttgcgctccaaccaagcgctcaccgcagcgaatcggttgaggttgccttcgatcttcaaggatttcagcgcctgcccgaatgccaaggacttatcccacgtaaagaaatagccgctcgaatacgtcgaggtgtacaggtgcaatggttcggcgccatgcaccgcttccagtcccggcgtggtgtcgagagcgccggcttcgcgcatcagatcggcgaaatgatcctccagaccggaggcccgcatgccgtgggcacgtgccgccaaagtgtcacgcaccgaacggcgaatcgcaccgattggcgcctcacggttgagacggcggaagatattgccggaaccgaatccgatgagcagaccattgatctgcggcaacatatacgtggcgaagaacgcgatggtaatggcatcgcggtattccaaatcatgacgcatcgcaggcggcagattggcacgcatctgctcaagcgtgtaccggttgccggccttgagccatgaggcgagccacgtcatgcgtccggtgtcgtcacgccccaccacgccaccggtaatggccttcacaccgtcagcaccatgaccaaggccacgccccaaaccacgcccatgatgcagcgcacttcccaggccacggtctgtacgggagaaaccggaacgtgaacgaggctcgtcgctttcgcccagccgctcaccgtccggcaatgtcacttctttttccttgccgaacataaatcgcgcctgcatatcctgcacgtccatgtcggggtcggtgcccacgaatacgcggccatgcgtatcggcgaacgccacctgcgcaaaatgatcgcggtcggggaaaatgccaagcgagaagccgcggcctctggtggagggcagctgcgcccatccaagcaccagcccttccggcacgttctccaattcggggaaggtgcgtcgcttgattacaggactcagcgccactgcatggcgagtcagttcgtcgataatgccgcctttacgctcactggtctcctgcaaggcatcgccgaacggattcgtatcgtgcttcttcggcttggacagtcccagatcggccgcgagcgcgttcatcgaatccttcagcccgcccagcagtggcgcgcggttgtgcttcccatggtccgatgtacgttttggcatgattcacattgtctcttgtttgcccgacatcaagcccgaataaagcctatagaataaatgcgtgcattccatagaccacactcgcgcagaccgtccgatgccgtcgaatcatgaacggcgcctgcccagccgtccggatacccggcaccggctgcgtttggtgcgcctgctgatcgccttgctggccgccgtcgccgccatcgccgccatggagtgcatcgtgttcaacctgccgttctggcgtacgctcggagcgagcacggatacgaacgccgtgcataacacgctgggttcgggtctcacgcgccggaatgatggcatgttgaccgtcaccgatccgaccaaggcctatcttgaactgaccgcggacggcacgtcggattacctacgcatcgataccgcgagcagcaaggtcatcgataaggcccgtgagcaggccgaggccgaatccgaagcgaacgacgataaggaagtcttcaaaccgctggcgaccattcatgtgcgcgcggatgtcgatggcatcaccggccaggcccagtcgatgaatcccgacgctattcgcagccattatgtcaaggcgccgggtgccggcatcgtgcgtatttggattcaggaagagcgcggcgcgatcgtaccggtcaccgactcccgcgccaacgtgcgcgtaccgttcgtcatcaattggatgcgcgtgctcgccatggccttggtgttgctgatgattgccgtctggaggccgggatcgcgcctgtggcgtatcacgcttgacccgtccagcactcggcaacgacttgctttcgtggggcttatggcgattcctaccctgcttatcggcgcatccatcatccacgaactgtggtacgcgtctccgctcgtcttccacgtttccggcgattacacctatgatttcgaccagtatgggcatgtggccgatgcgctggtcgccggccgcccctggctcgacttgccggttcccgaacagctggccgccaccgagcacccctatgacgtagccacacgtgcccagctactcgccaatggagccagtccgctctactgggattacgcgtattatgacggtcactggtattcctattttggcgtgttgcccgcagtgctgctgttcgtcccctatcgtctgctggccggtcataatctgccgacatccgccgccgagtatattctcgtgctgctgttcatcatcttcttctccttgctggtgctgcgcgtcatccatcgtgtgatgccgaagacttcggtggcggccgcgtcgttagtagtggtctcatcgttggtgagcgcgcaagtggggtatttgctgtatcgcacgaacttctatcagataccgttcgccgcatcgctgacgttgacgtcgctgggactatggctatggctcggcgcggacacgtcccgccgtccgctgagaccatcggaccgatggcaggcgggcgatgccaagcctctctccctgccacgactggccttgggcgccttgtgcattgcggcgaatttcggatgccgaccgacgttcaccttggccgcattgcttgcgttccccctgttctggccgcagattcgcgcgctgggcaccggtctgcgcacacgccgcatcaagccgttgcaggcgttgcgcgcgccgctggcggtaatcattcccgccattctcgtcgtgacgcctctgatggcgtggaacatggttcggttcgattccccgttcaatttcggcaatgcgtatcagttctccatatccgatatgacccggtataccaccccgtccgcggatatgcccgccaacatctggtattacctgttcctgccgctgcgcttcatgaatcgtttcccgtggctggcgggctctcccgccccgatgccgcaatggggttattacgaggtgatggtcggcgcgattttcacggccacgccactgaccttgatggctttggcgctgcccctgctgcgcagattggaaacacacggcatgcggccatggctgatgtcttgcttggccgtggcggcggtgctggtcgtattcgacagccgcgtcggcggtttgggatggcggtattccgccgatttcggctggctgatctcgctggcgtccataccggggctactgtggctggtcaatgggcgcgaaccgagccggtcattggcgggggccaacgacgccgcttcaggcgatggcatcgcccgcgtcactccgtggcgttggctgatgcgctgggtcgtggtgctggccgtattgtgggcgctgggcatagccatactgagctgcttcgtgcagtcgcgcagcgatgcgatgatcgacaacaatccgacgctctggcatcaggttcagtcttggttcacgatgctctagtctcgtatcggcggcgaatcagatcctcataaaacgccacagcctcagccggcgctccgtcaaacacgaccgcgtgctcgtccagcaccagtatgcggtcgatggcgtattcgggccggcggatcatatccgtgtcatgcgtggcgaaaatcacctgcttgttgtagctgaacaacgccttggccacatgcgcggtgccaatctcatccaatcccttgctcggctcatccgccacaatcgcactcggctcaaagctcagcgcggccgcaatagccagcaggtgccgtttctcggagtccaattcgccggccttggccttggagacctgcgccaaatcaaaatgcgcgaacagattaccgatgcgcgcatgacgttctgactcgggcaccttgtgctttttcaacgcttcggaaacagcctcggaaatattcgccgcttggtagaaactgttcggaatctcctcgcggcgaactttgccgaccagattatcgatgcgcttcgcgtccttcttcacagccgggtcaagacgttcctcaccgcccgcaatggtcaccgtgccggcgttggccttcaacgaaccgtccagcagacccagcaatgtggatttgcctgcgccgttcagtccgatcacggccacccggcgctcgctgatggtgatgtccgtgggagcaagtcccacgtgcccatcatcatacgtatgcccggcctgttccaaagtgaacgtcagcgatgccgggtgtggcagttctttcggtctaaacaagaatcccatgccgccattgtacgtggagtacaggtgtggtgccggcaaacaccggcctatcgcagcaaagcggcgacggtattgagcacggcgcggatgccacgctcgaattcgtccggttcgggcagcagggaaacagccaggtatccattggaggtcatgtcgaagaagtagccgggctgtccggtgagttggtgctcgtcaatcagccgcaacaccagttcgttctcatcgatgacggaaggcactcgtaacagcacgttccagccgccttcggcccgtagcacgctgaccagcccgttgggatcggcgtcaagcaactcgtgcaacttggccaggttattgcgcacgcgctcccccacccgtctggtctgtgcgggcgcggcgttcaataatgcgggaatccgttcggcgatgatgtcgcccatcggcagataatcgtcggcgatgacgtccagtcgacgctgggcctcggcaacgtcctcggcaggtccggacacctgaatccacccgactttggcgtgcggcgcggccagcattttggagaatccgtctagggcgaaggtgagcacgccgcgctcccccgcgagccgtgcgtcgccggggaaaggttcgagagagtaatcgaagaacacttcatcggcgataagggcgatgccgtgctcacggcacaatgtcacgatacgtgcacgctcggttggttttacgtacgaaccggtcggattgttcgggttgatgagtaccaatgctctgacgcgttcgccaccgggctcgctgagtagccgctcgagttcggcgatgtcgatgaaccaggagccgtcgaattgcaactggtattcgaccgtatcgacgcattcaagccgtgcaatcgactcaatcaacggatagccgggtttgggtgccagcaccgcgtcgccggcatcgcaaagtaacttaatcagccacgaatacgcctcggacgtggagctcagcaggtacagggcgtccgggtcggcgccctcgatggcggtattcacattggtgaaagcggcatggcgctcgttcctgccctcgccggcggcgggcgaagccaactgagggctgcttgcgtctaccacgtttgccgtattgaggaatgcggccaatgattctcgtgccgcacgcggtccacgcgggtcggccgtatacacgctcggcaccaattcgggtgccaacccgtggcgggtcggattggaatcgttgagtttgctgagtgcgatgccgtttgccttggctgccgcctcggccgccgcaatgggattcggcgcagaaatatccacacgagaagagaaatgcacgctcataccctccacgataaaaccacccctgccgagccaggtatatcgaggcctcatatccaccagcatccagcactacgacaatcgtgcggcacggcagcggagtcgtcagacatactatgacttcaatccacatcgaataacggcctagctacattcattaggtcattttcgcgctcattaggtcactgctagtcgagcctcacaattgttgatgcttgaaacgccgccattccgagcccattgcaattcaggtttggaatgggagtgacctaatgaacacataatcgacctaatgaacgaattactcattaaaaaaaggccgcccgaaatacttggacggccttacatatggtcaatacggctcctgcgccagcagaaataactcagctcactgctgcttggtgctggcgtagtaggcggcaccgacgatgccagcctggttacgcagcttggcgggcacaatcggggtcttgatatccacgtacggcaggaacttttcgctctgacggctcacgccgccgccgacggtgaacaggtccgggttgaagtacttttccataaggccgtagtacttggtcagacgcttggcccacttcttgtagcccagttcctcgttctcgcgaatcgcggaggaggcatacttctcggcgtccagatgcttggcgctcaggatgatgtgtccgagttcggtgttcgggatgagcacgccgttgtagatcaaggcggtgccgatgccggtgcccagtgtggtggcgatgaccagaccatcctggcccttggcggcaccgaactggacttcggccaggccggcggcgtcggcgtcgttcaccacgacgaccgggcggccgcaggcttcggagaacacttcagtaacgtccacgccaatccaagactggtcgaggttggccatgaagtcgagcttctggccgggcttgatcggcgcggggaaggcgatgccaacgggtgcggattcaggcacttcgaagtggtcgagctgctgcttgacgattttggccacggcctgaggcgtggagacctcgggagtgagaatcttcaatcgcggctcggcgaaatcgcccttggtcagatcgacaggtgcggccttgatgccggaaccgccaatgtcaacaccgaaagcctgtgcagtttcaatcatcgttgaccttcctttccatacgttttcatcagttcgtagggttgcgcccagtctaacgcgaccatcacgcggacgcgccggacgggccggggcagggccgtcactcaagcgacggcatgggcttccaggtggggtcgtgcatcagcttgcgcgagtcccaccagcccttggcaatctgcaccaaaccggtcttgaggtgctcgcgatccaccatcaccaggcgaatgacttccttggccgcggtgagcacggtgcccagtccaaacaccagcggacggaagtcgccgtaggtcatgaagtaccgggccatatagccgcggttgcgcatgatgtggtaccggttcatgtcggacgtggagttgagctggcgcacgccggcgatatcccagttgccgatttcgcgcgtacggcgcaaaatcacgtcgggcaccacaatcgggttggtgaccttgctggcgcggtagccatacatcgtgtcatcccagtagatgaagaagcgcgggtccggcagaccgatttccgtgaccacacggcggttgaacaggccgccttcgaagcacagcgtgtccatcactcggtatccggccgggccgaatgcggcgggcgcgatcgggttcgggatgcccagcggcacaatgaagtcgtactgccagtagaacgggccgccatcgtaatcgaatcgggatccctgaatcacctcgtgcttgtcggtccacttggacagcttggcaatggcgtccggcagcacggccacatcgtcatccatcacccagaaccatgcggcgcccagatcatacgccttggccacgccggcggagaaaccgcccgcgccacccaggttctcggtctgcggcgcatagaccacgcgctcttcgttgccggactggtcggccacggtggtgccccactggccggtcaccttgccggcaaacgcagcgaccatgtccgccgtctgatcggactgctcattgtccacgatgacaatgcgccacggtgcctgctcaagcgccagaatcgaatcgaacagtacctcgagcagctgctgacgtttgtaggtggtgacgatcagggcaagcttgtcgatggtgttgttgggtttcttcacttcagccatggctcccattgttgcacttgaccggcacaagacgaatttctgcacagtgaaacgcgggttgcgtacgtccggcgcatggcgtatgaataagcctgtcagtttcagggaaggtgcaattccttactggcggtaacctgtaccccgggtttcataacggggatggcgggaagcccgcgacccgcgcaagcggctgatccggtgagattccggagccaacggtatagtccggatggaagaaacgagggctcattatgagcgtatcttcgcgtatccgcatgcaagttgttcgttctgtggcgcccgaggccgagggttcggccagcgcgtccaccgccagcaccagcgccaaactcggctcgcacaccactggtgtggccgattccggccgctggtccacgcgccgtatcgccatgtatgcactgttcgtggcgctggcgatggtcaccagcttcattgaattcccgattacgccggtcacttggctgaagtacgacccgtccggcatcgtctgcctgatcgccggctttgcgtacggtccggccgccgccgcaatcgtgtctgtgctcggctttgtgccgcacatgttcgccgacccgtggggttcgctgatggctgtgctggtggcgctgttcctgtctgtgccggccgcgttcatctaccgtaagatccgtacgcgcaagggtgccgccatcggcattctggtgggtgcggtgctggccatcgtggtggcgctggtgggcaacctcatcatcacgccgatttacgcgcacatgccctaccaggctgtggccgcgatgattctgccgattctgctgccgttcaacgtggctaagatggcgattcacgccgtgatcaccttcctgatctacaagccggtctccaacctgctgtccaagcagcagtgaccggcctgagacgggcctatgcccgccacgactaacgaccactcaacgaccactcaaagaacaagaacgcagaactccggcccttgccgggattctgcgttttcgcctatcagttacggattgctgtttcatgaccgttgcaccccattccttcgacgccgacgagttccacgattccgccgagcccgctccccccgccgccgtactcaaggacattcgtttcagctatgaccgcggcacttcatgggctttggatggcgtttcgctcacggtccatgccggcgagcgcctatgcttggtcggtccgaatggatcgggcaagtccacgttggcccgtctaattgcgggattgaccgcgccggacggtggcgaagtgacgctactggaacagcgcgtgtacgcagccggcccgaatgccgacgcctatcgcgctgcccgccgcggcatcggtatggtgtttcagaatcccgaggatcagctggtcaccaccgtgttggaggatgacgtggcttttggcccggagaatctcgggctggagcgcgggctcatcggcgagcgcatcgttgattcattgcaggccgtggggttggcgaacttgcgtcagtccgacccgacccgtatgagcggcggacagcagcagcgcgccgccatcgccggcatgctggccatgaacccggcgatgctggtattggacgaaccgaccgccatgctggacgaatccgcacgcgccgaagttatgcgcattttggatgatttgcaggcgcgcggcaccactattgtgcatgtcacgcatcatccggatgagaccgttcatgccgatcgcatcgtgcacatggaggccgggcgaatcgttggtgtcactgcagccgccgataatcgactcccgctagcggaggctgtctcgcaaagcgagactgagggtggtatcggcacagaagccgcccccagtcgtcctacgaacgacagaccccgccagcggaagcgcgaagacggctccgaactgccgctgctctccgacggcatcggtgatatgacgaaccccattattcgcgtctcgcatctgacctatcgctatccttcggccaaacgggcggttatcgatgacctgtcgttcaccatcgcgcgcggtgaaaccgtggcactgatgggcgtgaacggttcgggcaagtcgacgctggtgcgcatgctgtgcgcgctggccgcgccgaccgccggcagcatcgaggtggccggcgttccggtggcctcgaccggcaaacgcggtagcaacgcacggccgaagccggcgaatcgcaggcaattggcgcaattgcgccggcatgtgggttacgtgatgcagcatccggagcaccagttgttcgcggacacggtggccgaggacgtggcgtacggcccgcgcaaccaggggctcgccgaggccgaggtggccgaccgtgtgcgcgaatcactggacctgctgcatatcgggcatcttgccgaccgctcccctttcgacctgtccggcggacagcagcgattggtggccatcgccggcgtgctggcctgcaatcctgacgtgctcatcatggacgagccgaccgcgagcctggacgtccaggccaaggagcgcatccatgagctgttgcgcacgctcaaatcgcgcggcgtgaccgtgcttatcatcacccatgaccgagcggaggccaagcatatcgccgatcgcgtggtacgtatgccgattgccggcgcggctggtgctgagagcatctcggcaaccgagactgccttccccgccgagtccgtctcccctgacaaacccgcgcactcggtgatccaccgacttgacccgcgcgtgaagatggtgggcttcctggccgccatgttcacgatgttcgcggtgaacacacccctccagcttgcgctgggcatcgccatcaccctggccgttatcgcggcggcacgcctgaacccgttacgggtgctcgaatccattcatccgattctgattctgctggtgctgatgggcgtggtcaatctgtttgtggtgcgcaccggcacgccggtggtggcgctgggcccgctgagcatcaccgatcagggcgtggccatagccgtgctgtacgcctgccgtttcgcattggtgatcattctgggcgcggtgttcctcaccaccaccacgcctaccgccatgaccgacgccttcgacaccctgatcagcccgctcaaccggctcggcatccacgcccaggagatcgcgttggtcatgagtctggcattgcgattcattccaacactgaccgacgagacccgtgccatcgtcgatgcccaatccgcgcgtggcggttccatcgaaaccggttcgctggcccagcgcatcaaggcgatgagcgcgattatcgtgccgattttcgccggcacgttgcgtcacgcggacaacctgagcctcgcacttgacgcccgctgctacgaggagagcatccgccgcacccactggcgtgccctgaccatcgccgcgcaagatctcgtgttcgccgtcgccgtcatcgcctacatcgccgccatcatcgcgctgtagggcggcaaacagcacagacagcaccggttgctatgctggtgtggttatacgaaagatgtaaggaaattcccatggcattgaccaagaagcaaatcaagcagctgcgcgcgatggcaaactcgctgaagcccctgttctatgtgggcaagaacgatttgaccgagtcggccgtcaatcaggccgatgaaaccattgagaagcacgagctcatcaagtgcgccgtgcaggacggttctggcctgaccgccaaggaagccgccgccgagcttgccgagcagctgaacgccgaagtggtgcagtccatcggcaatcgtttcgtgctgttccgtcgctcccggcgcgacgatgtggagcatatccgcttggtgcgcgagtagcgttcgctctgctcgatcccgtagcttgatatgagtaatggcggttggaatcagtccgattccaaccgccattattcatattcgcccagcgagcaccgtcactgatccaagatggacccgacgattcccgcaacaatggtcagaaccaaggaccccagtaccgaccaccagaaaccgtgtacgaagacgcccacgccgaacagactgaccgccagccagctggcgagtcgcatgaacagccaattgataatcaaggtgaccagcccgagagacagaatcgcaaacggcagtgcgatcagatgcacaatcggcttgattgacgcattaatcagcgccatgaacaaagcgaacgcggcgatgccgagaatcggaggctcccccaccggggtcatgccgggagtcaccgcgaccatgacggcggcggcgatagtcataatcaaccagctggtcaggaaacttttcatggcccaatcgtagcgcggcaggttttactattaggcaaaacgtgagatgatgttgtgcagaaacggtaagaaggtactgccgttcccgattgagaagggatagacccacatgactgataatcaacaacaaccgtacggttcggacagtgttccgcagccggcacaacccgcacagcccgcacagccgtcgtacggccaagatgccgcacagcagccgcagggctatggcgccccacagcccgccgcatacgctcaacccgccgccggaagctacggccagcagcagccgcaatacggccagcccgccggcgcatacgctcagcctcagtacggccagcctcagtatggccagcctcagtatggccagcccgcacagcccgtagcgggctacggccagcagcccggctatggacaggcctaccagcagccgaatgcctacgcacagccgcaatacaccgccgctccgtatgccgccgccccggtgtggcaatcatccaagtccaagttggctgccggcctgttgggcatcttcctcggcggacttggtgtgcacaacttctatctcggcaacaccggcaaggccgtggcccagctgttgctgacgcttgtcggctggattctgctcggacttggcccaatcgcagccgccatctggggctttgttgaaggcatcatcattctgtgcagcaagcccggctcgccgtggcataaagacgccaacggctacgaactatcagactgagactgacctcgggccacgttcattgggcctctgatcaaccacgcctctgcaggtatcatctcgatgccgcagtcgtagcgggatgcgacacgccggccgtgtacatgagttcatgtacacccgatacaggcgaatcagtatcgcacgagattcaacagttcctgctgtttggcatagcgggaaacgttggtcagggcgatgcggatgatgtgttcggaagtcttttccaaatgattgccgccggccacatgtggggtgatcaggcaatgcggctcatcccacaacggactttccgccggcaacggctcaggctcggtgacgtccaatccggcaccgtggagccgtccattgtgcaaggcgtcggccaaggcctcgtgatcgatggcgtcgccacgcccggcattgatcacgatggctgtggatttcagacgccccagacgatccgcattcagcagatgatgggtctgcggcgagcgcggcaccgccatcgccaccacatccgccaatggcaacagcgcttccagccgctcgaagccatacatcttttcaatgcccttggcaggcacgtccgcatgacggcgcacgccgaaggtacgcatacctatggattgggcaagctgagcgaaatgcgacccgatgtcgccgacgccgataatcagcgcgatgccaccttccgggctcaataccgggccttcatcctgccactgatgatcacgctgattggaggcataccggttgaggttcttcatcaatgcccacatggtggcgaacatgtgttccgacacgctttggccatacgcgccgctcgcattggtgaccatggtgccgcgaggcagcacacccgggcggatgtacgcatccacaccggcgctgaaggtctgcaaccattcaagacgggtgtattgggaagcctgcgagaccggaaagttgccgatgactgcggtagctcgggagcgaagctcctcgggaacagcggccgaccagaccatgtcgccgcggtgcgcttcgtcgcccacgaattcctgcggcacatcgcgggccgccttggcgaaagcgcgccgttctccttcgttgagtggcaggcagttgacaatcagcttatgcgtgttctcaatacccatggttcaccaaactaggcggcagggcggatattatcgcgtgtttcctcatgctgaaccaatgccgaacccgccccgccggaccaatgccgaacccgccccatcaaaccccaccaaaccaagggacagcccattgcgcatcgaccgtagcgtccgccccgaaccgtacactcacaggtggttttgtgattccatagcgtgcagccaaggcagtacgattgccggtttatccgcacgcacaggtacctacgccggttggtaaaccttacattccatacattgcaaccgaacgtttaggagcatgtatgcctgagcagcatattgataacgagaagattcccacacgtcttatcggcgcgattgtggctgtcggctcacttgccttcattggcattctgaccgaaaccgtgatgaccgtgcttttccccgcactgatgcgcgaattccatgtcgacacggccactgtgcaatggattaccacgatttatctgttggcggtggccgccaccatgcccatcagctcgtttttgaagcgccgattcgcactgaaaaccatttttcttgcggctgtgattctggccatcgttggctcgctgatcatgatcgtcgcccaagccttcccgctgctgattgtcgcccgcattattcagggcattggctcaggcgtggccacgccgttgatgatcaacatcattctggagcagtctcctcgttcgaagatcggccgattgatgggcgtaggatcgctggtcattaccgtggctccggccatcggcccgaccgtcggcggcgcggtgaccacagtgctgccgtggcgcgcgattttcgtcatcgccattccgctggtgctaatcgcagcatgcatcggcatgaagtgcattgagcagaagacaccgaccgaggctgcctatcttgacccgattcagcttgggtccattgttgtcgcgttggtcggtctggtgctggcgctcaaccaaggtggcgtggccatcagtgcggcggtgtccggcaagtcagccacacgctccggcattatcgccattgtcagtctgattgtgggcctcgccttgttgatcgtgttcgccatgagctccaagcgtgccttctccccgctgctgcgccttggcattctcaaggatcccgccgtactgttacacgcctgcgcatatctgctgctgccattggtcgccatcggctacggctatgtcatcaccaatgtggcacagctctcgctcggcaccacggcatttgtggccggctctctggtgctgcccggagcactggtcggcgctgtctgtgccccgcttggcggctggttctacgataagttcggcgcggtcaagccgattctgattccgatcggcatcgctattttgggcccagtgcttatgctggtgttctcgatgcagcttacgcccgtgctgctcgccggattctatttcattttcggtctgttctattccatcggcaatgcgaatgtgatgaccagtggcctgtcggaggtctctcccgagttcaagccggacggcaacgccattttcaacacgtgtcttcagtttggcggcgctgccggtaccgcactgttctccacgattctttccgtggctcaggccggcgcaggagaagaaggcaccgctgagtttgctcacgccactgccgtcggcggcacatggacgtttgccacgatgacggttatctgccttattggctggtgctgtctggccaccgcgttccgcattcgcgcggcacgtaagcgtgcataaatccgatcatcaatagagtcccagctttccaaacacgtgtggggcgtgccccgggagaaccccgggggcacgccccacacgctaatgaaaggaagaaaaggagaaagaaagctttggcgggcagtgccggctgctgtgaccttgccatcacagcagccgggctgatcccgcctattcagttatggtgtgtgtcgtattcggtgcggagaccgagcgggcaagcccgctattttttatctccgccgaccgccatcaccgcgcgctgaagcacaacgaagacgaggatcatgagaccgataacgatggtggtccattcggccggcacaccgaagtcagaggtgagcggatcgaggatggagcggaccagagagccgagcacggagccgagcacgtagccgaagccaccggtgatgatcgtaccgccgatgaccacggaggcaacggcgtcgagctcccagccaatacccacagtgttcttggcagagccgatgtttgcggtgtacacgatcgaggccagggcggcgagagtcgcagaggtcaagtagatgatgtactgcgtgcgcttgaccggcagacccataagttccgcggaggaacgggagccgccgatggcgtagatggtgcgtccggtgcgggtatggtgcaggaagacgtagccgaagaccacaaccaccagtgcgatgatcacgccgacgttgaaggacagatcgttggagatcttcggattgtcgatgatcttgatctcgttggagatgaacgagaagtcattgccctgcgggaaggtcagcgagtcggtggagatgatggaggcaagaccacgggccaggaacatcgtcgacagggtcgcgatgaacggctgcatgttgaattcctcgatcaaggtgccggccagcaggccgaacacagcgccgatgagcagcatgatgatcatgaccaggaaggcgggcacgccggcgttcgccagcttcaggccgacgactgcggtgatggccacgatagcaccgacagacaaatcgataccaccggtcagaatcggcagggtcatggccacagccagaataatcaggtaggcgtggtcaatgaacagggaggagatgaagcccagtcgaatgtaggtgccgaacaacgcctgacccatgatgatcatcaggatgaagatcaccacggccgcgagggtcgggatcatctgacgatcgagcttgaagcccttcttgggagccttcactttgtttgccgtagctgttgtcatgctgccaccgccttagcttgagccttgagcgcgcgcttgcgtttcatattcgcgctcaggttgtgaatcttcggagcctgcatcacgcagatcacaatcacaacgacggcgaagaaggccggagttgcctcggcgttgacgcccagggtgatgatggtcttgcggatcatggcgataattacagcaccgacagcagagccggcgagggagaacttaccacccagcagtgaagtaccgccgatgacgactgccagaatggcgtacatttcgaggtcctgaccggtcttaaccacgtcgacacgcatcacggatgcggtggcgaacagaccagcgatggccgcgaggaagccggaaatcgcgtagacgaggaagaggatcttcttcggcttgataccggtcatacgggaggcttcctggttgatgcccacggcctcaatcatcatgcccatagcggtcttgcggcacagcaggccaacgagaatcacaatgataacggcgatgacgaagttggcgggaatgcccagaatgaagccgttggcgaaccacttcagcggttcgttgccagcaactgcggaggcgtcggtgttctcaccggaggtgatgaccttggccataccacggccggcgagcatcataatcagggtggtgatgaacggctgtaggcccaggaaggaaaccagagcgccgttgacgcagccaatggccagaccaacagccaaggcgatgaggatggagagccacacgttcatgccattggacagggtctgcatggcggcggcacctgccactgccataacggaaccgaccgaaaggtcgataccggcggtggagataaccaaggtcataccggttgcaatcatcaggtatcgggcagattcctggagcatggtgatcagcgggccggccagaccaccggtgttgctgttccagctcagagccaggaagtcatgctggaagatggtgcagatgatgaccagaagaatgaatgcgacgatcgaccaggtcaggttgctgctcagcagcttcttgacaaagttgttgccctcggcttttgccttttcagccatctcatgcctcctttccggtgtttacgttggtgttagcgatggtttcgacgatggtcgcctgagagacggtgtcgtcgttttcgatttctgcgatcttgtggcggtccttgagaacctcgatgtcgtcggacagacgcacgacctcttcaagctcggaggagatgaagacaacgcccatgccctgagaagccaggtcaagcacgacctgctgaatttcagccttggcaccgatatcgataccacgggtcggctcgtccagaatcagcagctcggggtgcgtggccagccaacggccaatgagcaccttctgctggttgccgccggagagattcttgaccgggcgatccgggtcggcgggacgaacgttgagttccttcatgtacttgtcaacgatggcgtccgcttccttcttgggaatcggcttgaacataccgcgcgttgcctgcagggcgataaggatgttctggcggacggtcaggtcgccgatgatgccctcatcacgacggttttcggtggagtacgcgattttgttcttcaaagccgtgtacggatcggagatgttgaccttcttgccgttgagcgtgtaggtacccgaatccggcttgtcggcaccatacaggagtcgaccaagctcggtacgaccggagcccagcaggccagcgaagccaacgacctcccccttgtagatgtcaacatcaaccgggttgatggtgcccttcttgccgaggcccttgacatcgacgatcggcttctcgccaggggtgatttcacggcgagccttcttggcaccaatctgggacagctcggcggcggacttaccaatcatcatgccgatgagttcgtcgcgcggggtgtccttggtcatgacctccttgatgaactggccgttacgcagaatggtcagacgatcggtaatctcataaatctgatcgaggaagtgggagacgaagaggatggccacgcccgagtcacgcaccttgcgcatgatcgcgaacaggtccctgacctcgttggcatccagcgaagaggtcggctcatcgagaatcagcaccttggcgttgataaccatagcgcgggcgatggcgaccagctgctgcatagcgatggagatggagctcagcggagtgtgcgggtcaatggattcgaggcccatctgtgccaaatacttcttggcggcctcgtgggtcttcttccagtcgatgccgaaggggccgcgcttttcgtggcccagcatcacgttctcaccgacggaaaggttggtgcacaggttcacttcctgatacacggtggcgataccggcgttttgtgcgtcgagggtgccgttgaactgctgaggcttgccgtccaccataatggagccggcgttgatcttgtacacaccggtcagagccttaatcatggtggacttgcctgcaccgttctcacccatcagggcgtgaacttcacccgggtagagagtcaaatcaacaccatccaaggccttgacgcccgggaattcaatcgtaatgcctttcattacgacgatggggtttttatctgtcatgtctttgccttaaacgagaatgaaatgttatcgttttgtgatatttgagccacacatgagtgatggtgtggaaggaacatccttctcacaccatcacatcaattatttggtccagttatcaatgagtcgcagcagacttatcagtaggcgcgggtgttgttgtccagggcttccttggcggaggcggcgtcgaaggtcttggactcgatctcgatgtccttctcaacggtcttgccatccagatagtccttgacggcctgagcggtttccttaccgaagatcgggttgtactcgatcacgtaggagaggtcgccatcaacaagagcctgcagagcgttcttggtaccgtcgatggtgatgatcttgaccttgcccttgaggccggcggcgtcaacagcctgagcggcaccgaggcccatctcgtcgttctgagcgaagatgaactgcgggttgtcggacttgtacttgtcgagcagaccagcggtcacggtcttggcctcatcagtggaccagttagcggactgggactcaagaaccttgacgttggaggcaaccttgttgtcccaaccagtgccacgatccttcaccacggacaggccggcagggccttcgaggatgaagccgttggcgccatccgggaagttcttgttcacgaactcggcagcctgctcgccgcaccagacgttggacggtccgatgtgagcaacgatggccttcttggcctcggcgtccttgacgtccacgttacggtcaacggtgaagaccggaatctcagcctcagcggccttcttcagggagtcatctcaaccggaatcctcggtggaggacaggatgatggcatcgacttcgtcgttaacgaacttgttgaacgcctgaatctgcttctgctgatcgttgttctgggtcggagagtaggtcaggtcaaagccggcatcctcgaatgcctgctgaatgtccttctcgttggcggtacggaagccgccctcagggcccacagcaacgaagccaaccgtcttcttgccggagtccgagctgccacctgcgttgctggaaccgcatgcggcaacgctgacaagcgcagcagcagaagcaacgagggcaatggccttcttccaattcttcataaatactcctcctcgagcagtgtttattttttggatgatcttccatcctgtttggtgactgttcgtcatcgacaatctctagtgtgacgctcacaggccaaatgttcaatcgcatgcgataacagtttgataacaggtttataacagtttgataacagtagttcaaaaaacggcttcacagcgccgttttgccttgtcattaagccataataagaggtggttgcacggcggcaatgccgctcgtcagccgagcgacaaagccgccgcatcacaacacaagaaaagttattatgaacaccgtttttcttataccatctactgcgcaccgagggcagtgacctggctatcggcgatggtccaggaaccgtcgagtgagccggaaacggagcgcacaatacccaaatcgtccacaatggccaggcgacgagacaggctgatctgccccgatgccatcgacgttatgattccattgggtaaacgctgcgcattggccgggcctggtgccatttgacgccatgcctcttgttgttcgctgtttccctcaggaggtgtggtggcgtacaccagattcagatcattgtagaacgtgagcatggtgacgtgcctgagcacactcacttgggtggccgctttgctcagaccgctcagtgttttatcaccgttgcgcgccacaccggtcatcatcacgccgttcgtgtcctcgcccctgactgccaacgccaatcggcacccttccggagaaaccgccaatgccacaatgctgtcggcagcaccaagccaatcaagcttcagatcggtttccttgcccccatctgacacatgcaattcgcgcccgttctcggatacagcccatacttcgccatccagaccttcggtaatcgatcgcatcggctcgccggagaacatcaccccacaggacgcaccatcagatttcaggcattcgaccacgccgtccgcacgcaacaccgcgccgccggatgaggaaaaaacgaagccccgagcatcgtcatatccgggggcctcccctacacgcaacggactggagctggccagggaaacgatatgaccaccggtcagcgtgtatacgcccgctgtcggctgctcggtagtaagtttcacatttgcgtcggcatcggaatagtccactccatcgccggtaatcctcagcgcgtattcggcattgccgtcgcccatagtcagacggatgcgacgtaccagcaggcctcgttcttcctcgttcaacgcattgataccgctgttgaggtgtatctccaccacattgttcttcaccggcacgctgtcgaccgcgagtttgatggtagacaagccggcgcctcgcagcactccttccaaccaggagggtgcatccgagagcacttcaccgactgcctgggtgcgccagttgcgccagctcaaccaacgaatatccgggataagttgcttgccggaagtactcacctgatacacggatacttggcggaacacctgttcaaaatctgcggtggaaatcaccacgccgctttccaatgacgagatgcgccattggccgcttttcttcatcagcgtatagggaagcctgcgcgtttgggtgctgtttgacggcgtgtatacgccatgcgaatccaaggaacccaccacctgaagttccacttccacaatcagtgagctttccgcaccttgtggcgcgcttatggtgttggcgcgtcggcggaaatcaggggtgccgctgtataccagtgccgcagaatctccattccacccggcagaagccgagccagtcaggaattcgcgagccacgcgatagccatcggactgcacgccagcaggcatagcgtcatagaaccctttgacaatggtttccggctgtgcatcgtccgcaggcccctgaggattggtgtaaacacgctgggtctgctgttccaccggtgccagagtctgcaccgagccgctaatcggcaaaccgaacggacttgagcatgccgtcatcgtgatgcaacaggctatggccgcgcctgcggcggcaatcgttctggtcactcgtctcatagtggcctccccatcatcgtgtcgcggcgaacctcatgataatcatgtgtgacttggctggtggccacaccaaacccaccggtaacacgcaggtcatccggcgtttcagaagcaaaattcaccggcagttcagcgtccgccacctcaccttggtcggggtcacgcggcagcaataccaagaaccaggtgccctcccccactgccgaacgtacacggatactaccgtggtgcagcaaggcatcagtcatggcgatggccaggcccaatccggtgccgccggtaacgcgtgaacgtgaaaggtcgcctctccagaatcgatcgaatacatgagcgactttgtcttcgtcgataccaacgccatagtcgcgaacgctgatggccacggctttgcggttggccgcgacgcgcacttcgatcggccggtcctcagcgaaatcgacggcattggccaacagatttctgacgatgcgaatcactcgacgcgaatcgatacgagtcaaaacctgcacattgggcagatacgtgtgaatcggcacccgtttggcttgggcgatgccgtcaacttggtccactgccgtttcaattggttcgcataaatcggtttccacaaggtcgagtgccgcataaccggcatcgtagcgggagatttccaacagatcggcgagcatgtcttggaatcgactgatctggccggccaacagttcgaccgtacgcttggtggaggggtcgaagccgtcttttttcatttcgagcaggtcggaagccatacgcatggtggtcaccggggtacgcaattcatgactgacgtcggacacaaatcgtttctggaaaacgcttgcttcctccagctcatcgatcttctggttgagcgcatcagccatcgtattgaaggattgctgcagcacaccaagctcatccttacgatccacggtaacgcgcatatcgagattgccggaggccagtgtttccgaggccgctgccactcgtccaatcgggcgcacgatgccacgaatcaccagccagattactacgcccaccacgatggacagcaacgcacagatgaccaccagactgagctgaatctgcgtcaaggactgctgctggaacgtgtacgaataaatggcgaagaattcgaggttgccggccacgccaaagtccaatacggtgccgagcaccgctgcgggcgtcccgctgcccggcatgccggaatcaccgggaatttcgaccggctgatagaacacgctgtcatccaagtcggaagccacggacgaacggatgtcgtcagaaatcagactttgatagctgggttcggtggatacggggatgatggcacgcgagttggtatcacgactccacaaatacacacctatcaggttggaggacccctcggattgcaacgaggacgccaagtcattgaccagctgttggatctgcactacggcggagacatcggccgcgtccagactggtttgggcctgctgcaccatgtttgaatagtcggcacgcgactgcgaagtgatttgggtaagcagcgaggcgcgcactgataccatcgatacgccagagaagacgatggccacggccagcgtaagaatcacggtgagggccacggtgcgggcctgcagtgagcgacgaacttcagcgcgtccgtggcgcagcaagcgtttgaggctgaatcgagggcgcaggttcattgttcaggagtgacgaacttgtagccgataccgcgtacggtctgcacgatttgcgggttctcggggtcgtcctccactttggccctaaggcgttgaacatgcacattgaccaggcgcgtatcgccggaattctcgtatccccagacattcttgagcaggctggaacgactgatggcctcgccggcggcggccgcaagcatgaacagcagctcgaattccatcggagtgagattcaggtccttgccatccttggtggcggtgtgttccaaacggtcgatgacgatgggtccgcgttccagatggttgacgtttgcattgccaccgcttgcgccaccggtggcaccgtcttcggcggccggcttggcgatgcggaagcgtgcacggatacgcgccagcagttcggctactttgaagggcttgggcacgtagtcgtcggcaccggcttccaagccggccacgacgtcaagtgtgtctgatttggcggtgagcatgataatcggcacattagaggtagctctgatgcggcgggccacctccgtgccgtccagcccggggagcataacgtcaagcagaatcaaatcgggcttgacgatggggaacatttccacagccctcagcccgtccaggcaggtcacagtctggaatccctcgttttccaaaacaagactaagcatttcgccgatggcctgatcatcgtccacgatgaagatggtcgccatggtgtttgcctcccctttttccactgttattgttgcgttacactttactcccctatgttcatttctgttcgggttccccaccatgcagtatcgggcgaatcttggcaagacgctggctgacttcgtgttcatagccgcgatcgttgggatggtagtactcggtgccacgcagctcttcgggcatatattcctgtggcgccacggcaccgggccaatcgtgcgcatacttgtagccctcgtggttgccccactctttcataagcttggtgggggcgttcctcaaatacagcggaacagcgccgatcttgccggtatccacgtccgcgagcgcctggttaatggcgttatagctggcatttgatttgggcgcggtggccacggcaatcgtggcttcggccaaaataatacgtgcctcgggcatgccgaccagcgccacggcctgcgccgcggccacggtgacctgcaaaatctgcggggcggccatgccgacttcctcgctggcggcaatcatgatgcgacgggcgatgaagcgcggatcttcacccgctttcagcatgcgcgccagataatggatggcggcatccggatcggagccccgcatggatttgatgaatgcggaaatcacgtcgtaatggtcatcgccgtctttgtcgtagcgcacggtggcggtgtccattaccgtagccacgatttcggaggtgatgatgggtcggcgtgcgccctttttgcgggcttcgtcgccggtgaccgcgccagccgcggcctccagaatcgtgagactcttgcgtgcgtcgccaccggccatgcgcacgatatcggcgatggcttcgtccgtggctttgacctcgtccctgagaccgcggtcatcagtcagcgcgcgctgcaccagttcggtgagctgatcaggctccaatgactcaagcttgacgaccaccgaacgggagagcaacggtttgatgatggaaaagctcgggttctcggtggtggcgccgataaaggtcacgtcgcggttttcgacggcgggaagcagcgcatcctgctgggatttggagaagcgatgcacctcgtcgatgaacagtacggtttcccggccgcgtgacacgagccgttcgtgagcgcgggtgagtacgtcgcgcacgtctttgacgccggaggtcacggcggagagttcctcaaacacgcggccggattggccggccacgatggtggcgagcgtggtcttgccgacgcctggagggccgaacaggattacggagctcggcgcggtgagacttcctttgctggccggattggcgaggcggcgcagcggcgagccctggcccaacacctgcgtttggccaatcacctcgtccaaagtgcgtggacgcatgcgcaccgccaacggccgtgtcatcgactccggcgcatcagccgccccaaacaaatcgttctcactcataacgtcctatagtaccccagtgttcgaacagacgttcgagctgcaccttggcttccctcagagaggggagccaggaatcagttactcaccttgtagtcgtggaagactacttcgccggtgtcttgggtggcgtcaaggtccacgatgccttcgatggcccagtcgtggtcgccatcggaatcatcgataatctgacgcaccttccacgtatgctcgtcgttctcgtgcttgtcatccaacatgaacagttcgggcgagcgcgcttcggcgccgatgcccacgtactcgtgctcgtcgtagtagtcgtcgagcacatcttcccattcgtgcacgccgtagccccagtccttgtcgagcgcgccgagcttgtccggctggtcaaggtccataagccgcacacggcggaacaaggcattgcgcaccagcacggtaagaccacgacggtcctcgaccaccgcgctttttgcgccgggcgcggccagggatgccgcagcctcggattggtcagccgagtcaccggcgttctcccattcgtccaccagcgaggagtcgatggagcgcacgagcacgcgcagccacgagatgatgtcttcgagttgctcgtcacgcttttcgggcggcacggtgcgcgccagcgtgcggtaggcgtccgagaggtagcgcaacagggtgccttcggagcgggcgatgttgtatcgggtgatgtatccggtgaagtcggaggcggtttccaccatgtcgcgcaccacggatttcggcgacagccagtagtcgttggcccacggcacatcgtggcggtactgatcgaacgcggcttcgagcatgtcttccagtggcttcggatacgtaatctcctgcagcttatccatacgctcgtcatagtcgagtccgtcggccttcatatcggccatcgccttgtctcgggcctgacgctcctgggcacgcagcacctgcttggggtcttcgagcgtggcctcggccatggagatcacgtccagcgcataggtgtcggactcggggtcgagcagttcgagcgcggccagcaggaacggggagagcggctggtcgagggcgaagtcgtccggcatatcaagggtcatgtagtagtccttgccgccgtccttgcggtcctcggtttcgatgacttcggtatcgaacagggtttggaagatctcgtcggcccgctggtgcagatgctccttctggtcgggggtctgcgcggaatcgtcgatgagatcgtcgatacgggcacgggcgtcaccgccctgcgccacttcattgagcaccatcgaatgcgtgattttcaggtgcgggaccagggtctccggttcagcgtcgatgagcttatcaaacgtgctctggttccaggtcacaaaaccttccggcgccttcttgcgcttgaccttcttgagtttcttcggatctcccccggccttggcgatggctttctggttttcgatttcatattcgggagcctcggcgatcaccagtccctcggtatcgaatcccatacggccagctcgtccggcaatctggtggaattcgcgggcgcgcaggcggcgcatcttggtgccgtcgaacttggtcagggccgtgagcaccacggagtgaatcggcacattgatgccgacgcccaatgtatcggtgccgcaaatcaccggcagcagaccctgctgggcgagctgttcgaccaggcggcggtagcgaggcagcatgccggcatgatggatgccgacaccggtgcgcagcagtcgctgcagaatcttgccgaaggctgtggtgaacttgacgcctttgatggcttctgcgatggcttggcgctgttccttgctggatacaccggtggaggcgagcgcttgcgcggtctccaatgcggcgtcctgcgaaaagtggaccacgtaaatcggggtttcgccgttacggaaggcgagttccacggttttttccatcgggtcgagcgtgtattcgtagctcaacggcaccggtcgcggcgcgtcggcgattacatccacgtccggggtgtcgttcagatcggagagcttgtcggcgatggcgtccacattgccgagtgtggcgctcatcagcaggaactgggtctgcggcagcgtgagcagtggcacctgccacgcccagccgcgctccggatcaccgtaataatggaattcgtccatcgccacgaggcccacatcggcatgggtgccttcgcgcaaagcctgattggcgaggatttcggcggtgcagcagatgatcggcgcgtccgcgttgatgtggctgtcgccggtgatcatgccgacattgtcgcggccgaacacttcgaccaagtcgaagaatttctccgacaccagcgccttgatcggagcggtgtaataggagcggcggccagtgcatagggcggcgaagtgcatgccgagcgccaccagcgatttgcccgaaccggtcggggtattcaaaatcacatggtcgccggccaagaggtccataatggcctcttcctgatgcggccacggctcgatgcccttgacgtcttccacccagccgaagaaccgttcgtagatgtcgtcggccgtaagattccgttcgcgtccgtcgccgtcccattcgggggccagccgccccagggatccgtattccttctcgtcagtcataatgctcagtctacctagtggcctattccgacggcacgagccaccctccgtcgctatgcgacgcctcccgccagcgggcggagccatgcgaagagctgtgccatgcgcttggctccgccaatgggaggatcgctcacgccaaccggcggcgcacctcgtcggggtccacctcgggttcgaggggaggccaggtcatgttcatgttcttcaaggtggtgcgcagcagttcggagaccacggctcgcgaataccagcggttatcggccggaacgaggtaccacggtgcggcggccgtgctggttttctcgaacacttcctgccaagcgaacatgtactcatcccatcggtcgcgggcctcgaggtcggagatatcgaatttccagaacttggtgggatcatccagcctcccaagaaagtgttttttctgttcttcctggcttaccacgaggaagatcttgaggatggcgcatccgctggcggccagttcacgttcgaaatcgttgatctggtcgtagcgggcacgccatacgtcttcgggataggtgccatagacgtgcggcatgaccacatcttcataatgggagcggtcgaatacggcaatccaccccggcttgggcaattcacgcttcacacgccagaggaagtcgtggtcgagctcctcggccgtaggcttgccgaagccatggtaatggatgcccatcgggtcgccttggctgaacacgtggcgcacaatgccgcccttgccggaggcatccatgccttgcagcacgatgagcagccgccgtgccgagcctttgacgccattcgcgtacatgagccgctggtatcgggcgatttcggaggagctgatcgaaatgaacttctcggcgtcctctttattgccgtcgaatccgggagtggaatcgccttcgacatcagtgacctgcatgccgtggtggaacataagacgttgagcgggcggcaacgaccatacggcgctgagcagttcactggatttcgccgcacgcgccagtcgttcaggcacgctggcactggagtcgatggtgtctatgcgatccaccgcgagctgtaataccttgtcgatccgtcgatcggttttggattcctttcccttgccgttcttgttgttctttcctgaggattttccggccgtaccccacttgccggcctcttcaggcttgttggttctgtcgtcgtccttggccatgctcccgattgtacgtcttgtaactcaggagacctagcaacgtagcgacattcacatttcgcctgttactgcaaatctataggcatgcagtcgttcggaccgtaattgttggctttgcaccaattccaagcctcatctgtcgagtcgaagccctcaccggcaagaatcacatagtatttgtcggaattgctgctgtaggcgggccagtcacccgaccagataagcagtacgtttgaattcttgttgtgcatcgtgatgaattgcgcaagaatatcgcggtagttccaggtcttgccttcagcctccatacccttacgcttgctggacagctgtgcggtatacgtggaatagaacagctctgcggagtccttgtcgtgctcgacctgccaatccaatgccttgcttgcattattttcggcttcgtcatccgtaacgttgctgccgcttatcacgcctggatcagacgacccccagcaatatcttctttccggcagacccaccggaacgcggctgcgcagcgccaccgttgcctggcgccgtcgacaatgtcgaagtaggtgcagtcgccgtgttgaaacttgggggcaacggcatcgaacccgctggcacctgctggggagcagccggtaccagcgtcgggccatccatcgactgaggacttgggcttggcgcagactgtgccatcggcgcaccgcattccgtgcagaatcggcttccctccggcatctccgttccgcaaacctggcacttcatactctctccgttctctctcgtccctatcggccaatcccccgcccgttttgcagtacataaagaagcggcaaacggcccgaaacatacctgagctatcaggaagacggcacgatctgctacgagaaagagatcatcaccgaccggcaaatcgtcggcatcatgctgaagtatccgaccagcgcacacggcttcaagcgctacttgcgcgccgcatcatgacgcttgaccacgatggtgacgccacccgcagcgaacagcgtcgccagaaccacaaccaacgcaaccgaggcaccggtatcggccgtatgttcggtctgctgtggcttggtgctgccattggcattgacgctaccgctatggttgccgttatccttgtcgtccgtcccggtggacactccggtaacggcaacgggcagagcgaccgtggtcttattggtcgcaccggtcacggtcaggctgatatcaccggtcttggttccggcgggaatcgtgaccttgagctcggaggtgtcgccattcgcaacctgtgcttcgccgaccatctgctcgccgatggtggcggtcagcttcgtctcgtcaggcacgcccagcgaggtgagcgtgagcttcgagaagtgcagggtgaacgagccaccggccttgaccgcaccggtcgggataccggtgacggccactgcacggcggtcgtagcgcggggcaaccggatcgttgtccttgagatagtcgatccaggcgtcgcggtccaccagaccggtgtccttggtgttcgtgccttgggcgaaggcgcggaagttatcgccgccctccaacaggaagctgaacgaaccgatacggtagttgcgtttcaggtccagaggctcaccgttgacggtcaccgaggtgatgtgatggccttgcgcggcatccggatcatacgtgtagctcacgttgtgggacagtccgagttgcagatacgcgcgcgatggcgtgctgccgtccgcgttcgtctgccactgctgttccagcgcttccttgaactgcgcgccggtaagcgtggtggtccacaggttgttcaggaacggcagtacagcgttggcctgggcgtaggtgatattgccgtcggcatcgagcgtgcaggcgtcattggtgccggacttgcagaattcggcacgcagaccgccggggttgaccacaccgatttcggccgcgccgcggtcctcgcctttgagcgaatcgagcagcgcatcggccaccagattgcccatggtcgattcggaggcgcggtcgtcacgcttgccgtccttgaatgcggtggtgatatccgcagacaccttgccgaccttctcgctgcccttttcatcggccaccttaagggcctggtacacgatgtccctcaccttggcgacagtcgggttcgcggcggcgagcaggccatcgttgtattcggcgtaatcgttgtagtgcggatcatttttgtcggcgggctgcgaagccacctgcacggccgtgttgccggacttgtcgtaagacaccgcaccggtggccgtgttgtaggtgagcaccacttggccgatgttggcggcatagctaccggtctggatgatcggccggttgttgtgcgcgggatcggtgtacgaatacttcatgtgggtatgtgcagtgaagatcacgttcactgccgcatcggtatcgtccacgatcttctggaatacggggctggcggccttctgctcgtcaagcgtgggcttggccgtggcgtcatcttcattggaggctgcaccctcatggtattcggccacaatcacgtcagcctcgccattggattcgtcgccgtcggtgagttgcttggccacacggttcacggcttccaccggatcgccgaattcgatgtccttgacaccaccgggagcaaccaacgtgccggtttcctgagtgaccgcaccgatgatgccgaccttcacgccgttcacctcctgaatgctgtactcgggcagagccggggttgtggtgcccttcttgtacacgttggcaccgaggtaatcccattgggcgttgcgcgcgccctccttgccgatcacacgatcggtaaggtcggcatagccttggtcgaactcgtggttgcccaccgccgaggccttgacgcccaaagcattgagtacatcgatggtcggctggtcctgctgcaccgaagagttgaacagcgaagcaccgatattatcgccggcggacagcagcagtgatgagtcagggtattcgcccttgagctgctcgatggtggcggcgaacggcacggtgaggttcttgtcgatacggccgtggaaatcgttgaagttcagcagattgatggtggtgctggcgggaaccggctgattggttgccatatagcccatacgcaatgaatggccattggtcacgccgtcgtctgcccagaacaccggcttgtacaccttgccatttactaccttggtggcttcggtatcaggggtgatggcaaagccttcggtgttctgcgtacggatttcatccggagtgtcggtcagcttggtcagctgcagcacgccgttcttgaattcgtaggtaccgattttggcaccggtgttcgcgtcattgtcgctttgggcgagcagctggttgtgctcggcgtcccaagtcagatcgcgcgggccatcatagccggcgttcaccgcggactgcggcaggtcgatgtcggccaccggatgcaccaggtcctcatcattcacggtttgcagcgcgaaggcgtagatatgaccggttttctccagtgcggcgaagaacagaccgccgaaatcattgccgaaaccgtccgggtcgtaggtcattacgttcttcgggtcaaggttggattggaatccattggcggtcaggaccgagtcgggaataaaggctatgccttccaccccaagattggcgtccgctccgtggcccagcgtcacgccgaactgcgtgagtgctgcgatgagattccactcgtgcgtagcgttcagatcgtgcgctccgtcgccgttggcgtcggtggttttctcggtcacgtcatactgcaggatggaaggccgcggcacattcttgttttcgttgtcgcgctcggcgccgatgaatatgcccttggatgaatctccgttgatcagcgtgatgccttcggagtccacaccgcccttgccgtccttgaagtgcagctgcttgccgcccttggtctgaccgttgttggtgaaggtccagccatcagtgggatcctgctgccatgtgccgttctggtagacgaacttgttgatggagccagggcccttatcagcggtgttgccgagcgtggggttcagatcgttgtcggccgcccacagcacgccttgcttgccgtctttaccggcttcatacaccagaccagacagattgccgtcagtgtggtcgccgccttgtcctttggcgccaaattcgccttcggcatccactgtggtcacatcggccaatcccgaccatgcgtccacggtcatggtctcgccggcgggcggagtcggagtcgggtcatcgaacacgttctgtgcaccgggcgtgggcgtatcggaaagcgcgaaagtgccatcgtccttacgggaccacgactgactgtcgctcatcttcttcacgccggttgtatcggtattccatgacgtggaatccaccacatcgctatcggtaaagtcgccgctggtagtggtcagataggcttcgtcggcatcggaacccaggccgggctcggccttgtcggggtcgatgtatgccaccagatatccgccggctttgatgacggtgtccgtattcgttacttcactggtgccgatggtgtagtgcttcttggctttcttgccgctgtcgtagatgccccagcccttcacgtcaacgtctgtggagccggtgttcttgagctcgacccaatcgcaacgcttgctatccgggtctccggcagctttcgtattgccggcatagacctcgttgatgattacggatggtttggcagccgtgttctgttcggcagtggcctgctgctcgtccgcagccgcagcgggcacgccgatcagggtgatgctgctcagtgtcaccgcagcggtgagcagcgcgatggcgcgccgcgacatcgcggtgaaattgttggtgtggaacattactcccgttccttcctcgggttgtgccgccgcagcatgatgctcttcggcggatgacaccccgagagtatgagagagaaatgaagccgacaccgtatgaaggcaaactcggcagatctccaaactgaactttggctgaattaccgctgaagctagttcttggatttgcgtcgaaccgtccgtattccgccgacaatcgcgattacagcggtaccgatggctacgctgatcaacgccggtcgttgcgcggcatggagggtggcgagatccggcccggccgcaatggcactgttttcacccgccgagccatcagacgccggatgattacccgcgtcggcgtactgggcattgaccacactcgggccggtaagcgccacctggtcggcggtctcgaccttggccacatcgccgtgcttatccaaggtgacgcgggcgcacagggctttggcccagttgatacgctgccagccgtcgctcgattgccatagggggtatccggaatccaaggcagtggctttcaaaatcgcgttgcgctgatcggcgtgcagttcgggataggccagtcgcagcacgtccgccgccccgcgcggtgccacgaaatcagcgccggactgggcggtgtcttgcgggaaggtgtaggtcaggcgtgcggtgtagacgcgcacggccgaggcctggtccgcgaccggctcggtggccaccgggtccagaaaatcgttggtgtagccgcccgaaccggaggccttggtgttggcgatgcaggcggcgagggtagtgccgtggccgtccgcggcgcagcgggacaccagatagtcccgcagctgccgggacgcgggcacgatggacgaagcgaattcgttatgccagtactgcccgttctgggcggatgcgccaatgcgcccgcccatgatgtcaagcggataatgcacgccgagcacgatgcggttgttgccggcctccgaagtgcgggccatgatttgcggcgcgagttcgggaatcatgccggccagcgcgataccccacgaataggcgccggtagtgtggccggaggggtaggaactgtttttctgcaagttcgagtagccgggcacgtgttcgagccatgagggtgattgcttgatgtcaagcgtggcgggcagtccggcgagatcgttagtgccgccgtagctgctttccgcacggttcagataggggcgcggatgcatggccgcacgttttgaggcgtaggtggaggccacgttaaaggagaagatatcggcgacggcgttgagtttcccggatttgagcccttcgctcatatatttgccaagcaccggaccgagcgcgtccggcatggcttcctcggcttgcagatcggagtcgacgagcgcacgcttgcgttgggcgttcaggccatccttatcgagattttcggcggctttgtggttaatggccacggccaaatcttcgtcgagtttcattgtatcggcgtcgagcaccttgccaccgtgttcggcatcggtgggggcctgccaatagttcttttcgtagtcggagagcaatgccacccaatccgggttgggcagctggtcggcctgtgcgattgcgggcgtcgcggctagcgtggccgccaacgccagcggcgcaatggtcgcaatagcaaaaacggaggataggtgccggaacatcttcatatgttccaacttatcctccgtgaaggctacgtagccggaacccagtcaaacactcagtaaattcttcgtgccggcttagcggcgattgagctgactgtcaggcctctgactcgtcttcggacttgcggaacgccgggaattcgccggtttccgggtcaacctgtgactcgggctgggtggcgtcatatccctgttcatagcgggtgcgccgccagttgcgaatcgaggcgttggtgccgcggtgatgcacatggtatttgcgcggcgcaccaccaaacggcagctcttcgacttccttggccacagcgatctggttgacattggacgggtctccggcggcgatcggcgccacgggctcggcctcggtgggcgcggccgtgcgctgctgcatgcgcgaaggcagccattcggcgagcctcgacaacagccagcaggcgatgaagtaaatcaccgcggccatgaccagcgtctgcaggatgttgaagtacatcgagccgagtcggcgcgattcctgcagcaggtcggtatacatgatgatcgagcctagggcggtgtccttcaacaccacgaccagctgggtgacggcggccggcagcatggcgtagacggcctgcggcacctcgacctccatcaacgactgcgtttcggtcaggcccaaagcgagcgaggcctcgcgctggccgcccggcagattgccgacgccggagcgcacgagttcggcgaccaccgaaccgttgtacagcaccaaggccagcaccacggcccaataggacgggctgggcaggcccgcgaacgcgaaccatcgccagaagaagatcatgagcagcagcacgggaaccgcacggcagaactcgacgatcacggcggagacgccacgtaccaacgggttcggcagcagtcggcccacgccgaacaccaggccgaacaccacggcacccaccacggccacgatggtggccttgatggtcatccacagtccgggcaggtagaagtcggtccacgcctctcgttcgacggcgggcttccacagctcccagctaagctggttctcgccgtccggcgggttgtgcaggcgcatgaggataaacacgagcaccaccgcgaacagaatgcccgcgatccagttgacgatgcgaatggtgcgccggcccttgggacctggcgcgtcgaacagcacggaattcgaagtatcggccatatccgtcacctccttacggcgagtttgttggacaggtacgtggtgagcatgccgatggggatgatcaggatcacgtagccgagcgcgaagatcaggaagatttggatgatcacgtcgggacggaattcgatcatctcgctcatcagcgaggatgtttcggtggccacggatgcggcggcggccacggtggagttcttgagcagggcgatcagcgtgttgccgagcggtgccacggagcctcggaaggcctgcggcagaatgatctcggtggcggactgcatgaagcccaagcccagcgctcgtgcggcctcggcctggccaatcggcacggtgttgatgcccgaacgcagagattcgcacacgaacgccgccgtgtacaggctcaggccggtgaccgcgagccagaagaagttcgtggtgaaggtgtcggagaagctgagcttcagctgcgcgtaggcacccagcaccatgaacaccatgatgatggtcagcggcaggttcttgaacagttccacatacgcaccggccacggccctgagcgaggaaatcggcgagatgcgcatcaccacaaggatcacgccgaggatcagggagaacagggcggaccatagggtcagttcgatattgaccagaaacgcgccgagcacgtcatactggctgaagagttccaggaatccgctcatcaggcctcctctccttcgtccggggtgggcgggttgtagcgtacgtcgggcgtgtagttggtgcccttggtgttatcgctgatggcgttctcccacgagccgtcctgaatcatgtccacgatggcgttgttgattttggtggccagctgcgtgtcgcccttcttgatgcccacgccgtagtattcctgcgtgaacggtttgccgaccaccttgagcttgccgcgcgaggcggaggccaggccggccaggatgatgtcgtcggtggttaccgcgtccacgatgccggagaacagggcagtggcgcattcggcgtaaccgggctgttccataagctggacttcggaggcgaacttctccttgacggtggcggcggaggtcgaaccggtgacggagcataggcgcttgccgttcaggtcttcggggccgttgatggagttgtcgtccttgcgcacgagcagatcctgtccggccacgaagtacgggccggcgaaggagacggccttcttgcgctcgtcggtgatggagtaggtggcgaggatcatgtccacgtcgccgttctgaatcatggcctcacgctgcttggagggagcttccttccagatgatctggtcttcggaatagccgagtttcttggcgatgtacttggccacgtccacgtcgaagcccacgtaggtgccggacttcttgaagcccaggccgggctggtcgaatttgatgccgatgcggatcttgccggtttcgtccgcgccgcaggcggccagcgacattgtgcaggccacggcggcgagcgcggcgatcacgcggcaaaccttccgtttgaacgtattggtgaatgtcattggattgcgtacccgtctttcagtgggttcgtcagtgggtgaggatcttcgagaggaagtccttggcacggtcggtctgcggatgctcgaagaactcgtcgggcgtgttctcttcgagaatctggccgtccgccatgaagacgatgcggtcggcggccttgcgcgcgaagcccatctcgtgggtcacgcagatcatcgtcatgccttcatgcgcgagttcgaccatcacgtcgagcacttcgttgaccatttccgggtcgagtgcggaggtgggctcgtcgaacagcatgaccttggggcgcatggcgagcgcgcgggcgatggccacacgctgctgctggccgccggagagctgggagggcatcttgctggcttgggagtcgacgcccacgcgggcgagcaggtccatggccagttgctcggcttccttcttgtccatgtgacgcaccttgatgagggccaacgtcacgttttcaagaatggttttgttggcgaacaggttgaacgactggaacaccatgccaacttcggccctgaggttcgcgagctccttgccttcctgtggcaggggcttgccgtcgatgcggatgtcgccggaatcgatggtctcgaggcgattgatggtgcggcacatcgtggacttgcctgagccggacgggcccacgaccaccagcacctcacccttggtgacggtcaggttgatgtccttcaggacgtgcaaagcaccgaagtgcttttcgacgtgggtcagttcgactagcggacggttcaggtcctctttgccgggaaccagcggggtcaatttggccttgcttggtgatgttgtgcttgtcgtgcgcgaacgcactgctgtttcattgttcgtttcagacatgagtgggaggatagcacaccgacgtttccaatgtgttcacagtatgtccacacagttgctcagtcgatgtctcatttccgcatcagacatcgtgaaggcggcattgggcatcggcatacattcgcgctgagtcgcgcatcgctcggcgtctgctgtgcgctgattgcctgctgcgtggcggccgagacgttgctgcgatggcagagctggcacgtgttgtcctatctgctgattccatgtttggccttggtgtcgttggcgttgctgccgtgtatgccgcagtcgggcgcatggctggcggtcactttgtattgtgtggggctggtctcgccgtttcccatgtcgtattcgtataaatgtgctaggcattttgagcgtggctagctgttcgcacacgatgagtgctgttatacggtggacgacactcccgaagcgcggtggataaccgggcgcggcacacgatatgccggtggataaccggttcgcgccgcttaagttatccccatttttcggttttgcccctgtgccaccgtggaatgcgctacgctcggcgcatgaacggatacagcgaagcgccgcacaatggcgaaatcaacaactatctgcgcaaagatcttgacgccaaagccacggccaagaacacggcctgttggaatctgctgggcaaagtgcgcacgaaacgcacgttgtgtttctcgctgtataccgcattggaattatgcggcgtggagttgccgaggcacagcacgttgccgcagaaggatttttatgtgacggtgaggagcaaggggacccgctcttcattggacaatgtcgactatcgcatatggaatgcaaagttcagcagtatcgctttttcaaacggcgtaacctgcatgcatcccatggatgcgtggatacagtttgcccaatatctcaacctcactgaattagtggtgctggctgaagcgctcatcagacgttatggatatgccattgaacaattcactcaacgactaacggcctttcaccgcgttattggtcgtgcgcgttgtgaggcagcgctgaagctcgtaaaaccatcggattccgttcaggaaactcgtacacgcttggcgcttatgcttttcggcctgcccataccgcaaacacaatatggcattaccgattcagagaacggatacacctacaccgttgacatggcttatccacaatacaaagtcgctattgaatatgatggcgatcatcaccgtcgcttccgcaaacaatatgtgcgggaccagcaaaaacgtcgacgtctgcggcaattgggctggaccgtcatcgaggtgttcgccgatgacctgtggaacaccgccaaacaacgtgccttcgcacaagaggttgccaccgcgatgcaaataccgcttcctggccgtcctcaaccttcatgccgggtattaatagacggcagccttaccatcaatgcgcgcaaaggggaatacaggaggcggaaacaagcaaaacacaacaaagcctcacaacattgatcaaatacggagttgcgattacttctcatggggcggcaattcccccatgaggcggcaatttgctcatggggcggtttgaagaaattgtgaaaccgcggaattaagccattttgacctaccgccccatggggttttcaccgccccatggggttttcaccgccccatgggttgtttaccgccccatgaggaagttaccgccccatggggggataatcggcaaacgccaagggggacaccgcatggtgcgaggtttgccgcatggcggaggtgccatcgggcggagttctggcacaccttagcaggtatttggcacattgggccccacccgcaaaaagcaaatggcccttggaattattccaagggccatttgcggctaatagcaccggagcattactcctcgaaaattaatctacgcatgcggggaccgccgttcgaagccgaaggcgcactaaggtgcgtcgagcgctgaggaaaggcggtatacgctccgtagattagttttcgtcggcgtccgggtcgtagtcgacgccggtctcggcgcgctgctcgtcggaaatcggggccggagcaccggtcagcgggtcgcggccgccgccggccttcgggaaggcgatgacgtcgcggatggagtcggcaccggccaggatggacacggtgcgatcccagccaagggccaaacccgcgtgaggcggagcgccgtacttgaatgcctcaagcaggaagccgaacttctcgtcggcctcttccttggtgatgcccagcacatcgagcacacgggcttggatgtcgtcacggtggatacgaacggaaccgccgcccatctcctcaccgttgcagacaatgtcgtaggaatcggacatggcgtgctcgggatccttgtcgaacttgtcgatccaatccttggagggcatggtgaacgggtggtgcatggaggtccacttggagtggccgacagccacatcgtcatcatccggatcgtcggtgggcttgaacagcgggaagtccacgacccaagtgaaagcgaacttcttcggatccagcaggccttcgcgggaggcgagctccacacgcacggcacccagcaacagctgggcggactcgcgagaaccggcggcgaagaacacggcgtcgccttcctcggcaccgacggcctcgcgcaggccgttgcgctcctcatcggacaggttcttggcgacggggcccttgagctcgccgttttcgccgaagaccacgtaggcaaggcccttggctccacgctgacgtgcccaatcctgccaagcgtcgaactggcggcgcggcgtggcggcaccgcccttgaagaccacggcacccacatacggcgcctggaacacgcggaacggcgtgttcttgaagtattcggtcagttccaccagcgggttgccgaagcgcaggtccggcttgtcggagccgtacttgtccatcgcgtccttccaggtgatgcgcggtagcggcagctggacctcatagccggcggacttccagatggcggcgatgaccttctcagtcatggccatcacatcttcctggtccacgtaggccatctccatatcaagctgggtgaactcgggctgacggtcggcgcggaagtcctcatcacggtagcagcgggcgagctggtagtaacgctcgacaccggagaccatgagcagctgcttgaggagctgcggggactgcggcagggcgtaccaggaaccgggcaccagacgggccggcaccacgaagtcgcgggcgccttccggggtggacttaatgaaggtcggggtctcgacctcggtgaagtccatgtcttccagcgcgtggcgggcggccttagccatgtcggaacgcagcttcagattgtgctgcatggacgggcggcgtaggtcgaggtaacggtacttcagacgcacgtcctcgccaggcagcttgttctcggactcattctcgagagcggtggagacctggaacggcagggcgtcggccttggcgaggatctcaatggtctcggccacgacttcgatcttgccggtggccaggtgggtgttctcgttgccgtccgggcgcaggcgcacctcgccggtaatctgaatcacgaactcgctgcgcagcgggcgggccatatcctcgtcatagatgacgacctgcacgaggccggtcgaatcacgaaggtcgatgaaggccacgccaccgtgatcgcggcgacggtcaacccaaccggcgagggtgaccttccggcccaccagggcctcggtcacttcggtggcatgatgtgttctgtaagccgtctggctcattatcttgtttctcctcgatttttcgcgcgaatacgtcagatttcgacggtttgctgggcaaccacagtatccggctcccacgacgtgcaatcggcggcaacctgctcgcccgtgacgatgttcttgacctcgtcgccagcgggctctgcgccttccgcaccttcggcagcggtggccgggaaccacacgtacggaatgccgagtttgtctgcgtacttgatctgcttgccgagcttggccgcggtgggtgccacgtcagtagcgatgccgcgcgcacgcagttggttcgcaatacgattggcggccgggcggtcctcttcattccacacagcgaccagcacggcggccgggctgacgcggttggcgtgcgcgccggcagcgtgcagcatgtagctgaccagtcggctcaggccgatggacaggcccacgcccgggtacttgcggttgccctgggaggcgagattgtcgtaacggccaccggaacagatggaaccgagtgatgcggcaccgtcgaggaaggtctcgtagacggaaccggtgtagtagtcgagaccgcgggcgatcttcaggtcggcgatgacggaaccggggcggatggcggcggcctcgtcgacgatcatggccagggtatcgagtccctgacgagccagcgtgtatgcctcggaatccttggcgatgccgtgagactcgcacagcgcatcgaacttggcggcaagctcagcaccgtcggaggcggtgagctcggccaattcgaggcaggcgcgtgcctgtgcttcggtggcgccgcaggtctcggtgagcagtcgggccacctcatcggcaccgattttgtcgagcttgtcgatctcgcgcagcacgccttcgacgtccgtcaggccaaggccgcgatagaagccttcagacaacttgcggttattggcgtgcacggtggccttggggaggccatacgcgcgcagctcttccagcgcggagaccatgaccagcggcagttccacttcatagtggtcgggcaggtcgccggcaccgatcacgtcgatatcggcctgcacgaactcgcggaagcggccttcctgcggacgctcgccacgccacaccttctgaatctgccagcgcttgaacgggaacgccaacgcacccgagtgctcgaccacataccggctcagcggcacggtcagatcgaaatgcaggcccaaccgctcttcaatcggagtgtcggattcatgaccgacctcctgcaaacggctcagcaggtagatctccttgctggtctcgccttttttcaacaaagaagcgccggtttccaccgctcgcgtctcaatgccgatgaagccgttgagctcaaaaaccttacgaagcgtatcgataacacgctgctccacaacacgttcggaggggagccactccgggaatcctgatattgatgcacctttagccacgaaatcaatataataggtgagggttgcgtcaaaacttcctggttcgcccgggatgggagacgctcccgcttatgcattctacgctttaaggagctggccatggccgacgaaactgtcaccgaacccgtaaacaccgctgcgcccgaagagcaggcaacgacacccgcacccgaagccagcgcggccacgccggcgccgactccgtcccccgcttccatgccgaaaccgcacgcgccctcccccgccgccttcgccaagaagactccgtcggccaagccgcgcgctgccgccccggccgccgccaccgccacctattccgaggctgatgtcaaggccgccgaggccttcggccgcgtggatgacaacggcaccgtcttcgtcaaggatggcgacgccgagcgcgaggtaggccagttcccggatgtctccaaggaagaggcgttggcactgtacgcccgtcgtttcctggatctcaaggccaagctcgatctgctggccacccgtctggcttccccgaacatcaaggcccgtgaaatcgacgagtccgtgaagctgctgggcgaagaaaccgccgaaccggcggtggtgggcgacctcgcggccctcaaggcccgttacgtggaactgaaggccgccggcgaggccaagaaggccgagatcgccgaagcgcgcaaggccgctcaggccaaggccgtcgccgagcgcaccgccatcgtcgagaaggccgaagctctggcggcctccctgggcgacaacaccaactggcgctccaccgccgacaagttccgcaacctgttcgacgagtggcagaaccaccagcgcaccaccgtgcgcatcgacaagccggaggccgaggcgctgtggaagcgcttctccgccgcccgcaccaccttcaaccaggctcgccgcaagtgggctcaggctcgcgacaacgagcgtacagccgccaaggaagccaaggaagcgattatcgccgaggccaatgagctcaaggattccaccgcttggggtgaaacttcccgcaagttcaacgatctgatggaccgttggaagaaggccggccgcgctggccgtaacgaggacgacgagctgtgggccaagttccgcgaagccgccgacaccttcttcaacgcccgtcaggctgatcgcgatcagatcaactcctccgagaaggagaatctggctgccaaggaggctctgctggtcaaggccgaggctctggtgccggtgaagaccgacgccgaggccaagaaggcccgccaggagctggccaagattcaggaagagtgggatcagatcggttacgtgccgcgtgacgatatgcgccgcatcgagaaccgtctcgacgccgttgacaagcagatcaaggccatcgaggatgccgcttggaagcagaccgacccggaggccgacgcccgcaagtccagcttcgaggagcagctcaacgcccagctcgccgagctcgacgccaagatcgcggccgaatccgacccgaagaagaaggccaagctcgaagccgagaaggccaccaaggagcagtggctgaacgccatcaagtaagggtctcgtgccaggttcccctctgagggaagccggcagcaaggctgactgaggggagtttacggttataccgcaagctcccctcagtcgcctacggcgacagctcccctcagcgaggggagcttcgtcatatttatgccgttttcttctgccctatactcataactccaccccatagttcctcagtcacccagcaattggtgtcttacgcctgagtccctaccggtgctgcaacaattgccgtgagcccttgatgtgcggccagatattcatgcaacggctggctgtatggcatattcagctcgccgtaattggttccggcacggaaggcggggtaactgtcgccgccctgaagcagatatgaattggatgcgataatcaccaggtcatcgtccgcaatcggtcgaccgtcaacggcgaggttcacgatacgaaccgccgcatgttcgtcggcagcacactcgtcagcgtcagcgttggtatcagcggcggcatcggtatcagcggcggcatcggcattgccgctcccaccggtcgtaccgcattcggcataccgatacgtcacgttcgaggagatgccgagccagcgccgctccagtcgcccatcgtcacggtggaattgctcggcgagcactctcttcacatcgcgcccggtgagcgtctcatgcgcggccttgaactgcaaggccatgagactatccacctcgcgcacggtgactttgccatcgccattcatatcaagccgtggagtccgcagactgccattattcgaaaatccgattaccggcaaacgatttccggcatacacatgcttcatgattgactcgcggttcgcgtccgccaccagcacaccgaccgtattcccgtgcttatccgaaccttgtttgtcgaaattcacgccggaggccaaggtgccaatcaccgcgttgccggcatgattcgaatatgttgccgccgcctggtaaatatgctgagcgcgcgatacctcatcgttcgcctcagcaccggcagacatccaagcggcttgcgccggatgcgcattaagcccttccacgcccagcacgccgtcaaccgccgtatggctggtgccattgccgaggtccacatcggccactcgcaccgtggcgcgacgcccggcaccggtgatgatcaaatcctgcacggccatattccgcccgaagctgcccgcctcgtaaataggcgcgccaccagcggtcgtaccacgcttgatcgcgtgactgtggccggtgtataccacatcaacatctcgcccaatatcggcggcggctgaagcatcggcgtgcagcaaggccaccaccgcatccacctttccggagcgtttgagttcacgggccacgcgattgatcgcgtccaccgcccgttcgtcaagatcggcatcacgcgtaatctgcggagtggctaccgagccgagcgcatcagtaagggcgcccacgaaaccgatccgcttgccgttcaccgttcgaatcgtagagtcacgtacatggctcagcagtccgtcaggcgacttactggcggcagacgtgttggcgcacagccagtcgatgccattgctgggatcagcgatgcgattgttgaaatcggcgacaccgcggtcgaactcatggttgcctaccgccgaaatcgtcaatccccacgctttggccatgtccagcgtgggttggtccttctccaccgccgactcatacggggaacctcccaccaaatcgccggtcgataccgggatcatattgccgggattatggctgtcggccacggtgaaggcggtggcgttgtccgcaccacgttcgatatgcccgtgaaaatcagtgatgtcggcgatggtcaccgtacgggtgccggaagatggattatcgccggaaaaaggaacggctcccgtggttcccgcacaagcataaggaaccaccagagccgtaaggataagcgctactgcaccaaaagcgatccccgatcgcttgccggcccaccgccggttcttcatattcctgctcacaccagtcacgctaggatcgtcgattgaacggccatgcctaggaaggcgactctcaggtgaattcttagcggcgtcttgggatgggaaaggcctgaccccgtactatcagggtcaggcctttgcaacccgtgtcactacgaatgcgtcggcaaggggagattactcggcaaattcctcgacgcagatctcagctaccgcatccacgcacgcctcggcaatcaggcggccgcgttcggcgcttgagccggccggattggcgagtccgccgtgagcgggaacgtcaccttggcgcaccgggtagcgtacataggatttcgccgtggcaccggcttcctcgaccatacggtccatgtgcaccagttccggcgcgtagtggagcatcaacgaagtttcggtgacggccgcatgctccaatgcccagccggggaacaccaatccatcgaacaccttgtcgataaccgactgcggaaccgggtcccaccaattggtttccacgatggtggccactcccccggtttcgcgggtgaccaggtcgatggcctcgacgatgaacgcctcgttttcaaaatgcgcgttcatgacgacgatcttggtgaagccatcggcgatgagttcgctcagcacgtcgtgcatttgggtgatcactgtcacgccgttcatgtcgatagtacccgggaacagcggcccgccaccggagagcggcttggacttgtatccgtagctcagggtgggcagcacggtgccgtcgatgcgttccgccagatcttcggcgacccgcgtggcgagtaccgcgtcggtaccgatgggcagatgctggccgtgctgttcggtcgaaccgatcggcacgatgacgggatgagtcttcacctccttgaattccggccaggtcatgtggtccatacggcggttgctacccattgcagtactcctttgggttggtggtggattggatggtcaatgaatgcgcccggctccctcgggaaaggagccggagctgaggagatcagatgtgattcagatccttgtcggtgttttcatgggaaagaatcatcgcgaccaaggcgatggccgcaacacccaccatgtaccaggccggggcgatggatgaaccggttagggcaatcaggccagtggcgatgaacgaggccgtaccaccgaagatggcattggccagattgaagctgaacgcgaatccggtgaagcgcacggaggtggggaacgtctcggtcaggtagctggacagggtaccgtcgttggcggtcagggtggcgcacattgccagctcaaccagcagcacgggccagaactgggaggtgttgaggatgaggaaggcaggaacggtgaggacgatgaacgccacgcaagcaccgatgagcaccttcttgcggccgaatttgtcggagatgtggcccatgccgaacaccatgaacacgtaggcgaccaagcagatggtggtgatggtgccggactgggtggcgtccatgccgacggtgtcagacagataggtcggcaggtaggtgagcacggtgtagaagccgaccgcattcagcacgcaggctccgaagctgatgatcagggccttgagatggttgtggaagagttcggcgagcggggcgaacatgccgctcttggaaacgacttggccgtcagcggaggcggcgctcttggactcaagagcatcgttcattgactggtacacgggggaatcggagagcttggtacggatgtacagcacaatcaggccgagcgggccggccagcaggaacggcacacgccatccccaaccgaccatcgcgctggagttcatgttggcggtcatcagcgtggccagcgtggagccagcgagcagaccgatggcggtggacgccggaatcagcgagcagtagatgccacgctttgaggtgggtgcatattcgccgaggaatgtggccgcaccggcatattcaccggaagcggagaagccttgcaccatgcgcagcagcagaagcagaatcggcgcgccaacgccgatcaccgagtaagacggcaggcagccaatcaggaagctcgcaccggacatgaacataatcgagtgggccaatgcggctttacggcctttcttatctccgtagctaccccagaacagtgcgccgattggacgcaggatgaaggatagcgcgaacacgccgaaggtctgcagcatggcgacggtgtgattgtcggttgggaagaacaccagggcgatggtggtggcgaagtacgaataggaggcgtagtcgaaccactcgatgaagttgccaaggaaggaagataccgcgactttcctgaccatggcctgttcttcagtttgaggggtgaaattcatcagtcgtgcagatgtagtaatcgttgcggaactcatgatgtcaccgtcctttcaaggatgtgctgttcgtgtgactgaatgggattcaagtgggaattcgtttcgcagcaggtcgaccagcgccgcgatagcctcgactatgcccttgagtatttgctgaaacgtgaatcgtcgattaacccgttcggcgtagaagtggacaggttgcccagtggtgctggcgcattattcaccatgctgttcttgccatgatttcgtgagtttggcggcgaatagcagcatcgaccagttcggtttgtcgttatagtcgacgccgaccatttgtgtcactttgtccagtcggttgtacagggtttgccgtctgatacccaattgctcgcacgcgccggttttgctatcgaggttgtcgaagcagacgcacagtgtgtccagcaacaacggagaggcggcgacctcgaatccgatggtctgcaccacgagcatgcgcatcgccttgtccatatcagaggatgcgacgaaacggtcgacgagtgcggacatggtacttacgattcgcccgtatgccggttcctgattggcgatgtcacgcaataccgcgaacccgtcgaccagcgtcaccgtgtccaatgccactcggccatgcaccacgtacacaccgtcgccttccagtacggcaagcgcatccatgcaatggcgtccgaatgcggccgcaccgtctgaggaatcggtggtggagcaccatccgaccatcaagtcaccttccagcatgcaggagacggcgcatcccgaccgttcttcgaaccgttcgaccatcgtcgatacatggttgatgccttccaccaccgatctgaaccgaaaagcgaatggcatatagatgcatgatccggcaaaacccagcgcgtcgagcatcgcatgcgcttcctgcgcctcaaatgtattgacgtgcacgccgtcggccgggcccatactcagatgatgcatcatgcccatgcgcgcgccgccgtcaatatagagggcggccaccggagacacgatggtggcgatggcccgacgcatcgtggcgtcgaaagtcatggtgcgttgcgtgatctccaatgctcccaccggccgggagcgactttcaagggcgatgacggcgctcgattcgttgccggcatcgaacgcacgacccgctcgagcggccaacagaccgtcaccatcgaaaatggcgacgctttcgccgaacagcgacgcaatggtttcggccacagcctcgatattgccggtacgggacaatccctcacgtaatgaagtggacattgtgtccacctccaattgcaagtgcatctgttcgtgcacgatagcggtattgacactctgacagatgtcgacaaaaggtacgcgagatttcagaccaatcaacgtcaacccatgcagcctggccgcagacaccagttcgtccggcatccgcaccacaccctccaccagttcgaccaccagagcggcgacaccagcctgtgccaggcttgctacatattgtcctaacgtgccgtgccaatcggcggcgagcagagcgttaccctcgataatcagcatctcaccgcccgaaaggaaactggagacatcctctcgctcgttggtaaacacccatcgcactggcgtatcgaggtctttgccttcgacctccaccacaggatcggctcgtttgaactgcgtgttatgaagcgcactgcgaatcgatacagtcatacaatctgtccattcccccgcggaacaccggtcgttccggttaacctcaccgcaaagcgtgctgttgacaataacctcagttggttacgcgggcagtcggttcacgtaaccgttcggcaacacaccagttgaaggagcgacgatgactaccacactgttcaccaacgcacatatcgccaccggagaacccggcagcacggctgcaagcaccctgccattgcaggacattctcgtcacggatggcgtgttcaccgcattcggccccggactcgcgcaacaatatgaggctcagggtggtgatctggcggccattgaggtggtcgatctgggcggcaaacttgtctgcccaccgttctgcgatacgcatctgcaccttgattacgtattcacggcccgcaagcccggtgcggtgaatgaaagcggaaccttgtttgagggcatccagcgatggagtgagaccaagtccgacttgacggtcgacgagatcaagcagcgcgcgaaaatcggcattaagaaagaaatgctgcatggcgtgcagctcattcgctcccatgccgatgtgaccgacccgaacctgacctcattaaaggcgctgctggagcttaaggaggaattgaaggatacggtcactctccagatcgtcagcttcccgcaggagggcatgtactcctacgagggcccgcatggcgaatcgggggccgagctggtggaggaaggactcaagatgggtgccgactgcgtgggcggcatcccccatttcgaacagtgccgtgagtttggcgagcattccatgcacacggtagttgagttggcttcgaaatacgacaagctcatcgacgtgcattgcgatgagacggatgatccgaattcccgttacgtggagctgctttcggcgttggcatataaggctggcattggcccgaaggtcaccgccagccacacctgttcgctgggatcggcggacaacgcctacttcttccacctgaccaagctgcttaaggcggcgcatatcaacttcgcctgcgcccccaccgagaacctgtatttgcagggccgtcaggataccttccccaagcgccgtggcatcacgcgagtcaaggagctcactgaggcgggtgtcaatgtgtcattgggccaggattcaatgcaggacccgtggtacccgctgggcaatggcaatatgatgctcattcttgattatgtgctgcatttggcacagatgatgagctttgaagaaatcgacgatgcgttgaagttcctgaccgtcaacggtgccactacgttgggcctgcgcgatatgtacggcttggaaacgggcaagccagcaaacttcattgtgctggacgccgatagtgtgttcaacgccgtgtatgagcgctgctcggtattgcgttcggtgcgcgccggccgcacgctgtttacccgcgaggagaccatcgacaccggactcgccctgctgcaataacccgacaacaaacagtagttccccttgacaggggagctatcgccagaggcaactgaggggtagaccaaaaacgtgcacatcatgtgtgcgtaggtctacccctcagtcagcttcgctgacagctcccctgtcaaggggagctttgctggtatgcgctagctacgctatcgaaacggactacttctgcggagcgtcaccggaatcggcgggagcggattcggctggttcagtggccggagtggcgtcggctggagtctcgccatcagtggaggcaccggcttcggacgaagtttcggcatcggtggcggcaccgtcttcggcgggcttatcggcggcggccggctcctcgaacttctcccccttgaaggtgaattcgccgaggataccctcgccttccgcatccacaatcacgcgctgaccgtcttcgagatcgcccatcagaatcttctcggagatggcgtcctcgatgtcgcgctgaatcacgcggcgcagcggacgggcacctagcagcgggtcgaagcccttctgcgcgagcaggtccttggcggcgtcggtgagttcgagcgacatgtgacggtcgaacaggcggtcgttgagctgcttgacgtccagatccacgatctggcgcacctgcggctcggtgagctgcttgaagacgatgatgtcgtccagacggttcaggaactccgggcggaactgctgcttcaattcggagctgacctggtccttcatgcgctggtagctggactcgttgttagcacccaggttgaagcctgtgttggcggccttggcgatgtctcgcgtaccgaggttggtggtcaggatgatgatggtgttcttgaagtccaccttgcggccctgaccgtcggtcaggtggccgtcatcgagcacctgcagcagcgtgttgaagatgtccggatgagccttttcgatctcgtcgaacagcaccacggagaacggcttgcggcgcaccttttcggtaagctcgccgccctcctcgtagccgacgtatcccggaggcgcgccgaagagtcgcgaagccgcgtacttctcggagaactcggacatatccacgcgaatcagcgcgtcctcatcgtcgaacaggaattcggcgagcgtcttggccagctcggtcttgcccacgccggtggggccggcgaagatgaacgaaccggacgggcgcttcgggtccttcagacccacgcgagtacggcggatagagcgggacagggcggaaaccgcctcgtcctggccgatgatgcgcttgtgcagttcggcttccatgttgagcagtttcttggactcggcctgagtcagcttgaacaccgggataccggtggtggagctgatgacctcggcgatcacgtcctcgtccacgaccatcttgacgtcggactcgccttcgcgccaggagtcttccttctgcttgcgatcggcttccagcttctcctgcttgtcgcgcagttcggcggccttctcgaagtcctgacccttgatggcctcgtccttgtcggcggcgatctgggcgatcttctcgtcgagttccttgagctcaggcggggcggtcaggcgcttgatgcgcaggcgtgcaccggcctcatcgatcaggtcgatggccttgtcgggcaggttgcggtcctggatgtaccggctggacagctctgcggcggactgcagcgcgccatcggtgatggtcacgtggtggtggttctcgtaacgggaacgcaggcccttcaggatctcgatggtctcggcgatggtcggctcgtgcacctgaatcggctggaaacggcgttccagagccgcgtccttctcgatgtacttgcggtactcgtcggtggtggtggcaccaatggtctggagctcgccacgggccagcatcggcttcaacatgtcggaggcacccagcgcgccgtcagccgagccggcgcccacgatggtgtggatctcgtcgatgaacagcacgatatcaccacgggtcttgatttccttcagcaccttcttcaggcgctcctcgaaatcaccacggtagcgggagccggccaccatggaaccgaggtccagcgagtagacctgcttgcccttcagggtttccggcacgtcgccggcttggatcttctgggccaagccttcgaccacagcggtcttgcccacgccgggctcgccgatcagcaccgggttgttcttggtgcggcgggagagcacgaccataacacgctcaatctcgttggtacggccgatgaccgggtccagcttgccttcagcggcttcggcggtcaggttgcggccgaactgatcgaggatggcggaaccggacttgttctgcttgtccgtcacgccgccggcgttggccaagtcgcccttgccgtcaccggtgccggtgccggagttgccgcgaatcatatcgatggtcgcgctacgcaactcgcccagatcgacgtccatcttgatgagcacctgggtgcccacgccttcgccttcgcgaatcaggccgagcaggatgtgctcggtgccgatgtagctgtggcccagctgcagggcttcacgcagcgaaaactccaacacctgcttggcgtgcggagtaaaggggatgtgcccgttcggagccgcgttgcccttgccgatcatttcttcaacctgcttgcgggtggcatccagctccacgcccttcgaggcgagtgccttggcggctacaccctcaccttcgcggatcaggccgagcagcaggtgttcggtgccgatgtagttgtgctgaagggccctcgcctcttcctgcgccaacacgatcacgcgccgtgcacggtcggtaaaccgttcgaacatgcttgtccttcctcaattgacattccgtcctactctaccgattcacgatgacgtttattcatgagattccacgaattgcgccgtgagaggagaagaaaacgatatgctggttctagattcacccgtagtcgattacaaggaggctcgaaatgagtgaagctgcaaccaagcccgacatcgttgtcggtgtggatggttccgatgaatcctttgccgcgctgaagtgggcgcttgaggaggcctcgttaaccggtcagagcgtcaacgccgtgtttggctggacgcattcctgggatatggggtccgaaccggacagcgacgaggcctgggccaaggtccgccacgatattgccaacgagctgcgtatgtgggtcgacaaggccgctgcaggcatcgacttcgatccggcgaatctgaagctcacctcggtgaaggcctccggtacttcggccctgctgcagatcggccatgattcgcagcagatcgtggtcggccgccgctcgctgagccgtatggcccgctggttcatggggtccctgtccgcttcgctggccgaggccgccgaagtgccggtgaccgtggtgcgcatcgccggcagcgaggatgagaccgtgaccgaggccattgccaacgccctgactccgggagacaagcccgttcactacacgcagcctcagccggtggttgaggaggctcgccgcccggtggtggttggtgtggatggttccgagacttcccgccgtgcgttcgatttcgcactggaagaagcacgactgcacgacgcgccgctgcatgtgatgttctgctggcagctcaaggatttgggcgttattccgggctatgagaacgccgtggcaccggtgaaggtcggtcagcgccgcgccgaggagattctctctgagctgatggccaaggccgagattcccgatggtgtcaaggtcagcgcgaatgccttccatattcccgcgtccaaggggctgattgcggcatctcggtacgccagccatctggtggtcggttcgcgcggcctgtccggtctggacgcgcacttcctgggatcggtgtcccgtcagatcgtgaacttcgccgaatgcacggtgactgtggtgcactgatgcaccgaaatcggcatggagtgctaacgcacgtctcggtgatgggcttgcagggaggaattctttattcctgcaaccccatcaccatctactttttaggaaacatcttcgctgagacctataagttgatccgagagtacattctgctgttggggagcaggattggcgtttattttattcctcgtccgccctgttctggcgcagctgctcaatgagatcgatgacggtttcgagttcaggagtcgcatcgtctgaaggacgaacgttatcctcttcgtcgtccatctcatcatcctcatcatcatcggcaacggtgttgttgaggatgtcctcttcggtggcctcgtcgtcagcatcagacttggactcgtcgctggaatcagctgcatcaacatccacaacggaatcggatgcgttctgtgcaacagactcatcaccggcagactgggattgcgaggtcccgtcgcctgccgcctcctcagcgggctcagtatcgacggcgttcccgtcaacagtcttctgtgcttcgatatcatcaccggcaggctcgcctgtcttgtcggtttcgccttcggcctcgtcctgggcaacctgctcctgcttgcacggacggttggcaaccacgtcgatatgcagatcgtcaaaggctggcttggactgcacccacagctggcttggctcgggaggttcgatttcggaatgctcaccgcagccgtggtccagggagaccacgcggccgtcatccggactccacttgttggcgcacacgccgaacatacggtcgagttcgcccgcgagcggcacgaagaaaccacaggtggagcacaggttgccttcggcggttttggtgctcaacgctttggggcctcgcggaccttcataccagcgcttggcagcctgcgcacgacccaacgaggtcagcacgtgacggcgggtcagtcggaaggtctcgacggcatcgttgacatcctgcagcgaggattcctcgacttcgccttcctcgatgcgctcgtcatccggatcggtaccgatcgaatcggtgggagccagatctgtgggctcaaggcgatctttccaaggaatccacttgggcggcatcaacgcgccctcagtggggatcaaggaggattcgttgacggtccaggagtcgatctcctcgtcgtgatacagcgtcaccgaccattgccatccttcgtagccacggatattcgcggcgaagcggaagtcagtgacgtgatcctcaagatcatatgaggtaacgaaatcccccacctgatcgctctcgtcggccacttcgagcagcacggcgcgcgcgatggcgtgagggtccggtgtcacgatggtttcggtggtatcagtcatagatcagatcagtcctgtacatcgaattgatccgccaccgcacgcagcaacgtggccagctttttgctgtcggcagcagatgggtaacggtgacggcgcaacgtattgccggccgcatcaagcatcttgataaggtcctcgcagatggcggccatgtcatccgccttcgggcgggtggccttgaccaagctgggagtggaggcgatcaggcgaacatccatggcctgcggcccacgacggccgtccaccacggaatactccaccttggcccccttgcgcaacgtggtggcgccagtgggtagggcctgagccggcaggaacacgtccttgccttcctcactggtgatgaagccataacccttggctgcgtcaaaccaacgaactcgaccggtgggcattgcgaaccttccttaatcctcaatggaaatagtaaaccgaaggtacagtttacctcacagggcttgacctcacgctttgggctgagtcgcctgagtcttacgctcagagctgaaccaagaagtcttctgtttggcgtccttggttttgccggtgggccgcttgggctcaggagcgacgatctgctcaatcggcagcaccacggtgaaggtcaggcctcccccatcggtgccggtggcgcagataaagccgtgatgtgctttgaccacggattgcgcgatggccatgcccaaaccggtaccacccttttcgcgggcacgggatgggtccgcggtgtagaagcgttcgaaaatcttcgagcgcgattcaggcggcacgccggggccatggtccacgaaacgcaatacggcgtatcgatagccggtctgcatcgaggcacctacttcggcggcgtcgatgaaccgccgcattgacgcgtcgctggcgggcatgcgagcgagctgtcttggatcgatggcggccggcatcacaccgagcgcggcctcggcaggcgaatcggcaggcgtgtagcggtggatgttgcccacgatgttggtcaccacctggcgcagtcgagaggcgtcgccgggcagcacgacctcgggccaatcgccttcggcaaggttgaattcggcgggatggttcaaatcgcgcgccggttcgagggaaatctgcatgcggcgaacggcacggtccgggtcgagcgcatgcaggtcgtcgacggcgtcggtgaccagcgacgagagtttcaccgtgccggtcacatcgatgccgcgcccctcatcgagacgggccaaagacagcagatcctcaacaagaacagtcatgcgctggctggaccgttcgatatgttcgatggactcgtccgcacgctccaaggcaccaggcatatcgcgctgcatcttatacagctccgcatagccatggatggcggccaacggggtgcgcagctcatggctggcgtcggagacgaaccgtttcatcttgtcggtggtctcctcctgttcatggaaactggattctattcgggtgagcatggagttcagcgatgcggccagggagccgacctcggtgttttccggcgcggaaggaatacgttggctcaggtcgccggcggcaatctttgcagcggttttctcgatgcgcttcagcggcgtcatcgtgtgctggatgatcagcgtggacagggagccgccgagcagcaccacggcgatgccgaccacaatgcagtatcgggtgagtgtgttgacggtgtcgatctggtcggccagtgacaagccgatgtacaccacggcacggtccttgccgttttgctggaaggtcaccggcagaatacgccatggtgccctcgccgtgacgatggcggcatggttggcattgacagtggggctggccagtaccttggtgatggtgtcagaggaattggagtttccgttggccggatcgttctggctgtccgcactgtcggactgcaccgtgatgatctgcttggccactgcctgcgtagtgaatgcctggccgagcgtgatgccactggtatcaccataggtaggaagaatcggcaccgatacgataccgtcctgcatctgcggcatcagcggggtcacgaccagaggattgccttctttgtctttggtgccgtcggtatattgaatctgcagaaagtacgagttcggccccgatgagtcattttttgacagcagatcgatattgttgaccaccagctggctttgcgagcttaactgggtgtcggttttctgcagcatgtagttgttcaccaacgcgcggatggagaaggaaatcaccgacacgccgataagcagcacggcgatggtgcaggccaccagcttgctgctcaacgagatacggtcgatatgccgcatcagcatgtttttcttacgttcgtgccgctcttggaaatgggcggcgaacggcggcattgcaggcatgggattcgtgttcggggcggcgttcggcgtgctgctcggcggtacgccgcctgactgcttatcggggatactcatgagattgcgatgcgttatggatggggcgactagttcttcggttctcgaatcatgtatccgataccgcgcttggtttcgatcagcggagtcaccttgcgcttgccgccttcgccgtcgtcgacctcgatgccgtcgaccttcttgcgcaggtaggagatgtacgattcgacgatggctgcgtcgccgccccagtcgtattgccagacatggtcgagaatctgtgccttggacagtactcggccctcattgtccatcaggtagcgaagcagcttgtattcggtggggctcaggtcaaccggctgccctgcacgggtcacatcgtgggagtcctcgttgatttccaagtcggcgacgcgaataatcgggtcgtcttccacctgttcgcgggtacggcgcagaatggcgcggatgcgagccacgacttcctcgaggctgaacggcttggtgacgtaatcgtcaccgccgacggtcaggcccatgatcttgtcttgggtgtcgtcacgagcggtgaggaacagcacaggggcgttaatgccttcctggcggatgcggcgggtgacggtaaatccatcgatgtcaggcagcatgacgtccaacacgatgagatcaggctgcactttttcgataacctcaatggcttcggaaccggaagcggcggtgtttacctcgaatccggcgaagtgtagggaagcgaccagcagttctcggatggacggctcgtcgtcgacaacaacaatcgatgcttcaataggcttactcatgcttcctagagtgtcgcgctcttctgggcgtttcctgaatgtcatcttggagttcggccttggaatccttcttgatctccttgcgccgacgaatcaccaccatgaccacgatgatgatgaccagcgccaccaacaccacacccatgatgattatgcctacggtcaccgtggatgatgaggtggaggcttttttggatttcacgatttgatccatcattgccgttgccgcgccagaccagctcggcgggttttccagtaacggctgctgtgcggcttcggatagcttatcgacggttttgttatcgagaagccacttatcggagttcttggacacgacgaccaccaggttgccgtcattcgaggccacggcaagcatcactgtgttcggcttgggattcatggactccatcacggttgccgcccagtcttccggtttctgttgactattgaaactggaaagatacagcagatgcacgtgtacaccggtttccttctcggttttggcgatggcatccgtgactttggccgcatgggagcccaggagattttccgtatccgtgatgttctcggtgatggtcacgccgctgtcggtgctgttgctggagctgtcagagctgtcgcccgagttatccccataggcatttgcggttatccacattgcgttcatcgctactgcagcaagggcgcaaatggcacaaacaagccattttcggaccatattcccgaaggccgaacaggacggctccgaagataggaccacaatagttgtttttccgtcttcccgattcgttgttgacatatcctccaccttagcggccggtattggcaagcggccgccatacataccattaaccctctagaaaaggagcaacgatgccccaatatcaggtagattccgagcgaatccaatcatcctcggccgcagtggccacttcgatctcgcagatcaggcaggccgtgggcggcatgtacaccaatctcaatgccttgcaggacgcatggcgaggttcggcggccacccagttcaccgcggtagccgaacagtggcgtgcggcccaacagcagatggaggcctcactcgagtccatccaacgctcgctgacgcaagcctccaccgtgtacgctgacgccgaaatccaagcttcgcgcctgtttgccagctagtttcttggctctcctccctgaggggagctcgatcgcgaagcgaaactgagggagtatccctacaccgcagctccccttagtctcactgcgttcgacagctccccccaaagaggggagccagaatacaaaaaaggggactcccgaaggagtcccctttcagctcaatcagctagcgatcgcttgcggatcagtagcccatgtcggcaccggcggccggggcagcaggcttcggctccggcttgttggcaacgacggcctcggtggtcaggaacagaccagcgatggaggcggcgttctgcagagcggagcgggtcaccttgaccgggtcggtcacaccggcggccagcaggtcttcgtaggtgtcggtggcggcgttgaagccttcgccatcaggcagggagcggacggtgttgatgaccacgtcaccggacacgccggcgttctcggcgatttgcttgatcggggcttcgatggcgcggaacacgatggcggcaccggtagcctcttcgccggtcagggaggcgacggcctcggccttctcggctttggcagcagcctgaacgagggccacgccaccgccgggcagcaggccttcctcgatggcggccttggcgttacgcacggcatcttcgatgcggtgcttgcgctccttggcctcaacctcggtggcagcgccgaccttgatgacagccacaccgccggccagcttggccagacgctcctgcagcttctcacggtcgtaatcggagtcggtgttctcgatctcagcgcggatctgggccacgcgagcgtcgatgtcttccttggagccagcgccctgaacgatggtggtctcgtccttggaaacgatgaccttcttggcgtggccgagcacggaggtgtcgacggactcgagcttcaggcccagttcgtcggagacaacctgagcaccggtcaggatggccatatcctgcagcatggccttgcgacggtcgccaaagcccggggccttgacggcgcaggacttgaaggtgccacggatgttgttcaggatcagggtcggcagtgcttcgccgtcgacgtcctcagcgatgatcagcagcggcttgccggtcttcatgaccagctcggccacgtgcacgatgtcctgctgggaggagaccttgccggaggtcagcagaatgtacggatcttcgagcactgcggtctggtcgtcagcgttggtgacgaagtacggggcgatgtagcccttgtcgaaacgcatgccctcggtgaagtcgaggtccaggccgaagcggttgttgtcttcaacggtcacaacgccgtcctggccgaccttgtccagagcctcagcgatcttctcgccgacctcagggtcggcggcggagatggtggcggtagcagcgatctggtccttggtctcgacgtccttggcggcggcgacgagttccttgacgatgacctcggtggccttctcgatgccgcgacgcagggcgatcgggttggagccggcgaccacgttcttcagaccctcgtgaaccagggactgagcaagcacggtcgcagtggtggtgccgtcaccggcgacgtcgtcggtcttcttggcgacttccttgaccagctcggcgccgatgcgctcgtacgggtcttcaaggtcgatttccttggcgatggacacaccatcgttggtgatggtcggagcgccgtaggtcttgtcgagcacgacgttgcggcccttcgggcccaaggtgaccttgacggtgttggcgagcttgtcaaggccctccagcatgccctgacgggcttcctcatcataagagatgatctttgccatggttgcgtattcctccaaatggctaggtataccggttatcactcgcaagcgtcgagtcgtgacgaccagccgtcagctgccgattatcactctcgacctccgagtgctaacccagacattagcactcgcgaccgccgagtgccaacatcatcggcggcgattgcgctttgggcatgaaaaggccccaaccgtcgaaacggtcagggccttcaatgcacatccttgcgtgcgtgttgctcactcggagcgggcttcacccgaagacagcttgacaacatcctttgcttgcgtgcctttgccggacgaagcgggcgtatactccacgcgatcgccctcgtacagcatcttgaacttattggtgctgccgtcgtccttgatttccgcgtagtgcacgaaaacgtcctcgctgccgtcgtccggctggatgaacccgaaccccttcttggcaaggaagaacttcacggtaccttgtgccatatctgatctttcctttgttcccttaggcgtcgcgacacaaaacctatagggaacgtagaaagaaccgcatcgcgctcccctacctcgcgactagatgacgattgtacagtgacgagggaacaatcccaaccgcagtggcacattttcggtacgaattatttcatagacgtgagaacgctcacagttttcgatgtattccacgccgatatcaggggcgcatcaacaacgctagttgagcagcaccaccgtaatgggaacggcgagtccttgcacctgctccacagccgaaatgccaagcgtggtcgccacatcttcggcggtggctttatcggcttcattctgataccataccacggaagaagccggcaatgtgccgcgcggattggtcgcctcgacgctggtgtaaccggcggtctgcagcacatcggcctgctgacctgcatatccttggattcctgtggcgttgaccacacgcacctgcgtggccttattcacagtcgcggtggctccggactgctgagactgctgatcggagtcttgattctcattcgaggatgtcgtatcactgttggtatcggattttgccgaatccgaagtcgagtccttggacggatcggtcgaagtggacgaggaatcatccttggtgctgtttttggtctcagccttgctggacgaatcggacttggaagcagtcccggacgtggtcgcagtctgggacgatcctcctattgcattcctgtattccccggaaatccatgcccagaccccgacaccgcacagtgcggccaccagaataacgacgatgaacgggcagaggcgggccactgccgaacgagcgccacggtgaactcccaccggtcccttcggaggattgtcgaaggaatccggttcataggattcgtaggtcatcatgtcgcgtgccataatcgccctttcttcctgtcaaaactacccatgagtgtaatcggcaaacaactcatcagtccaccacaccacgcctcgtgcaccggatatgcacgtttgactacagtggtgagtcatgatcaaaccattgagcgaactggtagagccggggtgggcccatgccttggccgacgtggagcccgccatccaccatatgggcgattttcttcgtgcggaaaacgccgccgggcgcccgtggctgccggcaagccacaatattctgcgcgcgttcaccatcccgttcgattccatcaaggtgctgattgtcggccaggacccctacccgaccccgggtcacccggtgggtttgagcttctgcgtggcgccgaatgttcacccgctgccgaaaagcctggtcaatatttataaggaattggttgacgaccttggggtgcccatgcccaccaacggcgatctgacaccgtggacggaacgtgaggtgatgttgctcaacagatgtctgaccgtcggcgtcgggcggccgaattcgcatcagggcaaaggctgggaggaagtcaccgaggccgcgattcgtgcgttgaacgcgcgcacggacgccgacggcaagcccaagccgctggtggcgattctctgggggcgtaatgcgcaaagcctcgagccattgctgaccaatgccttcattatcaaatcgcctcatccgagtccgctgtccgcttcccgcggattcttcggctccaaaccattctccagagccaatcaagccctagtcaccatgagtgccgaaccggtggattggactctttagacagaccaacagtcattgtgagtagttacagtgagggcatgactttgttccccacgcaaccgaacataccttcgccgaccaccgccgcacgaccggtcaccgttcccacgcccggcgtgtcggctccgctgggtgccgatgacgccaaacgcgcacgtatcctggccgacgccattcgggcgaggttcgcccagacactggtgggtcaggataatctacgcgaatcgcttatcgtgaccttggtggccggcgggcatattcttatcgaatccgtgccgggcttggccaagaccacggccgcccagacgctcgccacctgcgtatccggctcgttcaaacgcgtgcagtgcactcctgatctcatgccatccgatctggtgggcacgcaggtcttcgattttgcgtcgcagaagttcaccacgcagatcggcccgattcacgccaatttcgtactgctggacgagatcaaccgttcgaatgccaaaacccagtccgccatgcttgaggccatggccgagggtgccacgaccatcggcgggcagcgtatcgccttgcccaagccgttcatggtgatcgccaccgagaatccgattgaggaggagggcacgttcaacctgcccgaagcccagatggatcgtttcatgatgaaggccgtcatgacctatccttcgcccgacgaagaggctcgcatgctggccatgctcacccaccgtggctccgatatgatcggtcccgacaccatcaccggcgaacgcatttccgtgtctgacgttgattttctgcgcaaggcggcacgccgcgtgcatgtttccgacgcgatcatgcgttatgcggtcgatatcaccgccacgtcacgaggtgccggctcccgccccatcaagggactgtcgtccttggtgcgtttgggtgcctcgccgcgcgccaccatcgccttgacccgtatcggccaggcgaaggcgttgctgtccgggcgcgactatgtggtgcccgaggacctcaaggcgttcgctcatgaggtgctgcgccaccgtattatgctgacgttcgaggcactggccgatggcgtggtcagcgatcagatcgtcgacaagatcgtcgaaacggttcctgttccgtgagttccgattccgttcgcaagaaaatcgaggcccttggcactcagctgagcctgcctaccgtaaggaaggctttgggcgtgctggagggcgaacacgcatccggacgtcgtggcggcagcggcgatgcgatggatgtgcatgcctatgagccaggcgacgaatcccgtcttatcgattggaagaccagcgcccgccaaggccgccccatggtggtcgagcgcgagcgcctgtcgacgtcacgggtctggttgctgatggacgtaggcctggagatgactggcgtatgcccttccggagaacgcgcatggcaggttgccgccaatgcgctgcgtatgttcgccgcactgtcgttgcgccggtcggacgatatttcgctggtgttcggcgatgagtccagcatcacccgcgtgccgttcaacggtgggttcgcgcagttcgaacgcacgctggacaaggcgcttgatcgtgattgggatcatcaccgtaatatcgacgcgctgctggaatatgcgcgccgtatcaaggatcgtgaggcattgatcgtattggccaccgatgagcatgcgatggaggagcggcatatcaccacgatccgtcgtattacccgcacccatccgatggtgctgatcgatgtggcgacgatgaatccgttcaaggccgtctcatcccgccacgctcccgccgacggcttgagtgcacggcgtgtgccggcattcctgcgcaacgccaaggcagcggccgagatcgatactcatcgcgcgtatatggccgcggctttggaacaggagctcacccgtgccggttcccatatcattcgagccgcatccagcgaatccatgttcgatcgtttcgtcgccctggtgtcccgggcattggcccgcaccacacgcaatagactgggcactgcacccgaactggtcggactgactttggcgggtgatctatgatgcacagcatgttccccatcatcccgctcgccactgatcccggcgatctcaggcccgtggagtcgttggccttgaccactcccctggtgatggccatcgtcgcatgcctgttgctggcggtaggtctgatcgcgttgatcatcatgctggctcgccccgcacgcaaacctcggaacagcgaccgtgcgcgtggcactcatagcaatgccagctccaaggccgagtggcgtgcccgcatcgacgatgtggtggcccgtcatgaatccggagcactgccccggcatgaggctttcgtcgaattggccgtcatcgcccgtgatttcgccggtgccgcatcaggcaaggagcttagttccagtacgctgaccgatttggcgtacctgaatcgcacgcccgcgaatcgccaaggattggacgcattgaagcagaccattagcgcgttgtatccaccggaatttgccgatgatgcccgcaaccgaatcgcccagacgaccagcgtgcagcaggccgccgagtgggtggcgaatctggtggaaaggtggcgttcatgatgctggcatggcattggccttgggccgctctggccggcgtcttggcagcgctggcgattatcgtgctgattgtcgtgttcgcccgccgtaacgccgccgacgacacccctgtattctcgatggacgacgatctcaataccgagcacgcttcccgtctgttccgtcaatggcgcgctttgggccgtctcgccatcagcgtgctggtgcttgcgctggcgctggccattgtgctggtggctcgccccagccaagtggatgccggtgacgaacgcgcttccagccgagatatcgtcctgtgtctggatgtgtcgggatccacgctcccctatgatcgcgaggtcatcgatacctatttggaactggtcaagcatttcgagggggaacgtatcggtttgagtatcttcaactcgacctcacgcacggtgttcccgctgaccgacgactacgaactggtcaccaaacagttgaccgccgccagcaaggcgctgaaaggcgtcgagtcgcaggatgacatcgataagatgtccgatgccgaatatcaggacatcgccaattggctcgaaggcacgcagaaccgcaaggacgccacctccttgattggcgacggcgtggtgtcttgcgcggcgatgctccccggtttcgcttatggcgaagccaatcatgcgaatgccgaccgtcagcgtgcggcatccatcgtgctggccaccgacaacgtcgtgtcaggcaaacccacctattcgctgaccgaagcgttggacttgacccagcagaccaaaatcaccgtggacggcctgtattccgggccgaaagccagtgaatcggaccaaaccacaacggatatgaagtccgcgatcgagtcgcatggaggcatcttcctcacccaatcgaatggcgcgtcgatagatgagctggtacgggatattcagtcgcgtagagatacggatgtggagaacaaggcgaaatcctcaatggtggacgctcccagtctgtggacgcttgctctggccgtgatactcattatctggatcgtatgtgcatggaggttgaggcgatgaacggattcaccttctcccccgccttgggctgggtcgccggcggactgctggcggccgggctcgccgtactggccattctcgaaatcgtattgtttgttcgccgccgtgcttccagtgacgagaccgtgtgggcttgcatacgacgtacgcttatgctgctcattgtcgcggtgatggtactgactcccagcgtggtatcgtctaccacctcacaggtcatcaatgccaccgacgtcatcgtggcggtggataccaccgggtcgatggcggtggctgatgccacatacgggtccgagaagaccattacccgcatcgatgccgcgcgtcaggccgtgcatgatgtgaccgctgcttacccggacgccagtttcgcggcgttacggttcggtgcttcgggaacacttgatgtgccgctgaccccggatgcgccggccatcgataattgggccaacacgttggcggtggaagccacatccgtgtcggcgggatccagtctggatgctccgatcgatcaattgctgctgaccgcgaagtcgattcgtgaagcgcacccggatgatgcgattgtgctgtacctcatcactgacggcgaacagacctcgaatgtgacgcgtcgtacgttctcgtcactgcgacagtatctcaatgatgggtttaccgtgggcgtcggctcgaccgagggcggcaagattcccgtcatcgccgatggcgtcagtgccggcgattccaacaccacggaccactgggtggtcgacccggataccggcgaacccggcatctccaagatggatgagaagaaccttaaagacattgccgacgagatcagtggcacgtatgtggccgtggacgcttcacagactttggcggattcggtttcggccaggtcgtcgaagcagtggcgcatgaccaccacggtcaaggagcgcacacgcaccacgccggtggtatggccgttggccattgcgttggcgatattgcttgccatggaagtcggtgcatggatcgcgacctcaaggaggctgctgtgaggaacagtaacgaaatccacgagaacgatggctcggcgaatattcggatgcgggcgaaatgcccgctttgggcacgtatcgtcctggcttgtggcaccgtattgctgctgctggttgccggcgtggcggcagtaaacctgtccgcttcgattacgttcaatcaggccaccgcatcattgaatgccaatatcaaagcggctcaggatgagtcgactgatatcaccacgctcaaggcgcaacagcagcagaccgatgcgcaattcgccgaggccgggcgaatgcgtacgcttctgttgccgcaagtcaaggacgccatcgacaccaatgcttcgatttcttccgagctgacgaagatcaccctgaaacaggccgaggcgcagaacagcggttccgattccgggcaagcccagtcggcgcagcaatccgagagttcctcagccaatgccaaaaagggcggcgcgttgaccgacgagcagaagaagcaggtcgaggagctgatgaaggccaatcagcaatccaccgatacccagtcgaacaccacccaatccgagcagaaggcgacgcagaacaagggtaccggggccaccaagccgtggtaagcagtcgttcacggttgctctttttctcacatcctcacgggtcatggccttatcgcggctgtttcccggtttcggctgtcggctttggcgtttgtctgatcccgatagcccatggctgatccaaggtgtgcccaaacaggctatttgtggataatcgttacggctatacacaacacttgtgaataacttcgcccaaaatcggcaagctagaaccacattggtcgttccggctggacaagcatgagtcctgtccttttagctggatatatgaatacctacaccagcaccccagcacccatcgatcccgccggcggctttgccggcaatacggtgacgccgttcgattacggcacttgcccttgccatgcggcggtacagcgtagtcgcgacctcgtgtccgtccaacgtgcggccacactggcgcaatcggaccagatggcggtggccgtgaaccgctctcgcaacatcgtgtggaccggtaaagccgccgacctattccgatcgcggctcagtcgcaccgcacagtattcggcccgtctcgcgcaagacatggagaccacccaccgattggcttgggggtcatcatgagcgagcacgattactggcaggtggaatcgtccgtttacggcggagtgggatatgcgccagccactcttgaagaatatgccgccatagccaaggctctcgatgacgaggcggcaggatttgcggccatagccacggcttgggaatcggccgcattacagttgcagtcacatcggcatagtgcgccgatgtgcgtcaccttgcagtcgggcgatccgagcgccgttgttcccggccatgtcactgcaccatatgccgcgctgggcaatcggtgttatgaccatgcaacggcatgtcagcggttgagcgatgatctgcgtggcgcggccgatctgctgattcgcgcacactctctgtattctcaggcggagatgacggctcggcgcatgtttaccgaattattgcaggccggtacacaggccaaaccgggatatgccgcggtgggtgttgccgctgtggcggcgggcggctttctggccggctgggctattgacggcaaaccgaacccagcatggatgtccacgttcacctatccgttccaggaaggagtgctcagcggcgcgggcggaatcattggcggcgtacctatcggcaagagcattgcgcacaccgatgaggtcaacaaggctgcggggaaaatcgccaatttctccggcccggcgaaagacgtcgtccaaggcaatcatctgaacgtgcgcgaggtgcaggcgaatgccgacgtcgtccgtgcaagcggatcggtggccgagtcaatggagaatctgcgcaggctcgccgaagaacggctcggcaaaatcgagctgaacagcggactcgaatatgggaccatcgccattcaacgctatgaacgggctgatggaaccaactcctggctggtcaccatcccgggtaccgatggacaacctgactcaccattcggctgggcgcagaacgtggaactgatgagcgccgatcaggagcgccgcaggaaagcggacagcgctcgcacggttgccgaggcgatgcgtcaggctggtatcggcaaggacgagcccgtggcactgatcggccactcccaaggtggcatcgttgccgccacgcttgcctcggattgggcagaggaatataccatcgagcatgtggtgacagccggatcgccggtggccaatcatccgattccgcaacgcacgtgggtcaccagcgtggaaatcgatgatgaactggtcgccgcgctggatggtgccgccaacccggtcaccgataattggctcaccgtgcaagggcatgtatcgcccgcgcccgcggcaacaccatccacagtgcattcggacgtctcatgcactcccggcgcaacgcccatcaacggtctgaccccatatgacgccgcatccgtggctggttcgaccaacggcagggagttgtcgcattggctcaaataccatcaggccgcttatcagaacgccaccgacctcggctcccccgccgtgcagcgccacgaagcgcattttcaggaagtcatcaacggagaactcaaggaaacccgctattaccaaggccgcatgacccagtccacaaccattgctcccggcgagcgcaccaccgagttcagcacgttcggcggttaaaagtaaataccacacttgacagagttgtcaagaaaggagttaacaatataatgacgagtaggagatggctcatcaaactgatgaagcaagcggcgaaacgcaagaatattacgtttgagagtatcaggcaaagagggagtcatgagatattccaactcgatggactcatgattcccatcccacgccataacgaaatcgacaacgacctcgcgaacatcatttgtaaggaagcagaagccaaactcgggaaaggctggtatcagcagtgaaaacatatcaggtcatcgttcatcctggcgaaaaatactggattcttgagattcccggtatcggtttcacgcaggcaagaacaacagcagagattgaaagtatggcacgcgaccttatcaccgtcatgacgcaagatgctgatttcgcactcaccatagagacaaaactgccgcaatccgtacaagagcaccttgatgaagctcggcgactgcgcaaggaagaagcggaatgcagatcgaacgcagcgcgggaaactcgcgccgcggcacaagaactacatggcatgggtctcgccctacagcaaataggcgatatactcggggtctcacggcaacgggcacatcaacttgtcaatgctgtcaatgcttagcatcaatcggctacccccacaatgcaatcaccgcagagacgcggctagcgccactttcccgggattgttgcgctagcatgcccgaaaccccctctatcagcgcaacattcccgggaaagtggcgcgcaaagagtgtcaggcgcgtcgcttgatgagtgcgcggccggatgcgaggcggtcgagcacaccggttttggcgatggccagcatcagataccaggccatcacgccgctgataagcacgccgccggtgacctcggaaatcatgtgcacgatgccacgcgggctgacgaatgacacacccacgtagcgaaacagcatcagatatgtgccgtattccaaggcgaccaacgcaccggatgcaatggaaatcggcagattgaacatgcggtaacgggtcaaagcgaacggaatctcagcgaaaacaccctgcagcagcgccgagataatcacgaagcccaaatcgaactggctaccaatcaccgtttcgaccagcgtgccgataaggttcacgtacagcgccgctccgggtttgcgcagaatcagcaccgccagcgtaccggagaaataccagacggcgtgcacgatgctggcgaaaccgggcagaatcgcaccaaacaccgaagagatcggcatgtacgcgaagttgaatccccagaagatcacgccgcaggccgcgcccagtgtggcaccgaccgcgatgtccaacggctgccatttcagcgacgatacggcgaccgaacgtttcggaagagtatgaatggtggttgcaggcatggtgatctcctagccttaaaggccgcacacagtaatcgaatcacgggcgttccttgacctgtgcgactcgggcgggaacgccacaccacagtctagccgctcggttcacggctggaagtacccttggaggttatgaagcttaccgatatttcccccgcaatcgcattgaccccgctcgacggccgttaccacaaggccaccgccccgctcgtcgaatacatgagcgaacctgccctgaaccgcgaacgcatgcgtgtcgaagtcgaatggatgattcttctggccaacggctttgagggcaacggcaaccagcctatcgttgacggcgtcaagccgttcactgccgaagagcaggccttcctgcgcgccattcccgaggacttcggcgccgaaggcatcaagcagcacgccgctcatgaggccatcacccaccacgatgtgaaggccgtggagtactacatcgatgatcagatcgacaaggctccggccgagctggccaacatcaacgacgagctgaagaccctcgtgcacttcgcctgcacgtccgaagacattaacaacctctccatcgcccgttgcgtcaagaacgcgatggaaaacgtgtggaccccggagttcaagcgcatcatcgaccacctcgccggcaaggccgaggaattcaaggatatgccgctgctctccctcacccacggccagccggccacgccgaccacgctcggcaaggagctcgccgtctacgtctaccgtctgaaccgtcagctcaagcacatcgaaaaccaggagtacttgggcaagatcaacggcgcgaccggcacgttcggcgcccacctggccgcatgcccggatgtcgactgggtcgccgtctcccgcgaattcgtcaccaaccgcatgggcctgacctggaacccgctgaccacgcagatcgaaagccacgactggcaggccgagctgtactccaccgtctcccacgccaaccgcatcatgcacaacctgtgtgtggacgtgtggatgtacatctcccgtggagtgttcgcccaggtgccggtcaagggtgccactggttcctccaccatgccgcacaaggtcaacccgattcgtttcgagaacgccgaagccaacttcgaaatcagctgctcgctgctcgacaccctctccgccacgctggtggaatcccgttggcagcgcgatctgaccgattcgaccacccagcgcaacatcggttccgcgctcggctactccttgctcgccctgaccaacctcatgggcggccttgagtccatccacccgaacacccacgtcatcgagcgtgagcttgatgagaactgggaggtgcttggcgagccgatccaaaccgccatgcgcgcctgcgagctcaagggcctgccgggcatggacaagccgtacgagaaggtcaaggagcttatgcgcggccacgccatcaacaaggaacaggtcgagcagttcatcgaccagcagtccttcgacccggaaaccgccgctcgcttgaaggctctgacccccgccacctacaccggtgtggccagccagctcgtcgctttcgaccgctgaaataggtgcgatgcgagtccctcgagcccatcgcatccaccacactactgcgctgagtcacaaaccaaaccgcaaactgaaccgaacaaggacaggcgtcaggtaaccatttcatgactactgaacaggagcagtccactacggaagatcgcccggacaaggcgacctcctccactaccgaccggccgatcgcctctggtgacggccggtcggccagttttgctgtcagcggaccggacagcccggcaaccgacgacagcaacgattccggaccgtacatcgacgacatcgctccgcgccgcacgcgcgacttcggcgatctgacccgggccggtctgtcgctgttgatggccgccgtggtcatggtgttcgccgtgtatctgggcggcatgacgcgcggcgtcgaatccgacgcacacaccgcagcccaggtcatcaactggttggctgacttcccctccaccgtgctgacgcagctggccaccatcgtcatcgtgatcatcgtgctcgctcaattgctactggcccgggaatggctgcaggccgcggtgtccgcgctggccatgttcgccggctacggcatggtgtgggtcgtatcgacggcaatcagcagtctgaacgatttcaccctgccaatggcactagtctcagccgccacctcatacggctccgggctgttgcccgacatctacgccggcatggcgtccttcctgaccgccgccgggccacgccgcacccgctccacggtcaaatggagctggaatatcctgtatgccatcgctgcggtgatggtggtgctgtcgtggcattcggtcaccggcatgctggtgtcgatggccgccggccgcacagtgggcatgctgatccgattcgtggtcggcacgcagaacaagggcgtgtggggccaagatctggtcgccgccctgaaaggcatcggactggacaccgcctcgctgattcggcatcaggagcccggcgtcggccacggttcactggccgtcacgctggacgacgatctggccgaaggctcgcgcatctacgatctggataccacggacaaccgtcgtttcatcgtttccgtcatcgacgcgcagacccataccgtcggctatctgaagcagttgtgggactgggtgcgtttcaccagtgtgtccatccgacgtgaccgttccgtgcgtgacgccgtccagcatcatttcgccatgctgctgggtctgcacaatatcaaactgcccgcgcccgcaccctacggcatcgccgataccgacgaatccgcgattctggtgctggatgcacacaccatcgaactgcccgccaacctgaacacgcttaccaaggcggatgccgtggcctacatgcgctacctgtccgtggcgagccggcgcggctatacgcaccggcgcatcacgccggacacgctcgcccggcttgaagacggcaccgccgtgattgccggctggctcaacggcgacaacgcttccggtccggccaacaccgcgctcgacaaagttcagctgctagtgctgttcgccgcgctgatcggcgtggaaccggcggtggaggccgcccgcgaggcgtggggagacacgactctgacggccttggccccgttcattcagaaggtcgcggtcccctcccccacgcgcgcgctggaatcctgggacaagcagctgctcaagggcctgaggagtcgtatcaccgcgctggctgacgaggagacggtggaatccgccgaaccggtgacgctggcccgattctcctggcgttcgatgatcaccatgctgctggtcatcgtggccgtggtcgtggtcttcacccaactgaagcccgaggagatcatcaccgcgctgaccaacgccaacccgttgatggcggtggtgacgctcgcgttcggtgtctgcggctggatcggctcgtcgatttcgctcggttccctgatggcgcggcacaagcgtgacaatatgggcgtcttcatgagccaggtggcaggcggcttcgccaccgtatccatgccagccggcgtgggcccctcgttcgtcaacctgcagttcctgcgcaaatccggctatcgcaacacccaggcgaccgcaattatgagcgccgtgctcgtggtgtattacgccgtgtacttctccatgctggtcatcatcggcctgttcaccggccgcaacatgttctccggcgcaatcccgacaaacacgttggttatcgtgctgggcgttgtggtcgtggtgctgtccattgcgatgatgattccaccgttgcgccactgggtgacccgtcgtcttatgccgctggccaagacgtatatcaaccagctgctggacgtgctttcccagccccgacagctcacagtcagctgcctgggcgcgctgttccagaacgcgaccactgggctcgctttctgggcggccctgcaagcgttcggccattcatcgaatccgatcgaaacgacgttcgtcttcctgctggcctatgcattgggttccgcagtgcccactccaggcggtctgggcggtgtggaagcggcgctgacattcgcgttcgtggcggtcggagtgccgcagggcgtggcgctttccgccactttgctgcaccgcgtggtgttctactggctgcgcattccgctgggcgcggcggccatgaagtggcttgacaagcataatcttgtctgattcgtctattttcatacccccttcggggaaatagatgtgaaaacccttataaaacgcgggttttcgcagaaacatgcgctagtatcattgatgacaacatggactaagcaaaagtgcttgtcccctgacccaagaaggatgctttatggcatacaacaagtctgacctcgtttcgaagatcgcccagaagtccaacctgaccaaggctcaggccgaggctgctgttaacgccttccaggatgtgttcgtcgaggccatgaagtccggcgaaggcctgaagctcaccggcctgttctccgctgagcgcgtcaagcgcgccgcccgcaccggccgcaacccgcgcactggcgagcagattgacattccggcttcctacggcgttcgtatctccgctggctccctgctgaagaaggccgtcaccgagtgaccttctgctcgtagcgattacttcgagcattactgacgacaaagaccccgaccgagatggtcggggtctttttgttgtggtgctgtgacgtgttgtccaaccgtattattccggactagttcagcgcttccataagctgctcgaatcccagggtgggctcggcctcgaagggatcgaggagtatggcttcccggcgttcgggggcggtcagggtcaggtgggtccagtcggcggagaactgggctccgacgttcagggccgcgtccacgaaccggccacgcagggcggcacgggtgtcggtcggcggattgtgcacggcgtattccacgttgtctcctgtcagcagctcacgcatctggttgcgggctacgagcgaaccgtacaggcgaccgttggcgatgtcgtggtagtcgagctcaagctgttccatctgggcgaaggtgacgtccgggcgacggcgtttgagcgcgtcgaacagacgcttcttggcggcccagtccacgcggtcggcgagcgcatcgtatgcaccacgctccagcgcgtccagaacgcggctccactcccccataatcgtgtcgatcgtggtggccggcagcgaacttgccagcgcatcgccatgggtttcgatgaaggccttgaccgccgcataataccggcgctgcagacccagtgcggacacggattcgcctgattcgagcgtcagttcggcgcgcggattgtcaaggaatcgactgaccgtgcgattggcggcagccggatcagcaaaggcatactgctcgaatccggacggaacgccatggcggaaggcatcttcgatcgcgcacagcacaaggtgcgtgacggcaagcttcatccatgtggaccattgcgaacggttcgagtcgccgatgatcacatgcagccggcggaaggagtcggggtcggcgtgcggttcgtcgcgcgtgttgaccatcgggcgggagcgggtggtggacgaggagacggcctcgtccaggaagtccgcgcgctgggtgatctggaagccgtccggggtcatgcggccggcaccggtgtacagctggcgggtgatgaggaacggcagcagctggtgttcgatggtctccaacggcacgcagcggcggaccaggtagttttcgtggcagccgaaggcgtggccggcggagtcgacgttgtttttgaacacatggatcgtggcgtgtgcgccgtaggattcgcgcagcttgcgctgggccttcagggctaggttgcgcatcacgtgttcgccggcgaggtcctgggccagggcctcgcgcgggtcgcgcgcttcggcggtggcgtattcggggtgggatccgacgtccagatacagacgtgagccattggccagatacgtgttggtggagcgggaacgggagacgatgggctggaacatggtcatcgccacctggccggcgtccacggggcgttcggcaccggtgaccgccacgccgtattcggtttcgacgccgaaaatacggcagaacccgtccatctcggcggatggtacgggttccgtggcgtgcagggagcgggtgccgctgtcacgcagttggggcatcactcgccgcctttttgcacgaagctgttgacgtattcctcggcgttggtttccaaggcggattcgatgtcgtcgaggatgtcgtccaacacgtcggcttggtcggtggactcggtttgggcggcggcctgcgtggtggcgagggcgtcgtcttcctgggtcgcggcctgctgtgcttgaggttgttcgaattgttgtggcatgttgtcttctttttgggctgtcaaactcccctcagtcagccttcggccgacggctcccctcacccgaggggagccggaggagtcaaaaaattatcgctggttgatggagtcgagccacggatactgctgcaggtaatgctgcagttcgcggatgatgagtccattggaggccactacatcgttatcgtgacgccagtggatgcgttcgccgtcccaacggctcagcgtgccctgtgcctcccagaccactacggtgccggcggcgatgcccgcgatatcccacacgtgcagcatcggctcgaagtaggcgtcataggtgccgtcggccactttgcacaggtcgagcgagacggggcccacgcgcttgatgtcggccgggcgtccggcgagcgaggaggccacgtcgagcgcacgctgcgattcgctggggatgaaggacatgccgtagctcagcacagaaccatccagcgaggaggtcatcgacggcacgaccttgtcgcgcttctcgccgaccgcggttttgtggatgcgcacggcacccgctcccctggcggccagataggtcaggccgagggccggggcgtgcacgatgccgatgatcggcttgggctcgttgtccgggccgaattcgaacagggcggcggtcaccgtccattcgctcatgcgacgtacgtagttgattacaccgtcgatcttgccgatgtaccagtaacgctggccagggcggctttcggcggggcgggtggtccagaagccgtcgaagtgggcgatgtcggcgattctggcgctcatgaagcgcatgatcttgttgtccacttcaagcttgtagcgggggccacggtccgcgttctcggtgctcggctgggcgaggttacgcggattgagttggtcgtggagggcatgctggccggcttcttcgagcaggccggcgactttgagcgcaaggttgcgcaggtcccgtggggtctcttcgcgtgtttcttccatagctaccaagtctatcgttcggcgttgatggccagcgacttcagcagatcgatggcgtgttcggctgaattgagttcggtttcgcagtgcgccttggtgaaggcgagcggatcggagatgtcgagggagaacaggtgatggtcggtagcggccatatggccggcattgccgtagaattcgaccgcctcgccctcgtctgcggcgcgcgggtcgcgaacagtgagtcgggaccagctggcggcggccacctcatcgccgaattgcgccacgagttttgccctgagccaggcgcgggtgtcttccggcggttcggtggtggcgcgtgcgatgtcggcggcgctcaccacccgttcggtgcggggttcgagtttggtgaagatgctgtccgcggggtcgagcgccgcccatttcaggtcgatgaccttcagtcgcggatcattccatccgttggccacgccgggtgcggacgttgtggtgattttgcggcgcagtttttcgagcagctgccatttgagcagccattcgatgcggctggcctcgccggtcatggccagacgttcgtcatcgtcggcggcatggcggatggaggcgcagtcgatgagcgcctgctgccacatcgccataatggatgtggtggatttgtccggccaggcgggttcgccggcggtgtcggtaccttcgaccagtgcggcaacctggtagacggcttggcgcagtttgagctggataagccatgcgttggtttcgccgccgttggccagcggcaagattgcccccagcgtcaggtcgcgggaaacggtgtgtatggcctcgactgggtcagacagttcgagttcgtcgaggaaggcgttcaggtcgaatccggcctcgtccgcatgttcgagcagccacagcagcatgctcgtggtgccgagtttcagtgcctgcggcacctccatgcgattggcgtcgccgacgatgacgtgcagacggcggtatgcatcggtggagtgggattcgtcgcgcgtattgatgatcgggcgttcgaaggtggtttgcaggccgactttggcgtggatgtagtcggcgcgctggctgagctggtagcccgggatctcgctgttctcgccaatccctacgcggccggagccggcgtagatctggcgggtgacgaagtggagggtcatcaggcgtgtgaccaagtcgaatggcaccgcgcgggccatcatatagttttcgtgcgtgccccagcaggagcccttgccatccacattgttgcgatgcagggcaatgggagtgccagtctgtttgcgggcgcgttcggtggcggcctgcatgatgaggtctccggcgtggtcgtatcggaccgcttcgaacgggtcggtggtttccggcgccgagtattcggggtgggcgtggtccacatagacgcggccgccgttgggggcgatcacgttggtgatgttgagctgcggggcgtcggtgagcatgtccgggcgggcggcggcgcgttcgagacgggtgccgcgcgcgtcgttgaccgggtcctcctgccggtagtcccagcggatggatttgctgcggctgtccgcggcgccgttcaccacgtcgaaggacagttgcaccggattgtagcggtccggggtgttcagggataccgcgtattcggtttcggtgcccatcactcgtttaacggtcatgtagtgctccttgagcttgagctattcggcggtgcggatgcggcggatcgggtccatgccgttgatgcgcgaccattgttcggggtccacgtcggccatggaatcgcgggtctcgcggtattcgtcttccacggcggcagcgagcagcggcacggtgagcgccacgtccaagccggtttcgatggattccttgaccgctcgggtcttggcccggtccacgatgttcttgagcatcgcgccggagaccacgtcggccaggaacaacgcatgccactggccgttctcctcctgcacgtcgcatagatggcggcgttcggaggttccgtagatgtcatgcaccagcacggcggacaaggcgtgcgcgtcgacgccatcttccagaggcaggtcgtcggtgaggtaatggtccacgatggcgatggcctgattggttttgggccggccgacgcgaatcttgacgtcgagacgccccggtcgcaacacagccggatcgatcatgtccacgcggttggaggcaccgattaccatcacattgtcgagtgattccacgccgtcgagttcggagaggaactggggcacaatcgtggtctccacatcggaggagacgccggagccgcgggtgcgtagcagcgaatccatctcatcgatgaacacgaccaccggattgccgtccgcggcgcgttcacgggcgcgctggaaaatcaggcgaatcagtcgttcggattcaccgacgtatttgttgagcagttccgggcccttgacggacaggaacacgcccttgacatgggtttcggccggactgattgcgccgtcgccattcgaatcgtaaccaccctcgcatagggcgttcgccacggccttggcaatcatcgtcttgccgttgccgggcggaccgtacagcagcacgccctttggcggcttcaaatcgtagcgctcaaacagcgcacgatgctggaacggcagttggacggcgtccctgatacgaccgatctcactatccaggccgccgatgtcggcgaacgtgacatccggggtctcctccagcaccagatccttgtcgccctcggcgggcagcacttcgatggcgaggcggacggacggatcgacgataatacggtcgccctgattgatgcccgcatacgcgagcgcgccggaacggcggatgagcacgggattgccggaggcgtcggtaacgatcagtcgaccgtcgtcaagtacctgcttgacactgcgaatctggcccacggtgtcagcatcgcgctgctcgaccagcacgagcttctcgttgagcatcacggtggccccggcggtcaggcgggcggcgttgacgttggaggccacaggcaccaccatgcggcgggtgccggaaatgacttcggccgacgcgtgctggatgccgtcttcatcggtgcgggtggaatcgaccttgaccatggtggcgaaggtgagcggcggctgagcgagctgggcgagctgtgacttcgccttggtcagttccttgccggcgcggctcagcgcttcggcgagcgcatggttcttggccatcaggcgatcgttcagcgcggcgagatcttcggtgtcgctcatgcgggttcttcgcttcccttctatccgggattttcggcaacttatggcagtcggcagaccctattcgttgccgtcggcggatttcctgttacgtataacagtacgcacttttcgcaccacgaaccatacgatgatcacaatcacggccgcgatgaccacgtcctcgaacacgccgagcgcgccttgaatcgagcaccactggtcgccgagcaggtaaccggcggaaacgaggatggtgttccacacggccgagccgagcagggtccagccggtgaagtgcaggaagttcatgcggttgaatccggcgggaatcgaaatcagcgagcgtaccacgggaatcacgcggccgatgagcaccgaccatgtgccgtatttggtgaaccagtcgttggctttgctcacgtctttgcggctgacgccggggattttgtctgccgcgagattgatgcgatgcaggcccacccagcgggagatgccgtacaaggtccaggcacccagtacggagccgatggtggcccagatgattgcgcccggcagactcagggtgccgcgtgcggcggtgaagccggagagcggaaggatgacttcggacgggatgggcgggaagatggattcgagggcgatggccaaggccacgccgataccgccgatggtttccatcagcatgatcagccagtcggtgatggtgccgatcaggccgggttcggtggtggtgcagatgggtgtggggtcggtcgcaagaatagtggcggctgccatggaaaaactcatagagggcattgtcccaaggttttcccagaatcagaagcatgacgcaagaagatgtgcattttgttgacaagtccgccgagagcgaagttgggagcccggctgattctgcggtttctgtgccgacgctgagcaagcccggcctgctggttatggatgtggactccacgctcattgacgaagaggttatcgacgagttgggcgtggtggctggctgcggtgaggagattgccggagtgaccgcacgcgccatgcgcggcgaactggagttctgcgatgcgctgcgcgcacgagtggccctgttggagggcctgccgatctccgtgttcgacacggtgcatgacaagctgcatttcaccaagggtgcgctggagcttatcgacacgctgcatgaacacggttggaaggtcggcgtggtgtccggcggcttccatgaagtggtcgatatgctggcggccgagggccatatcgactattggattgccaaccggcttgaggttgccgatgggtgcttgaccggcaaggtgctcggcgaaatcgtgagcaagaccgtgaagttgcacgccttgcagacatgggcggaccgtttgggtattccgatgagccagaccgtggctgtgggcgatggcgccaacgatattccgatgattcaggccgccggcctgggtctcgcgttctgtgccaagccaaagacccagctcgccgccgacaaagccatcaacgaccgcgacctaacccacgtactcgattacctgcgccggtaaaattttaccgacctcggctccggcacttatagttgagccatgactacttcaggcgcagaacagttgacgcttgcggggctggctccccgcaagcggcgtaaacgtgcgcctgcggagcatacgccggccgagcagcatcccatagcgcaagtcgtgttggatgtgcaggcgctccacctcggccagacattcgattacttcattgatgaaaaagacagcgaggccgcacagccgggtgtgctggtgcgcgtgcggtttggcggtcaaagggtcagcggcgtgatctgggcacgcaccgataccagcgataccccgcgctcttcgattcgctatatcgaacgggtgttgagccccgatgtgctggttcccgcttcgatgcgtgaggatatcggtctgattgccaaagcctatggcggcacacgggccaatattctgcgtttcgctgtgccaccgcgcgtggccaaggtggaggccgaacagcggttagccgcgtcgttccgccgaccggtcggcggctccctaccagataatacgcaaggcggttttgccgggcgtggcaccaatcccgatgggaccatgcctgctgactctacctttgccgttgccagtaccgtttcggagggggctgcgcaggggtatcgtcgtctgaccgccaattacgccgacgtcaatgtgcttcatgatgcgcttaccggtcagcgtttccgatcttttgtgtttgattcgctgcccggtgcacaggagtggcaacggaacatggcatggatggtggccactgcgctgagtgccggtaaagctgccgtggttgaattgcccaccatgcgcgaggtcgaagacctgatgcctatgctgcgcaattatgggctcaaaccgttcgcccctgctccggccggcggctgggtgggcgacgtcgccgtgcttaacgcggagaccatgcccgcggccgaccggtatcgcacctatctggctgtggcgttgggacaggtgaaggtggtgatcggcacccgtgcggtgatgtatgcgccggttgcaggcccggcgctgttcgccattctggaggatgccgcctatcagaacatggacggtatgatgccatatccacaggcccgtggcgtgatgcggctgcgcgccaagtcccatggcggcgtgttcgtggccatggccaatgcgcgcaccccgcaaagccagtgggaaaacaccggtccaggtacagtggagaccccagtgagcggctattccaccacaattcatccgctcgcctcgccgctgaaggacgccactccttgggtgcgttggctcaatcgcgatgaacttgcgcgtcttgccgacccgtccatcggggcgcgcgtgccgcatacggccgtccgcgtgctatctaaggctttggagagcggccccgtgctgctgtccattccgcaagacagcgtcagtgagactctgagttgtgcgaaatgccatcgtcaggcgcgttgtgccaagtgttctggaccgttgcaactaccggccgaccgccgggattccacaccgcgatgccgctggtgtggggctgctgccatcaattggaagtgcccgggctgtgggcatgaacgtatgcgtgtggtgcgcgtgggtgctgcaggcactgcggctgaactggccgggttgttccgcggcgtgccagtagttttgtccagcaagacgcagggcctggtgcgcgatgtggcttgtcagccgatgatcgtcatcgccactcccggtttcgaaccgcgcgtgcgtccggtcagtgccgagcagggatcggctggccatgagtatcgtgccgtggccgtgctcgacgcttggaccagcttgtatgcgttgggcgtggatgctcgcttggatacattgaccgcgtggatgcgtgcggtgtcgttgtgcgcgccgcgttcccgtggcggccaggcgttgattctcggcgaaaccgacccgtccatcgcccaatcgctgatgctctgggattcgaggattcttgcagccaaggatcttgaggagcgtgtggagaccggtatgccgccggccgtggccgccgcctgcgtatggggacgccgtgatgcggtgatgacgctgatgcagcgtatcggcgcgctgggcggcgattggacggcctgcggcgagctgcccggcatgttgggcccggtgccgatcgcgcaaccggacacggtcgacgcccgggaactcgaagccacggccgaccgggtgaaggcagtaatccgtgtgccgcagagtcgacgagccgagctggcggcccgactgcaccgggaaaccgctcgtcatgtggcgtcccgcgaacccggcgagcttcgcttccgagtagatcccaaggacctgatctaatcgtcttcaacacgtgaaacgataattacagaatgaacatcgctagaaggaggacactatgaagggttggcctggagagccggatatggattacgacgtgctggtcgcggatggcgaggccgctgcgaacgccggcaagccgatcaccgacgtgatcttcgatttcggcaacgtgctgatttactgggatccggtcgccgtactcatcccccgctacagccagaagaccatcgacgaattcctcgacaacgacatctccggcttctacgatgtcaacgacctgatggacggcggcaccagcaccgacgaggccatcgccatcatgcgccgtgacaagggcgataagtgggcggacatcctcgactactacatcaagaacttccgcgactccctgaccggcatcgtgccgggcgcgcgcgtgctggtcaatgacctgaaggctgccggcatcggcgtgtggggcctgagcaactgggaatccagtctgttccacgtggccgaggaacagtgcgatattttgcagcagcttgatggcaagctcgtctccggttttgtcaagctgcgcaagccgcacaaggaaatctacggggccgcgttgaaccagttcggcatcaaggccgatggcgcgttgttcatcgacgacaaggccatgaacatcgtcggctcgaatgcggccggcatccgtggcgtacgtttccaggatccggtcaagctgcgtgaactgctcatcgccaatggcgtgaacattccggccgtgcagtgagcatcgacatttcaaggaggaccatgctcaaactcgtgttcgccggcacccccgacgtggcggtgccctcgctcaaggcctttgccaccgatccacgttttgatgtggtcggcgtcattacccgccccgatgcgcctaccggtcgcggccgcaagctcacgcccagcccggtcaaggctacggctctggagctcgggttgcccgtcatcgatctcaaaccccgctcccccgaattcatggaggcgttgaacgacctgcatgcggatatcgccgctgtcatcgcctatggcaatatcctgcccaagaacgtgcttgatgcggtgcccatgggctggtacaacctgcatttctccaacctgccgaagtggcgtggcgccgctcccgcccagcgtgcgatttgggcgggcgacccgaccaccggcgccgacgtgttcaaggtgggcgagggtttggatgatggcccgatcgtcgcttccctgaccatcgaactgaccggccgtgagacttccggcgaactgcttgaccgtctggccgaggaaggcgcgcccatgtatgtggatgcgctggccgccgtaggtgaaggcaccgccacattcaccgcgcagccggccgagagcctggaatacgcgcacaagatcacggtgaaggacgcccgcatcagttggacggacgaggccgaggccatcgaccgtcagattcgcgcctgcacgccgcatcccggggcatggaccgaactgtttgcggaagggccaatcgccgataatgacgagtcaaccgctaaatccctcgccctgcatattctcgccgcacaaccggccgaccagtccaatcccaacactccggccgagcttcagcccggcgagctgaaggtgggcaagaagaacgtgtgggttggtaccggcagtacgccgctggaactcacccaagtcaaggcgcaaggcaagaaggccatgcgcgccgccgactgggcccgaggcgcacgcctctcccccgccgcctgcgtgcgataacaagcaatatcgctcccgccttcggaagcacagtaaaggcccggcatcttcataaagaagatgccgggcctttcagctatgcaatcggcgatcagttgagaccggagagcttgttgatcagctccgggtcacgcgtcgcacccttgtcggccgagcgggcgaaggcggcgtacgccttcagcgcctgggagacgtggcggttgcggtgagccacgtagccgtcgccagcctcaagctcgcgacgacgctcgtccagctgctcgtcagtcagttcgacgttcacggaacgggcttcgatatcgatatcgatgatgtcgccgttcttgatgagcgccaccgggcccttgttggcagcctcaggcgccatgtggccgatggccagaccggaggaaccgccggagtagcgaccgtcggtgagcatggcgacctgtttgccgatgcccttgcccttgacgaaggaggtcgggtacagcatttcctgcatacccgggccgcccttcggaccctcgtaacgaatcacaagcgccatgccaggcttcagggtgtcgttcagaatgacctcgatggcctgctcctgggagtcgaccaccagagccggtccacggaacttccagatctccggcggaacaccggcggtcttgaccacgcagccgtcgggggccaggttgccgcgcagcacggcgaggccgccttcgtgaatctccgggtggttgatgtcgtggatggcgccgttggtgcggtcgcggtcgagcgagtcgaacagggtggtgtgcgtccacggctccggggagatgatgtggccaggagcggccttgtacatctgctgggcttcctcggtgcaggtcgggcgcatgatgtcccaatcggccagcttggcttccagcgtcgggtagtcgatggaatgcacgttggtgtgcagcttgccggcgcggtcgagctcgccgaggatgccggtgatgccgccggcgcgatgcacgtcggaaatctcccacttgccggacggcgaggccttgcagatgcacggcacggtgtgggaaatacgctcgatgtcgtccagggtgaagtccacgtcggcggactgggccatggcgaggatgtgcagcacggtgttggtggaaccgcccatggccacatccatggtcatggcgttctcgaaggcttccttggtggcgatggagcgcggcagcacggaatcgtcggaatcgtcgtagtactggtgagcgatcttgacgacttgcttggcggcacgcttgaacaggtccttgcggtaggagtgggaggcgaggatggtgccgttgccgggcagagccaggccgatggcctcggtcaggcagttcatcgagttggcggtgaacatgccggcgcaggagccgcaggtcgggcagacggtcttctcatagttgagcagttcctcatcggagacgctgtcgtcagcggtggcgtacatcacgtcgataaggtcggtgctcttgactgtgccgtcggcgagcaccgtggtgccggcctccatcgggccaccggagacgaacacggtcggaatgttgaggcgcagggctgccatcagcatgcccggcacgaccttgtcgcagttcgggatgcagatgagggcgtcggcgcagtgcgcgttgcactgatattcgacggtgtcggcgatgatgtcgcgggaaggcagggagtagagcatgccagtgtggcccatggcgatgccgtcatccacggccatcgtgttgaactcgcgcggaatgccgccggcttccttgatagcctcggaaacgatgcggccgaccttgttgaggtggacatggccgggcaggaactcatcgaacgagttggcgatggcgatgatgggcttcttgcccatgtcgtctccgctgacgcccgcagcacggtagagggctcgggcgcctgcaaagacgcgccctgacataatttttgcagatcgcatttcagtcatggttctattcaagcctttgcgagggacacgccatttgtcaagagtcgaataatggaatttgcaaaaacgtaatgtttctcacacatttttttggaatacattcctctggcgagagtccggtatagggctgacagaagtccccccaaacggctacacttgcttcggttgagatagattttccaatgtttggagataagaacaatggcttttggtactgacccgacacccgacggtcttgcgaacccgccgatcgacgatctgatgaagcacgccgattccaagtacgcgctggccattttcgccgctaagcgcgcacgccagatcaactcctacttcacgcagctcaacgagggcctgctgcagaacgtcggcccactggtcgaataccagaacaacgagaagcctctgtccatcgccttccgcgagatcgacgagggtctgcttgaggagaccttgggcgaggacgacgccaacgagggcaactgatcgattcagacgattcgtttggattgtttggacagttcgtcgccgaatgatggtgtgagagttctctcacaactgattttgagcgacacgcttgcctgagttatcgcaatcagctataactcatcatcaggagcgaacaagacgtaaggctcgagccaccgcgctggttggcacgagcctttatttatgcccgcttccgcagtgacaagtaaaaattgacaccgtatcattgtgcctcgcatcccgcggggcgataagtcctgaagaaagggatgatatgacagaagaacatcggcttatttccgccgaatccgtgaccgaaggccaccctgacaaggtctgcgatcaaatctccgacgccattcttgatgatctgctggcccaggatccgtccagccatgtggccgtggagacctccgccgccaccggtgtgttcctggtcttcggcgaagtcacgtccaaggggtactgcgacgtgcagtccaaggtccgcgaaaccctgcgcaacatcggctacgcctcctccgaagtcggccttgacgccgattcctgcggcgttgtggtggccatcaccgagcaaagcgccgaaatcaaccagggcgttgcccgtctgactggcgatcaggagaccgccgccagccgcgaagaacgttacgaagcacagggtgccggcgatcagggcgtgatgttcggctacgccaccgacgagactccgacgctgatgccgcttccgatctatttggcacatcgcctcgccttccgtctgaccgaggtccgcaagtccggtgaagtgccgcacctgcgcccggacggcaagacccaggtaaccattgagtatgacgataacgataagcccgttcgtctggacaccgtgctgatctccacccagcacgatcctgaggttacgcaggattggcttgctgttgagctgaagaagcacgtgattgacccggtgcttgatgaggtgctgggttccaaggtgccgcatgacaactaccgccagctggtcaacccgaccggttcgttcatcctgggcggcccggcggccgacgccggtctgaccggccgcaagatcatcgtcgacacctacggtggcgccgcccaccacggcggtggcgcgttctccggcaaggacccgtccaaggtcgatcgttccgccgcgtacgccacccgttgggttgcgaagaacatcgtagctgccggcttggctcacaaagtcgagatccagatcgcctacgctattggcgttgccgacccggtgtccgtcaacgtggagaccttcggcaccgagcaaggcgtgacgcgcggccagatcgccgccgccgtgcgcaaggtcttcgatctgcgccccgctgcgattatcgacgagctggatctgaaacgtccgatttatctgaagaccgccgcgtatggtcacttcggccgcacggacgttgagttcccgtgggagaagaccgacaaggtcgaggagctcaaggccgcgattgctgcggagtgaggtgctctaattaggacagagagatcataagaataccataagaatagggtgctttccgctgttgatggcggaaagcaccctatttgtttttcgcagtgtcctacgaatctgttcttatttcaatccacgcaccccagtggggtgcgacctcaatggcatggccggtatcatcggcggcagcttatttcaatccacgcaccccagtggggtgcgacacaggcgttgaacgcatcctgtttgagcacggtgaatttcaatccacgcaccccagtggggtgcgacgcggaagccaaggcgcggtaatccaatactgggacatttcaatccacgcaccccagtggggtgcgaccacgtcgagcgcactcttgacctcgggcgagcaatttcaatccacgcaccccagtggggtgcgacgatacagcgagtccacgtcaatcttccacttgcgatttcaatccacgcaccccagtggggtgcgaccgctggcccagaagtcggttcgcatgctgtcggtatttcaatccacgcaccccagtggggtgcgactaaatccatacgggatccgtgacgtggcggtatcatttcaatccacgcaccccagtggggtgcgaccatcccgaccatcgaatttttcgcgcacgaaatcatttcaatccacgcaccccagtggggtgcgacgagcatgtgctggcgatgtgcgagccgaccgtgctatttcaatccacgcaccccagtggggtgcgacacggttgcgccgttttcgaccatctgcgctacgatttcaatccacgcaccccagtggggtgcgacggtcaactcaaggacgggtatcgccccaccgttatttcaatccacgcaccccagtggggtgcgacttcaccatactcccggacggcaaattcacctaccgatttcaatccacgcaccccagtggggtgcgacaagcgctaggcatcaaaaacctaccattgaaaatgatttcaatccacgcaccccagtggggtgcgacccgacgcccgccgtacatcaaaccttaccgctcaaatttcaatccacgcaccccagtggggtgcgacgacatgctgtttccggcgtttttcagctgttcgttatttcaatccacgcaccccagtggggtgcgacgtatctgcctgaccgaaatcacatcaatcatggaatttcaatccacgcaccccagtggggtgcgacttcccttacaccgccgcgctcggcaacgtgtacgaatttcaatccacgcaccccagtggggtgcgaccatcagcatcaccgaaatcagctcgatattggaatttcaatccacgcaccccagtggggtgcgactgtatagggccatgttgagaaaaacggtagatatgatttcaatccacgcaccccagtggggtgcgaccagcggccttcgcggtcgtggcggtttcgtcgaaatttcaatccacgcaccccagtggggtgcgactcaccgtcaacatcccaatcaacgtcacccacagcatttcaatccacgcaccccagtggggtgcgacataacgcgatattcaacatttgcgaatatgccacacgtcgctcatcggcttcaacacgttatttcaatccacgcaccccagtggggtgcgactagccgcaacagcattattccaacaatgcatcaacatttcaatccacgcaccccagtggggtgcgaccggattggctggagcgcaacttaccagggcgtggtgacatttcaatccacgcaccccagtggggtgcgacacgaccggtataccgtccggcgcgttgaaatcgggatttcaatccacgcaccccagtggggtgcgaccctctggatcgtgtgtccgtcaagggtgacggaatttcaatccacgcaccccagtggggtgcgacgtgccgcgtaggggccgtcctcgggccacacatccatttcaatccacgcaccccagtggggtgcgaccgcgcgttttcaagcgcctgaattacctggtcggtatttcaatccacgcaccccagtggggtgcgaccaacccgtattttcggcattatgacgtgccgttgatttcaatccacgcaccccagtggggtgcgacatacaatgacgcgcaatacacgcgctgttgcaaatttcaatccacgcaccccagtggggtgcgacgacattaaggaggccgtcatggtcgatgaaacggaaatttcaatccacgcaccccagtggggtgcgaccaacgggaagcgcaaggcaagcccggaaagagcaatttcaatccacgcaccccagtggggtgcgacggcactatttggactgtgccaaatatgagactcgatatttcaatccacgcaccccagtggggtgcgacgaccctctggatcgtgtgtccgtcaagggtgacggaatttcaatccacgcaccccagtggggtgcgacacaggtcaacaacaactgcctcgtgtccggcgtatttcaatccacgcaccccagtggggtgcgactcgagggagacggagttggtgtttccgccacatgatttcaatccacg

SEQ ID NO: 2597 - DNA, 103184 bp, Unknown
  R222_15m  MAG No. k141_11693
cttctacacgtcgatcacgttcaacccggacgagaccgcggacaacatgaagcagtacggcggcttcatccccggcatccgcgccggcaacgccaccagccgctacctgacctacgtgatgaaccgactcaacaccgtcggtgccgtctacctgctgttcgtggccctgattccgaccgtgctgatcatggccctcggactcaacgccaagctgccgttcggtggcaccacgatcctgatcatcgcgggcgtgggcctcgacaccctgcgtcaggccaaggcccagaccgaacagttccagtacaccggcttcctgttcgaaaacgtggaccacaaagaaggctgacgcccgcttggcagcggtcgcccgcaatgggcaggcggccgcgcgaggagttccacgacggagcaatctttcttccacatataactcaatggctcccctaaccaagggagccaaaaccgtattaataaccgacacaaaaggagaccactatgcgtctgctcatcatgggcccccagggcgtgggcaagggcacccaggctgctctgctcgccgagcacttcaacatccccaccatctccaccggcgacatcttccgctacaacatcaagaacaagaccgaactcggtcttgaggcgatgagctacaccgacaagggcgagctggttcctgactccctgaccaacaagatcgtcaaggatcgtctggccaaggaagactgcaataacggctggatcctcgatggctacccgcgtaacgccgcccaggtcaccgctctcgacgagatgctcgccgacttcgacactccgctcgaccacgtggtggccctcgaagccgcccgtgacgtgctgctggagcgtatgaagaagcgcgccgccgagcagggccgcgctgacgacactccggaggccatcgccaagcgcctggagacctacgagaaggaaaccgctccgctgctcgacatctacgaatcccgtggcctgctcgtcgtggtcaacggcgtcggcgacatcgacgagatcagcggccgtatcatcagccacctcgagtagtaggttcggcagcccggccaacaagccggagtgatgccgaaataccacatcaacgtttccatacccctgtgcgacacgccgagtgttcgtacaggggtatgtgcgtatatagttgacagttggtgtgtcttcggatatgccatagtaatcatccaacggaataggactagaggcacatggcaaaagacggtgtgattgaagtcgaaggacaggtagtggaagcactgcctaacgcgatgttccgcgttgaactcgagaacaagcacatcgtgctcgccacgatttccggcaaaatgcgtaagaactacattcgtattctgccgcaggatcgtgtcgtgctcgaaatgagcccttacgacctgaaccgcggacgcattacgtaccgttacaagtaaaggtacacaagaaaaggataaccatgaaggtcagccctagcgtgaagaggatctgcgaaaactgccgcgtgatccgccgtcacggccgcgtcatggtgatctgcgtcaacccgcgccacaagcagcgtcagggctgagagcagattctccagcggcactaagtaaataaggcactctctcacagtgcttcccgcaagggaacgacactgaaccacgggtacgtaggcccgtgccgggtatccgggcgagcgggtgcaagacctacggcaacaagaaggaatcgcaatggcacgtcttgccggagtcgacatccccaatgagaagcgcatcgagatcgccctcacctacattttcggtgtgggtcgcactcgtgccaaggaaacgcttgccgcgaccggtatcagcccggacatccgcgtcaaggatctcaccgacgagcagctgattacgctgcgtgactacctcgaagccaactacaagatcgagggtgacctgcgtcgtgaagtcgatgcagatattcgtcgcaagattcagatcaactgctaccaaggccagcgtcaccgtaagggacttcctgtgcgcggtcagcgcaccaagaccaatgctcgtacccgcaagggcccgaagcgcacggtcgccggaaagaagaaggccaccaagtagtcggtggcatgattcgggccacgggatgatttcatcccatcgcccgaacgtcaacaacaaagttcgttactaggaaacgagggtcaatggcagcgcctaagcaagccgctcgtaagccccgtcgtcgcgaccgcaagtcggtcccggtcggccaggctcacatcaagtccactttcaacaacacgatcatttcgatcaccgatccgtccggtgccgtggtgtcctgggcgtccggtggtgatgtcggcttcaagggctcccgtaagtccacgccgtacgccgctggtatggctgccgagtccgccgcccgcaaggcgatggaacacggcgtcaagaaggtcgacgtgttcgtcaagggcccgggttccggtcgtgagaccgccatccgttccctgcagtctgcgggcctcgaggttggttccatcaccgacgtcaccccgcaagcccacaacggcgttcgtcctccgaagcgtcgtcgcgtctgagcactcagcaataccaaatccatccaaaaccgcctgaccggtgagtgcaccaccgagttcaagctgaaaggataaccacagtgcttattgcacagcgtccgactcttaccgaggaatctctgaatccgcagcgctcccgcttcaccatcgagccgctcgagcctggcttcggctacacgctcggcaactcgctgcgtcgcacgctgctgagctccatcccgggtgctgccgtgacctccgtgcgtatttccggtgccctgcatgagttcaccactctgccgggcgtccaggaagacgtcaccgagatcctgctgaacatcaagggcatcgtgctcaccagcgaatatgacgagcctgtggtcatgtatctgcgcaagagcggcaagggcgaagccgtggctggggacatcaccccgcctgccggcgtcactattgccaacccggagcagcacatcgctaccctcgccgacgatggcgaactcgagatcgagttcactgtcgagcgtggccgtggctatgttcctgcccagatgaacaagcaggacaacgatgagatcggccgtattccggttgattccatctactccccggtactcaaggtgagctacaaggtcgaggccacccgtgtggaacagcgcacggacttcgacaagctcattctggacgtggagaccaagcccgccatctccccgcgtgacgcggtggcttccgccggttccaccttggtggagctcttcggcctgtgccgtgagctcaacgcccaggctgaaggcgtcgaggtcggtccggccccggtggccgaggagaccaaccccgagatggccgttccgatcgaggacctcaacctgacgcagcgttcttacaactgcctcaagcgcgagggcatccacaccatcggtgagcttgtctcccacaccgagcaggacctgctcgacatccgcaatttcggtatgaagtcaatcgatgaggtcaaggagaagctgcagaccctgggcctgagcctcaagtcctcgccgatggccttcgataccaataatctcgaaggtggtacgttcttctcgccggaagacgagtgatctgcctctttgaccaatcgttcgttcactaggcaagcggatgttcgggcatatgcccacctgcttgcctgaagaacggacatataaggagtaaacccaatgcctacacccaagaagggcccgcgtctggcttccagccccgcacacgagcgcctcatgctggcaaacatggcgaccagcctgttccagaacggccgcatcaccaccacgctgccgaaggccaagcgccttcgtccgctggccgagcgcctgatcaccttcgccaagcgcggtgatctgcactcccgtcgtcgcgtgatgcgcgtcatccgcaacaagtccgtggtgcacattctgttcacccagattgccgagcagatggagcagcgtgaaggtggctacacccgtatcgtcaagatcgccccgcgcgttggcgatgccgctccggccgctgtgatcgagctcgtcaccgagccggttgccaagaaggctgttgtgaaggaagctgaagccgccgccaaggttgccgaagaagaggcttcggccgttgaggctccggtcgaggagaccgccgccgctgaggctccggtcgaggagaccgccgccgctgaggctgaggctcccgctgaggaagccgctgacgccgagaaggccgagtgagctgaatagcgtttcgccaagctagctgaaagggctggaatccgtttgggttccagcccttttgcgttgtttcatagaaactacaacgtacgtacggctcgaatggcctcggctcttgcggccagctgatcatcgacggggtatgcgatatgctccaaagtcaggccctgcggcgcaatcggcccgcttgagccttcacgcactggctcggccattttgccggcaaaccattccagagatttgcgtcccgaaccaactttgatgcatgagccgaccaaggagcgcaccatattgcgggcaaaggcgtccgccacaatcgtgaacaccgccagtccggactccagcgacggagtccgatatgcttcatgcgatgccatcgcatccggcaccaggggagtgatcggcacccgccgccaataggcggtcttgacttcgcggatcgtagtgcctcccggattcggagtggcgaaggaaccaaaatcgtgcaggccgatggtcaatgaggctgcgcggttcataagctccagatccagcgattcatccacggtaagcacgcatccacgcaggcgcgggtcgatctcggacgaacgatcggcgacccgatacacataagtgcgctccaatgcggagaacctggcatcgaaaccggccggtgccacggcaatgccatgaatgacgatgtccgaaggcagcacagccttgagtctgcgagtcagcgcctcggtgaccggaatggtcatgtgacctacgcagcgattcagtacctcatcggatacatccaaatgcgccacttggtgggaggcgtgcacaccggtgtcggtgcgcccagccaccgtcagacgcaacggttcggccgcatcatcggccggcacccgcagcaccttgtgcagcgcatcttcaatggtgccttgcaccgtacgcagattgggctgtttggcccagccatagaatccgccgccgtcgtaggccaagtcaatgcgcagtcgtgtcatagccattcattgtaacgagtgcggtcggcgagatgcgcgcggtcggcgagacgagtgcggtcggcgaagtgacctgcctgtaacattctcgcgcgtttgctgaaacggggccgccttaggttgtaaccatcaaacccggttacggcttgcggcgtcagcgtgcgctcgaaacgcctaaccgcttgaggccacagaagccgccacagcaaggagcaggcacgatgatcgaatccgcagcacgcagactggcccatgaactggtaaaccgtcgcgaggcgatcaaccgcgagctgtcccgcaacggcgtacgcttcggcatctacaagaacggcgaataccatgaccggctcttcccgtacgatcccgtgccgcgcattatcgaatccgacgaatacgacgaattggagaagggcctgaagcagcgcgtcaacgccctgaacgcctatctgaaggacatctactccgacaaggccatcatccatgacggcgtcgtgccggaggaatacgtatacacctcggccggctacttcccgcaggtcaacggcgtgacccctcccggcggcatcttcgcgcacatcgccggcgaagacctggtccagggtgaagatggccgctggtgggtgctggaagacaacctgcgcatcccctcgggcgccagctacccgctgttcgtgcgcgacatcgagcgccgcatctccccgcgcctgttccgcgacgtgcacatccgcgacaatcgcgaatacccgcgcctactgcgcaaggccatggactttgtgtccactgagggcatcgccgtggtactgacccccggccgctacaattccgcgttcttcgagcacgcctatctggcggagaaaaccggcgccgcactggccttccccgaagacctcgaagtggtggacaacaaggtctacttcctcgactacgccggcaaacgccaccgtgtgggcgtggtctaccgccgtctgtccgacgaattcctcgatccgtttgccttcaatcctgattcggtgatcggtgtgcccggtatcctgtccgcctaccgcgcgggcaacgtggccatcgtcaacgcgccgggcaacggcgcggccgatgacaaggccatctactacttcgtgccgcagatgatcaagtactatctcggcgaggaaccgattctcaacaacgcgcccacgtatatgccgatgttcgaggccgaccgtaaggaagtcctgaatcgtatgggcgagctggtcatcaaggatgtggccgaagccggtggttacggcgtggtgttcggttcgtcgctggatgctgccgcacgtgaggagcttgccaaccggatcaaggaggagcctcgtcgattcatcgcccaagaggtgattcagttccgcgatatcgatgtggtggacccgaagaccggtgagatgtcgccgcgcaaatgcgatttgcgtgcctttgtggtcaccggcaaaaacacgcacgtgtggtattcgggcttgactcgatactcgtcggtgcccggccagatgatcgtcaactcgtcgcagggtggcggattcaaggatacgtgggtgttggcacccgaatccggcgtggagcatgaatacggtgctgaagtgcaggtggcgaacctgctgagccagtcccgccgccactcgttgtctctggtcaccgcttccaaggcagacaacctgtattggctgggtcggtacaccgagcgcgccttcaccacgctgaaccagttcttcccgttctacgatcgtgtgatggacaccgatgtggacgccttccgtccgttcgctcacgcactcgacctgcccgaagatttcgaggacttcgacgggttcgtgaacagcttcctgtacgacgggtccaaccctgattcggtgcggtcggccgtaacctccgcattcaacaacgccgtgattctgcgcccggaattgagctcgcgtctgttgcagtacgtggagttggcgatgaccaatatcaccgatgccgccaaatacgcggccgacgccgaggacatctacaagcagcgcgatattaccgatgacatgctcgccttctggggcggcatcgagaattcgccggtcgaccccacgctgaaggcgttcatcttcatcggcaagtatcttgagcgcatcgacctgtacacgcgcttcggcctgacgatggaggagatggaagccccgcttaggaagctcgcctcctactcgatgatcctcgacggcatgccgttgcctagttgcttcgccgatgggctgagctggctggtcggtcagctgccgtctcgcgggtatcaggaagtcgccgacctgctgaagaagtaccttgacgattattccggccgtgtcagcgccctggccatcaaagacatgggctcactgagctccatgaacatggatgccaagcgcccctaacccgacgttcgtcctgacgggttcaaatgctatggtggtatggcgaaaaaccgtgcgcccgagtgccggccgatgcgtatcggcgaattgccggaatatatgcgtggactgtgagcgcgcggaccatacctcagccatggctgtagtgtcgttatcccgagaatgtgccggttgccggctcgtgtgtaagtgcaggagacgttgtgaaaaaactcgtgttcgactatgagatgaagctgtccttcagcgcaccggtcaccgatcacaggttccagcttcgctgtattcccgccactggccctcgccaacaggtgattgacgtggaagtgaagattcagcccgaaaccgaactcgaaaccaccatcgactcctttggctccgtggtgatgaccggattcatccccgagccgcacgacatattcagctattcggtgaccggcatcgccttcgtggacaatgcgcatatccataaggaagcctataaaccgctgtaccgattcaattcagcgctcaccattcccggcccgaacgtggaggcgatgatcgacgtatgccgcgaacgcttggctgcgttgcctgccgacgccactccggtgcagcaggccgccgaagtgatggatgaggtctacaaggcgtttgtgtatacgcccggttccaccacgattcgcaccaccgccgaacaggccttggcccagcgcaagggcgtatgccaggattatgcccatgtaatgctgtccgtgtgccggcatgtgggattgaccgcgcgctacattgccggtttgcttgggggagagggcgcgacccacgcttgggtcgaggtgtatcaggatggccgatgggtcggactggatcccacgcataaccgattggtggacgacagctacatcaccatcgcccacggccgcgattaccgcgactgcatgctcgacatcggcatcttctccggctacaacgtccagcagacccaatgggtcaatgcctccgtccacgaacaggtggcgtaaacaaaattccaagccccctctgatgagctgagccgtgaagaaaacgccggaggcgtttttaggcgaaggcgaatgacagtgagcaaataaaatggcagctggaaagctgtccttaaattgcgttcgagctgtcgagcgtagcgagactgagagagaccgctcaatgcagagtggccccgtcaccgcttctaccaccaccaatattcggattttcgtcgttgcaacattcggattttggtagttgagaaattcggattattgcgatggcggacgtgaaacaacgggaggtgcgcggaatggccgattctctggcgagcgacatcaagccgaaagcctatcgccctcgtatcgtggatgagtggcaactcgctccagctatatgggatgaagtccgtcatcgcgtcgacgatgattccgcgaataaaggtcagtggattctgaccggttcatccactcctctcaatgagaatcggccgaaccatagtggtgcgggacgaatcggacgtatccgtatgaatcctctgactttatatgagtccggactctcgacaggtgcggtaagtctcagtggactgtttgaacataagttcgccgctgcaaaatcagagataagtacacaaatgttgttggatgccgtatgccgaggtggatggccggaggcggtggctctgcctgtatctgacgcacagattctgattcgggaatacatgcgactcacgctgactgagagtgtgcccaggcaaggcaaggatcctgatgtggctcgtcgtctgctggattcgcttgcgcgcaatatcagtcaagctgtgacattcaaaaccttacgtaaggatatgtacggtactgaagaaaaccttgacgatttcatttcggagagaacagtatccgggtatacggccatgttcgagaacatgttcgtcatcgatccgataaagggctgggtcccgccggcacgggatccaaagcgactccagaccaaggcgcgtcggtattttgccgatccttccattgcggccgcaatgttgggcatgagtcctgctgctcttatcggcgattggcagacttttgggtttctgtttgagaatctatgcatccgtgatctgttggtgtatgcgagatctctcctcgatattgggatagaaccggttcggtattatcgtgacgattccggtctggagtgtgatgccattattgaattgtccgatggacggtggggcggcatcgaaattaagtccagtgaggataaagtccctgaggcatcggcaaatctatgcagactgaaagataagctgctgagaaatccgagtgcgcgaacccgtgaaccggagttcttggcggtgttggtgggggtcggcgagttcgcgtatcaacgcgatgatggagtgtatgtaattcctgtcggagtgcttggcgcgtaaacgcaatgccagcgcttcgggcgaattccgggattgtgatctgacatgtctcaagcggcatacattcgagacttgctcagcgaaactccgatttgccaggtcggcagaatgtggcataatgaacaagttgccattttggcagcatggataagtgtccgagcggtctaaggagcacgcctcgaaagcgtgtgaggtgaaagcctccgcgagttcgaatctcgccttatccgcctgcaagggttccgaggtcatctcggaaccttttttgtttttgcggaaccccatctttgggttaagtaaagaaaagtgggttaaaaagtgtctattccctcgtgtcatggtcaggttgatcgcccgacccatccttttctgatcccgaacccgctctcgtaggcgtcgacgccgtcggtcggttcctgcacggccgtcatggtgccgggcatgggcccgtcattcccgaccggcttccccttcctcgtcctccggtgttcaggtgtgacgagcgccatggggccgggctgctccgtgagcatgtacaccgtccattcgcagcagcgtctcatatgctcctccgacaatccccggtggtggtcgagcgcgcgcttgaccacggcgttgacgccgcccttcagctggttggtcgtcgacggcagcgggccgccgctcttgaggacggccggatcgcagaacgcgaacagcacgccggcccggttcagtctgaccaatcggaagtgggcgcggcgcaggcgttcgtgcgtccgccgccacttgcgtcccctcgcgtgcatgggatcctgtttggcggtggtgcgctccttgaagtgatcgtcgtgcctgccgtgccagtcgttgagctccttgagccatgcggcgtcctcgtcggccgtcgtcaccctgacgagcctgcgggcgagtccgagcagctccccgccggcctcgctcttgggcctgttcgtcaggtcgacgcgggtgttgcgcagcacatgcaccaggcagcgctgcacgttgcaggcgctctccgcgccgcgcagcccgtccgttatcggcacgtccggagcagggatgcgcgagaacaacgccatataggcggccttgctctcgttcgagcaccactggaagcccggcacctcgccgttcccgccgtcgatggctatgaccaggcaccagccgtggttcatgtacgtgccgtccgccatcaccgtatgatgtttcaccctgcacggcgggatggcgggccggatgttccggcaccacgcggtgcgcttgcgcagggcccgcgaatcgccgttcgcgtcgcacgcggactggctcgcgcggccgagcagccatccaaggaacgcgtcgagctgcccggcccgctccgtgttctcctgtggcatcgtcgagctcagcgagcaggatgcgcacttccagcgctgcaccccttcgcggtccgaccgttcttcttcatcggccggccgcacaccgggcatttcttcgccttgctggacttcgttctcatgcgtccagcccaccaccgggacgcccctattttcccgccgggaaaaataacaccccggcacgcctactcccacaaggccaaacccgggttataagcaccacaaaagttcctataggccgtgttcgtttctgttctgttcaatgttcgttttcaagcgatacttgaggacagcacacggcgtgttgggcgaaaatctgcgaattactccaacgttatactagttgcgtttgcgcggttttgcgtactggtgtaccttgtgtatcagcagtcggtacaaggttgtactaaatagaaagaagtgttcaaagcaaccgattgattcgatgattctcccataagaggtggtttccgcttcgtatgcaccgaacattgtttcagaaaggttgtggttcttttttcgcctttaagacaacgttgtactaactctgtgagaaacagtaacaggaaagggttcctatggcacaagaagtcactgcgaacaaggcgcgtctcgtcgtcgatgacgcatttgaggtcgcgccggtcaacaatcgtctcttcggctccttcgtggagcatcttgggcgttgcgtttataccggcatctatgagcccggtcatcccacggccgatgaagatggtttccgtcaggatgtgattgatctggtccgcgaactgggtgccaccaccatccgatatccgggcggtaattttatgtccggatatcgttgggaagacggcgtaggcccgaagggtcagcgtcctcgtcgtcttgatttggcttggcattccactgaaaccaacgagttcggcctgcacgagatggtcaagtggctggacaagtgcggcggcaacgaactgatggaagccgccaatctgggaacccgtggtttgcaggaagcgcttgatttgctggagtattccaacattcctagcggaacggccctttccgagcagcgccgagcaaacggtgctgacaaaccgttcgacatacgtatgtggtgcctcggcaacgagatggacggtccttggcagattgggcacaagagcgccgaagactacggcactcttgccgcttcggtcgcggcgggcatgcgcatgatggatcccgaccttgaactcgtggtatgcggttcctcttcccatgagatggacaccttcggtcgttgggaagaaaccgttctcgagaagacctacgaagccgtcaacttcatttcgtgccatgcttattacttcccggcccttaaggaagatggcacccgcgatatgggcagcttcctcgcatccggcgtcgatatggacggattcatcaatgatgtggcggctgccatcgatgccaccaaggcccgtttgaagagcaagcatgaggtctacatctccttcgatgagtggaacgtgtggtatcagcatgatgagccgagcaagaatccggaaggcatcggcaactggccggttgcgccgcgtctgcttgaggatctgtactccgtcgcggatgctgtggtgtttggcgatctgatgattaccttgctgaagaatgccgatcgcgtgcatgcggctagtcttgctcagctggtcaatgtgattgcgccgattatgactgagcccaatgggccggcatggcgtcagaccacgttctacccatttgcggtcactgcagaatatgccaagggcggtacggtgcttgagccgaaactcgcttctggaacctatgacaccgctaaatatggcgaggtgccggtcgtcaattcggtggcggtacgtggcgcggatggtacggtcagtgtattcgtggtcaatcgttctttggacgctgagcaggacttcgaaatcaaattgcctgaaggcctttttgcgaaaaccgtcacggcgcagacgctgcatgatgatgacctactcgccaagaacactctggacaatcagaaccgtgtcgtgctgcacgacaacgacaccgcatcactcgatggagagaccggtatggcgcatgttgtgctgccccccgtgagctggacggcgttgcatttcgcttaatcgtagcgggcgcgccaacaacataactgtgctgcgggatttcgttaatcgcttcgacgaatttccgcagcgcccataactaaagaacaataaggaaagaacaaatgagaatccaaaggaggagctcatgaagaaagtaacccgggtcatggcagccattgcggctggcgctatggcattgaccgtaagcgcttgtggcggaagctccaacgcgaatggtgccaaggtcaacagcgataagaccgctaatgacagtgcatcctgcaccaataccgttaagaaaaagggtgtgcagaaggttaccgtttgggcttggtatccagctatcgaacaggtggtggatgatttcaacgaaacccacgatgatcttcaggtttgctggaataacggcggccagggcggcggtgaatacaccaaattccagaacgccattaaggccggtaagggtgcccctgatgttattcagcttgaatatgaagccatgccccagtttatggccggcaaggagcaacatctcgtcgatttgagccaattcggtttcaccgatcataaagacgattacaccgaaggtgcctggaagagcgttcagctgggttctgaagacaaggtttacggtgttcccgtcgaccttggaccattcgtcatgtatgtgcgccaggacatcttcgacaagtacaacgtcaaggtgccgaccacctgggctgagttcgagcaggccggcaaggacctcaaggcagccggatacgacggctacctgactgatttcgcgccgaatggcaccgcgttcaacattgcactgttcgcgcagaagaatcagaacgtctacaactactcggcgtctgatcccaccaaggcctcggtgaacttcaacaccgatggagtcaaggaagtgctcggctactggcagaacctcgtcaaagagggcctcgtagacaccactgatgccaacacgaacgactggaccaccaacattcttggcggcaagtacgccacatgggtgcaggcttcgtggcagaccggctatctgaagggtgccggcgacaccaatggtcagttccgcatctacaatgccccggtgtgggatgactccaccccgatggtgaaccaaggcggttccgcttgggccgtaaccgatcaggccaaggacaccgaagccgcatacaaggtggcacgagagctgttcgattccgacaaggctcaggaaatcggtgttaccgatggcggcctgttcccggcttggaccaagaagctgcagtccgacagcttcaagaacatggaggaggagttcctcggcgggcagaagctcaacgagatcaccattcccacggctgagggttacaagggctactcattcctgcccttccagacctacgcatacgacgagcaggtaaagacgttcactagcatcgtcaaggatggcaaggataccaccagcaacctcaagagcctcgatgagacgctcaacaactacgccaagcagcagggttacactgtcgaataaccctgacagcaggtgagttgcgggctgggccaacggctccgaagccaaccggctcggcccgcagcttcttcacctgattattggagatacacatgggtaaaaacgcaacaaagaccgttagtaaagacggtatcgtcactcgtcgcggcaatatctggggatggctgttcactgctccattttgcgtgattttcgtgattttcctcgtagtgcccctcgtatatgcattcgttatgtcgctgttcacatccaacgtgttcggcgtccaattcaccggtttgtcgaattaccagagggtgttcactgacccgttgttccttaagggcatggggcgcgtgattctatacacggtggttatggttccgattcagcttggcctggccttgttcttcgctctgctgctcgactccctcaaaaaccgcttcgcatccgtgactcgtttggtcattttcctgccgtacgcgattccaggcgtggtcggagcgttgatgtggggcttcatgtactccaacaacatgggtccatttaccacgtttttcgagttgttcggactgcctacgcctggcttcctcactcctgatggaattttcggcgcgttggtcaatgtggttacttggcagtggaccggctactacatggtgattctgtattcggcacttcaatcggttccgcatgagctgtatgagtccgcgcgaatcgatggtgctacggaactgcagatcgccacacgagtcaagattccgatgtgctccagctcgatggttatggtgaccatcttctccctaatcggaaccttgcagttctacacggaaccgacggtactgcgcaatcaggcaccgacggccatacagccggaatacacgccgaacatgtatgcacaggcactggcgttcaactacaaccagcccaactatgcggcgacggtttcgttcgccttgggactcatcgtcgttatctttagcgtcgtctttatgaaactgacgaagaaccaatcgggattggaggactgacatggctaagaatgcacgcaaagctgctaaggccaatcacattcgtggcaattcgagagtgtttacgattgtagtgttctgccttgccatcgtttacttcctcattccggtgtggtggcttatcgttgcctccaccaagaccaataacggcttgttctttggcgcgcacggttcactgtggtttgacgacaagttcgcgttattcgacaacatcaagcagctgaccacctatcagggtggcatctactggcgttggattctcaactccttcctgtatgcgttggtcggtggactgggcgcaaccacggttgccgttctcgccggctatggcttcgctaagttccgcttccgtggcaagaagatgttcttcaatctggtgctcgcagctctgatgatcccgaacaccgcgttggtcatccccaccttcctgctgatgtcgaatatcgatatcgttgatacagtttgggccgtgttgcttccctcgctgctcaaccccatgggcgtgtacctcatgcgtatctactgccaggaatcgttgcccgacgagatgatcgaggccgcccgtgtggatggtgccggcgagctgcgcacgttcttccaggtgtcgctgccgattatgaccccagccatcaccacggtatatctgctgtccacggtgggagcttggaataacttcttcctgccgcaggtagtgttgacgaacaacaagttattccccatcactgttggtctgacgcagtggcaggtcaagtcccaggctggtgcggcttctgaacaggtgtggaatttggtcacgtccggtgcgttcatatccatcatcccgatggtgctggcctttctcttccttcagcgctactgggtgggaggtcttacggccggttctgtgaaatcctgacgacttggcgggtcttctccttcggcccgccttcgctctcgacgagcccgacgcacatccttcgcttctttcgatgtgtgtcgggctcgttgtcatagtggcattattgaaggtaaaccgtaattacaatgtgaataatgagcaaattgttaaggagtgaataatgcctaggcatgtgaccatcaaagatgtggccaaagaagcgggcgtttcgttcaaaaccgtttccaatgtgctcaacagtactggcagtatgcgtgactccacgcgagaacgtgttgaaaatgccattgtcaaactcggatatacggttaacttgtcggcccggtcgctgaaaaccggcacgaccggtctgataggactatctatttttgatttctcgcagccttttgctccctatctatctgatcaggttatcgactatgcgcgtcagcgtgggtatggcgtaatcgttaatacatatggccaaggcggtgctggactggcatcggttatggataatgccgccatgttggcacctgatggatggttcgtattcattgaccagccccttgccaatgaaggcgcgttactggagcagccgtatccgttggttgttgctagcgactatgaaacatatgacagagtcgataaagtgaccatgcccaatgtcgaaggtgtgcggcaggcaaccggccgtttgcttgatgcggggtgccggaacatcgcgctgttcggtgcatgcgagggcaaccgcgattacgactactatatgaacgctactgaaggcacacaggagatgcgtgttcgtgggtacattcttgctttcgaagaacgaggactacgtccggacatggatatgctgttttcgtggggcctaatgatgagcgacagtggtgtgcgtgccgttaatcacatgttgaagcagggggtacggccggatgcgattgtctgcctgaacgatgctatggcgattggcgtgttgcatggtcttgaggcgaatggtcttcatgtgccggaagatgtgcagcttattggatacgacaatgtgccagaagctcaattctccaatccgtcactcaccaccgtagatccgcatgtgagcgattacgtgaagtgcggcatagatatgttgattgaacgtattcagggctacgaggggccaatacgcacgtattgcactgatttcgagcttatagagcgtggttccactcggttgtagcgtataggtctcgtgccagcagttgcttggtgcgatgcgtaatgcatacgaatacaggtgttttacctgttgaattgttgaacggcatcgcgtctaccggactatggttcacgaaaacggttactgcgaaactactcgaacaatgtggcgtcagtcgctgggtagccaagttggaacgcggtgtaggcgtgcttggcggccagtgcggcgaggatgagcagcgtatcgctctcggtggaagatttcgattcggtcacggccttgatctgcgcgcgggcgcagtccatttcgatggcggcggcggtcggtacggtctggccgcttgccttgtcggcgatggtggtggggttggccagtagttggtcgatggcatagaccttttggcgggggtcgctctggccggaagaactggactgtgcgccggaatcatcaaaattgccgttcgccagcgacaccagctgctgcccggcggtcttatgcatatcgctcaacgccaacgtagccccagcggtctgtcctcgtgcggccaagacctcgatagcgaatccggcgcgatcctcggccacggccatcgcatccaataccgatcggtcaacgttggcggacgtgacgccatcaagacgcgccggcgtcacctcaggcgcggactgcccgaatttatcggccagaaaagccagccattgcttggtctgcgcgtcacgtaacgttccctcggcaaaacgacccgaacaatacccggcaacgtcaatccaagtcaggggagcggccaggccggtggcatactgctccaataacggcgtgccttcagccggatgggtggcgtagtccgccaacgtcatcgctttctcgcaagggctcatttgagcttccgcctcggcccgtccggccagtcgcggcatcgaacacgccgaaagcgaacacagcatcgcgctcgcgcatagtgcggatgccaagcgccgggtaaaccgtcctgaagagaagcgtgtctgcatggaaacctacactaatagctaactgtgaccactcataggccatgcgccacataacttcataggaggtacggatcgatggaactggacctgacaggaatacacaagctcgccgccgagcaaggaatcgaccccggaaccctggatgatgcgctggcagaggccctgcgcctcgcctacctcaagaccccgcacgccgccaggcacgcgcgtgtggagcttgacgaacgttccggcaacttcaccgtctgggccgccgacgaaatcccggtcgagcccaccgaggacgacccgcaccccgctcccaagctgggcgaggaatacgacgacaccccgcgtgacttcggccgtctcgccgccgccactgcacgccaggtcatcacccagctgttccgccgcgccgaagatgagaaggtattcggcgcgttctccggtcagaagggcaagctcatcaccggcatcatccaacaggatgcttccgacccctccaacgtgcatgtcgcgatgggcgatgtcgaagccattctgcctcgccgtgagcaggtgcccggcgaacgttaccgccacggcgaacgcatccgcgtgtacgtggtgaacgtggcccgtggcatcaagggcccggaaatcgtggtgtcccgctcccacccggagctggtccgcaagctgttcgagcgtgaagtgccggaactggtctccggtgccgtgtccatcatggccatcgctcgtgaggccggcgcccgcaccaagatcgcggtcaaggccaacaccgatggcgtgaacccgaagggtgcgctgatcggccccggcggcgctcgcgtgcgtgccgttatggagaaccttggcccggagaagatcgacatcgtcgactactccgacgatccggccaagttcgtggcagccgcgctgtccccggctgtggccaccggcgtacaggtgatcagcgagaagaacaagaccgccatcgccttcatccacgacgaccagctatccctggccatcggcaaggaaggccagaacgcacgactggcagccaagctgaccggctggaagatcggcatcgaatccgccgaggcccatgccaagaaggtcgccgccgaaaaggccgcccaggctgcggccgaggctgctgctccggaagccgaataggccgccgggctcgaaggcgaatgatcttcagggcgcattatttcctgatacgagccgcgtcagcaatggcgcggctcgctgcgtctgcgctatccagcgctatgagtatgcttgattggcgtatgtgggctggtgcagtgtgcgcgaaatcgcccacaccagagacgaggtaacacgatcatggtcgcacgatgagacagggtaggcttgccgtcatcaccaactgaccacgcccatgcacgcgcgtggtcacagaataggagtaattagtggcgaaaccacgcgtatacgaactggctaaggttttgaatgtcgatagcaaaaccgtgcttgagaagcttaaggacatgggagaattcgtcaagtccgcttcttctacgattgaaccgccggtagcccggcgtctgaaggcagagttcgccaaggacaacgccaagggcgattccaagcccgcatcttccgtacaaaagcctgctgccaagcccgtgcagcagcgccgcccggccgcaccttcggccccggcttccacttcatcttccgcaccgactccggccgctcccgcacgtcaggcatcgcccgcctcggcacatcagcaggctccgactccgggcgcaccgacaccgcgtccgcagggcggcgcacgccccggcatgccgacccccggccgccacggtcagcacgacaaccgtgagaatggtcgcgataatcgcgaaggccgcgagaacggtcgtcagagtcgcccgaacgatcgccgtaacaacgatcgtcgtaacaaccagggccgtccgaacaatggccagccggggcagcatcagaacaaccgcgacaatgcttcggctccgcgcccgcacgctcagggcggcgccggtgccaatggcggcaatgccgcttcaaacgcgattccgcgcccgcacgctcagggcccgcgcccgggcaacaacccgttctcccgcaagcagggtatgcacaccccgacgccgggtgatattccgcgtccgcatccgatggctcgtccgactgctgatagcggtcgtggcggtcgtccgggccgtcccggccaaggccaggggcagggccgcggcttccgtggcggtcgtccgggccaaggtggtcagggcggtcctcgtcccggccagtggggccacaaccgtccgggtcagggcggcggctcccagggtgccggtcagggcggcgcacgcggcggcttccgtgggggccaaggcggcggcaataacttccagggcggcggcgcaccgagcaacggtcccgcacgtggcggcggtcgcggcggtcgcggcggtgccgcaggtgcattcggacgtcagggcggtaagtcctcgaaggcccgtaagaaccgcctggcaaagcgccatgagtatgaggagctgaaggcaccgaccatcggcggcgttcgcatccccaacggcaacggtcagaccatccgtctgcgtcagggcgcttccctggccgatctggcggagaagatcaacgtcaaccaggccgcgctggtcaccgtgctcttccacctgggtcagatggctaccgccacccagtccttggatgaggagaccttccagattctgggcgaagagatcggctggaacatccagctcgtctccgcagaagaggaagacaaggaactgctccagcagttcgacatcaaccttgacgaggaagaactgcaggatgacgaggatctcaagcctcgcccgccggtcgtcaccgtcatgggccacgtcgaccacggtaagacacgactgctggataccatccgcaagaccaacgtcatcgcacgtgaggccggcggcattacccagcgcatcggtgcctaccaggtcaccgtgaaccttgaaggcgaaccgcgcaagatcaccttcctcgatacccctggccacgaggcgttcaccgccatgcgtgcccgtggtgccgagctcaccgacgtcgcgatcctcgtggtcgccgccgacgatggtgtgatgccccagaccgttgaggccatcaaccacgctcaggccgccaaggtgccgatcgtcgtggccgtcaacaagatcgatgtgcccggtgccaacccggagaaggtccgcggccagctcaccgagttcggcctggtccctgaagagtatggtggcgacaccatgttcgtcgacatctccgccaagcagaacctgcacgtcgacaagctgctcgaagccgtgctgctcacggctgacgctgagctggacctccgcgccaaccccgacatggacgcccgtggtgccaccgtcgaagcccgactcgacaagggtcgtggtgccgtggccaccgtgctggttcagcagggtacgctccacgtgggcgatgccatcgtggccggcacttcgtacggccgcgtgcgtgccatgctcgacgagaacggtcagccgatggaagcggccggtccgtccacacctgttcaggtgctgggcttgacctccgtgccgaccgccggtgacctcttcctggtcgcctccgatgatcgtgccgctcgccagatcgccgagaagcgtcaggccaccgagcgtgccgcccagctggccaagcgtcgcaaggtcgtctccctcgaggacttcaagaagaagttcgccgagtccgagatcgacatgctcaatattgtcatcaagggcgattcgtccggttcggtcgaggcgctcgaggattccttgatgaagatcgaggtatccgacgaggtcggcatccaggtcatccaccgcggcgtcggtgcaatcacccagaatgatgtcaacctggccacggtcgacaaggccgttatcatcggcttcaacgtgcgcccgaaccgtcaggtggcggacctcgccgagcgcgagggcgtggagatcaagtactactcggtcatctaccgtgcgatcgaagacatcgaggcatccctcaagggcatgctcaagccggaatacgaagaggtcgtcacctctcactccgagatccgcgagatcttccgctcctccaagttcggcaacatcgccggcgtcatggtgcaggacggcgaggtcaagcgtggtacgaagtgccgtatcctgcgcaacggcgtggccacggtcaacgacctcgagatctcctcgctgcgtcgcttcaaggacgacgttcagtccgtcaaggaaggctacgaggctggtatcaacctcggcaccttcaacgacattgaactcggcgacatcatcgagaccttcgagatgcaggaagtcgagcgcaagtagtcattgttaagccctctctgacgagtgggctgtcagccgcaggctgactgggggagagacatggtagttccatgattttctctcccccagcctcactgcgttcggcagcccctcgtcagagggggctcaagtctagaaaaggaaattcctatggcaggaaccaacccgcgcgccgcacgtattgcggccttgattcagcgtgtcgtcgcctcctccattgagcgcgaactgcatgacaagcgactcgccagcatcaccgtcaccgaagttcgtgtgaccaacgatctgcagatcgccaaggtctactggacccagctcggccacgaaggccacgaggaaggcgaacgcaagcgcgcccagcaggcgctcgatcaggccaagggtcacctgcgttctctggtgggccacaaggctggcctgcgcctgactccgcagctccaattcgtgttcgatgaagtgcccggcgaggctcacgagatcgaagacattctcgccgtggccaagaagcgtgacgaagaactcgcccgcgcccgcgccaccgcccagtacgccggcgacgccgatccgtacaagcacgacgacgaggccgaagccgagggcgatgagttcgagtccgacgaggagtagtgtgcttcatacaacacccagcggcctactcatcatcgacaagccgcaaggcgtgaccagtttcgacgccgtcgccgccgtgcgcggcgcgttgcacatcaagaaggtcggtcacgccggcacccttgaccccatggccactggcacgctggtcatcgccttcggccacgccacgcgactgctcaacgccatcgtggcgcatgacaaaacctacgaggccaccatacgcctcggcctgcgcaccactaccgacgatgccgaaggcgaggcgcttgtcgatgatgaagcccgctcccgctggcaaacgctgtcagcgcagctgactgagggcggccagagcggcgaaccaacggcgtcaccaactgcctcatggcaaaacctgctcactcgcaccatcgccaccaatttcaccggcgatatcgaacaagtacccaatacgttctccgccatcaaaatcaacggccagcgtgcctacgacttggctcgcgaaggcaaggatgtggaactcaaaccccgcctggtgaccatcagcgaattcaccgtgctggatatccgcagcggattcgtagcaggggagcaggccgctgaaccattgcgggaagacgcgaacacgggaacgattcccgcacttgatattgacgtgcgggtcagctgttcatcgggcacctatatccgcgcgctcgcccgcgacctcggcaatgaacttggcgtcggcggatacctgacccgtttgcgccgtacgcgagtcggccgattcgcgttgccggacgataccagcggacttatcgcctctgaggcgatgcttgacacgcgaacccataccgtcaccgcacataccgatcagaagacgttcactaatcgggaagggcaaaccgtcacgcgcaacaagtgcgtattgaacactcctgaaggtcttgccggtgacgagcgccgcaactggctgcttgaccatgccctcaccatggaacaggccgctcgaggcgcgatgccggcgcttgacatcacacctgaggaagccagcgaattgcgcttcggccgccgtatcgagcgtacaatcagcgagcccactgccgccattgtgccgcaaacgcatgatgtggcggcgattatcgagcgtgccaacgctcatcaggccaagccggtcaccgtattccccctcgcgtaaagtagacgcggtgaaaagtgcagcttgatacaggccgcgcacaacaacgcctatattgcatgaataacatcgcacggataaaaggaacagcacactgatggatatcacgcacctgacccctgacgccgaaggttcgattgaatggccctcgttcagtaacgacaagaaggccgtggtgacattgggcgcatttgatggcatgcacttgggacatcaggcggtgatcaagcgtgtggtggaactcgcgcaccagcatgatgctttttccgtggtgattctgtttgacccgcgccccgcattcgtgcacggctgggccgcctcgcaccatggccaggaacccgcggtgcagaacgtggatgccgaagccttgaccagtgtggatgatcgactgcaccgcatggaacagttcggcgtggaccatgtgttggtggtgcactacacgctggccttcgcagccatgtcatacattttcttccttggcagactcaccggcaagctgggcatgcgtacgctggtcctcgggcaggatgccgccatgggcaaggggcgagaaggtgatgtgaagcatatcgccaatcttgccgccgccaccggtgtattcgaacttgatgtggtcgatgaccgtggcccgggtgaagtgcgcattccgcgcgatttcaagccggaagccccgagcgaatggggagagcccgtcgacccgctggccaatgccaccaaggccgagcgccgcgcatggagcaagaagaaccaggccaaggcaatgcgcgcctggagctccaccaatgtgcgctacctgctggctcatggccgaatccaggatgccaacgccattctgggtgctccgcacgccatcgaaggcgaagtggtacacggtgaggagcgcggccgcaccatcggattccccaccgccaatcttggctccgacattgcaggctacattccggtcgacggcgtctatgccggttggctggtagatggtgagaaccgctggcctgccgccatctccattggcaccaaacccaccttcagcgagaaaacaggactcaacgaacgcgtggtggaggcctattgcatcaccgatgagtggattgatctgtacgaccataaggttcgcgttgaattcgtcggtttcctgcgcccgcaggtcaagtttgatggtcccgaccaactcgttgacgaactcaagcgtaacgtcgaagagaccaagcgtcttaccgcctgaggcatatctcagggctatttacgcactcccaaggcatctaaggcgtcggacaatgtgttggactccaccagccgaagtccctcgacatgcaccggcttgcgcagcggaggaatgactgccgtcgtaaagccaaggcgcgcggcctcgcgaaggcgatattccatacgcggtaccgggcgcacctgaccggtcagggaaatctcgccaatggcgcacgtggctcgcgcaatgggttttgacgtggcggcgctcgccagtgccgccactatcgccaaatcggaaccgggctccttggcctggcccccggcaatagtggagatatacaggtcgttggacagcaggttgagcttgctgtgacggtagagcaccgcgaccagcatggcgatacggctggggtccacgccattgaccgcacgtcgaggtgtgggcagcaccgacgtggtgaccagagcctgtacttcgataggcagactgcgatgcccatccaatgtgaacgtcacacaggtgccttccatgggtgccgcgttggccgcatcagggccgtctccagacaggaacaatccggcgggatcggtgacctcttcgatgccctcaccgctcatgtcgaaacagccgacttcatcggtcggaccaaaacgattcttcaccgctcgcaacattctcagcgcggtctcgctgtcgccttcgaattggcagaccacatcgaccagatgctccaatgtgcgcgggcctgcaatcgaaccgtccttggtcacatgaccaaccagaaataccggaatgtcaagcgtcttagcggtatctatcagcgcgcttgccacttcgcgcacctgagtcgaaccgccggaaatgccatcgacctcctgcgagacgatggtctgcgccgaatccacaatggccaaggccggcttgttctgttcgatcagccccaatactgtggacagatcggtggtggaggccagtaacaagttcggctccaccgcgttgatgcgggaagcgcgcaaacgaacctgcgcctgtgattcctcgccggaaatgtacagcacggtattggcatgtaccgacggtgcgttgccctgtaccgacaccgtgtttgatgtgccgccctgcgcccggcccgactgttgggcagaccgctgaccggctcctcggaatgtactgtctcccgccacaacgcgcgcgatattgccggccgtctgcaacagcaatgtcgacttgccgatacccggttcgcccgctatcagcgtcactgaacccggcaccacgccaccgccgagcacacggtcgaattcggaaaacccggtaccgagccgctcgacgctttccgtgcccacttcggtaatcggacgggctgcagatctggcgttgtcggcaaccgtaaccgactgcgtgcgtgatgttcggccgggagcggccgtgcgagagcttgccgccggccgagtctcgtgaaattcctcgaccgtgccccactgaccacactcggggcaacggccgtaccacttcggcccgttccaaccgcattcggaacatacatactgcacacttgatttcgccatggtctcaccctaacccaaacaccagcggacggtaaatttttaccgttcacaagagtttcacgcggcttgcgcacaacgactaagattacggccgtctagcgtcacgcggctgtgagagaatcggggcatgactaatagtgagaactcctcgaccacacaatcccatggcaagttgattgcagtggtggttgccgcagctgttgtgattatcctggcggtgctttcggcctttgtgtggccgggttgggccatccagaagaatgatggcacctccactaccacccaaaacagccagcagaaaaccgaatcatccgagccgatcaagccgaccatcgacgccacagctttgccggatgatgccagtgagctgttgaaggccatgccggacagcgtgctgaattacgcgcgtaccaaggcggatgcctccacgacgtggaattccgcgtcgccgctcgaggagtacactctgacctactccactggtgatgccgccaaggatgtcacgctggtcgccgcgcagtggtcgtcggcggacaatgccaagacccagtacgatgcgttggtcgctgcgcagaccggcgatgagtcggcatccggcaacgtcaaggtttccggcaacgtcacgggcgcgtacgtggtgaaggccgatgcctccaacagcaagaacgccgctgccatctggcagaacgataccgtggtcttccaagctaccggcaccaaggaagcggtcgatcgcttctaccagaagttcccgatgtagtatcttgtatcggctgtcagctgctgcacaaacttatgaacgttggggcatctacattgctgatgtggatgccccaactgcgttcagggcatatgcggactatcgacaacatactggtttcctctgtctggcaacacgtgtattatggtgcaagttgcaacttttacgattaatcgaaatggaggcttcagatgggttctgtcatcaagaagcgccgcaagcggatgagcaagaagaagcaccgcaaactgctgcgtaagacccgccaccagcgtaagtagtcttacctgcaatcaaggcattagaaaccccgtgatcgttatggtcgcggggtttctctttttggctcctttgccttgttcgggcaacagtaaagcccgcacctgcgatgtacagatgcgggcttggaaaagttcagtgatgtgagacgatcacttgttggcgttggtcaacacgcgcgggccgttcgggtcgccgacgatgaccttgtcgaccatgttgaggaacaggccgtgctccaccacgccgaccgtgttgatgaggtcttcggccagctcctgcgggtgatcgatgcgctccaggtgcaggtccaccacgaagttgttctcgtcggtgcgcacttccttgccatcggcgtcaagacgaagcaccggcttgtagccgcggtcctcgaacttcttgatgacgtggccagcgccgaacggaatgacctcgaccggcagcgggaacttgccgatggtgtccacaaccttggactcgtccacaatccacacgatctggttggagttggtggccacgatcttctcccacagcagagcagcgccaccgcccttgataccgttgaagttcttgtcgacttcgtcggcgccgtcaatggtcacgtcgatgtggtccacgtcgtcgatgtccacgatcttgatgccgtagctttcagcctggacctgcgtgcggcgagacgtggttacgccagtgaactcaagaccttcctcctgatgacggcggccgagctcgtccaccaggaacttcacggtcgaaccagtgccgaggcctgcgatcatgccgttttcaacgagcttggcggcttcgatgccggccgccttcttcagcgcatcctgctgtgccttatccatggtttctcctttgccatccttgcctccgccgcatggatcaacggcgtgaagccttatctcctatcctaacgcgaatgagcgattttgtgtcatcgtgtccgattgcggtacatattcgtgtgtttgggtgttagtgtcgtacgaatggtgcgttggcgatggtcaggttgccgtcgccgtccacatagccttcgatttcgatgctgcctttgatcggcatcggctgcccgttgaaatacgggctcgttttcggcgcgggggagaaggtcagcgtaccggataccgtcagtccgcttggctttgcggggtgtacggggtgcgctgattgtacaggttgcgctgattgtgtcgctaagggtgacgaagacttggtctctggccttgtggcatccgtcgaatccgtcgccgcagccggcttgcgcaaacttgccgcatccgccttgccatccagcaccaactgcacgtctggaggcacatcggtgccatgtgcgtattcggagcccagtagcgactgccagccttcaatcggcagatagccgtcgcgcgcacccgaacggcaatcgcccgcataggtgcgtgccagttcatcgaccaactcattgccctcgttgccggcgtgacctttgacccatcggaaatccaccgggccagggcgttgtgagatctcacggtcgatcgcctgaataagctctttgttcttcacaggctttttctgcgaatttttccagccgttcttcttccagcctttgacccacttggtcgagcaattgatggcgtactgcgaatccgattcgatgagcaatggctcagggcccgggtgcgctcgcaaagcttccagcactgcgcacagctcaccaatctgattggtgccgttggtcgcgccgcccgcatcataaccatggtcgtcgtgcttatggccgggcttgccgccggcgttctgctcatgatcggcccaggcccagcccattggcccgtttggattccctaatgcggacccatctgtggatactgtgatagtcatgttctccaccctaacgcaagctgtgcaatctcttgctgaagtggggttgcccagtgcgaggcaaaacaacgtagtgaagagtgtgaataacatcacacctattgactttgcttgaaaaacatgccatcgcgcgtgaataggtgagcgctcacaagaaaaacaagacatttcctctctgcgggtgaggccggcaacaatggcgcatccggtatctggaatgagaataagggactgtacaaaaccagtgacggcgacatcgaaatcctcaaaccagaggcggacagcgatggttcgacctccacggccgcatccaagggcaccatgcttatcgcaggcaactccaaaaccgtggcactcggtccaggcggcatggccttggctcccggcctgccgctcggtcttggctggttcatccgacgccgcttgggattggatgcctccgacattctggaccgtaagctcggcttgaagtaacggctggttcggacgtgattgctgtcacgtacggatcatgacgacagcgcgaaggtcctcatcggtttacgtcgatgaggaccttcgcgcgcattaggggagtctgttgcgggctgcgctacgcgggtcatgctgcgcgggcgtgctatgcggacaaactacgcgaacaagtcgttcagtgcctcggcaatcgtcggatgcgtgaacaccatatcgcgcaacgtgctggccggcgcgtcaagatccatcgccaacttgacgatattgatcacctcgtgcgactcgacggaaagcagcatcgcacccagaatgcggccagtattgcgttccacaatcgccttcatcagaccatccggtcgccgcattacctgggccttcggcacagcggccaccggcaatcgcttgaccacataatccaatccagccgccttcgcctcgcgctcattcaatcccacgcgcgagtaaggcgtggcgaggaatgtgctcgacggcacatgcttgcggtccttcaccgtgtacggacggtcggaaccattgagctgcgaccacaccacgcgatagtcatccagcgaaatgtacgtgtgctgcgggccgccgttcacatcgcccagagcccaaatgtcggctgctgtggtgcgcagaagctcgtcgactttcacggcaccgcgttcggtgagctccacgccagctgcctcaagatgcagtccctcgacgttcggcgtacgtccggtggccaccagtaccgcgtcggtggtcaggcagaatcgggcttcagccggctcggcgaaccgcggctcgccatcgtctgatggtttcgtttgaacgtgtgacatcgtggcgtgatcggtcgggttgctagtggggctggtggttgttgtagtgtcggtggcgccggtggcgtcggtggcaccggtgatatcggtatgagcgttcccggtgccggcgggggtggaatcgcaagcttgcgatgcgccgcgagccatacccttcaccgcaacggacaacctgacgccgccgtcagcagcaggcgcgatggccttggtatccgcgttgaacaggaacttgacgccctgcgcttccaactgtgcgcgaatcgcggccgccacatccgcatcctcgcgcggcaggaactcggcattgtgctgcagcacggtaaccgccgtgccgaaatcggcaaacatcgaggcaaactcaagtccaatgaatcctgaaccgataatcaccagtcgctgcggcatatcgtcgagatccatcagtccagtgctggtgtagacgccgggcgtagtgtggataccgggaatatccggaatgcgcggcgtggcaccggtattgatgaagatcttgctggcggtcacggcgaccgggccctcagcggtggcgatttccacgctatgagggccggtgaagtgagcgcggccggtgattacggtgatgttgtcttggtcggcgagcttgtgatagttcttgtcgcgcagcatcgaagtgacgcggcgcttctccttgatagcagcctcgaacgctgcttcgcgggtttcgggagtactgttcgcgccatcccgccgcgcctgttcggcggacaaaatcagtgacttggacggcaagcatccgatattgatgcaggtgccgccgtacatgtcggcgcttgcctcggcgacgacgaccttgcggccggctgcactgagcttggcagccaaggttttgccgcccttgccgaatccaatgatcagggcgtcggtggtgatagtgggggaggtgctgggtgtgctgatggcattgggtgtgctgatggacatggttacttccttacgtattcgagtgataagagtgcgttgtgctgatgtgttgtgtgccgtgcggcgtctgttttcttctttgactgccgaagcgttatcgactgatgctggctaggggaaacgcgcgggattattagcctttgcgctcgctgaatatctgttcggtgatgtcgtggatggtggtgtgttcgagttgttcgaggcaagtgcggttgagcccggcatagatgtcgttcatcactgcgcccattgaagatgacaccagacagtcctcgtgtacgtcgcccggtgtccagttcactttcacaaaagtggtgccggtggcttccgctaccgcgcgcaaagtgatttcggcggcgggccgggccagagcgtacccgccttcagcaccctctttagtggcgatgagtccggctgaggcgagcggtcgcattactttgcgcacgcgcgccgcattggcgcatatgttctcggccaggatctgactgggcaggtgtgtggcgcgatggtcaaggtagaccaatgcgtgcactgccagtgaatggtcgccgttcatgaaacgacctccttaccgagtcgatactgtaactatgatgtgtacagttatgatactgtaatcatatcagatacagttagtgtgtcaaatcggggttgaagaggtggatgactatgtgtataagtgaggtgtccacatggttatccacaatgaatgtgcgtaagtgaagctaggaccacatacctcggatcggcttccgtttccgcacccactacccatatggtggtgtcatgaacagcatgaccgacggcatcaccaactatggagctctgccaggctctatatacgatcagcctccggaagaatcggaggcagtttttgttccgcccgaatttgcggggtcattttctactgactcgaaatacccgacttctcgcgactcgtcatcgccgaacagtggtgcacatgattctgcagcgacaccgaccatgagcgaaagcctcgcccagcgcagacgcgacatggtcgcacgctgcactgaggaagcgaaacgggcgggcaagaagctgcttttcggcatgaccacttccctcgctctgcaatccgtaccgattcccgccgattgcgacctcgactcggccaagctgcacactgtatccagcgttaagagcaagcggttccgtacacgccatgcaccactgcaaacgcatatttggaaacatgcggctaaagccgccaatgtggaaatgaaccaacacgtgtttgcgctggacctgtttcacgtatgggcccaacttgccccgtatgtttcttttgagtccctgattgtgctcggggatgccgtcatcgctgctacgagcaaacagccagtattggccaaggatcgtgatgctgctgcaatctatcaggatctggtgaagttcgtggagcaatttacccgattcagagggcgcccgtcctgcgttcgagcattgcctctgatatcacctggtgctgattcgcccaaagaatcagaagaacgactctctctggtagcgcatgggattccacagccggttgcgaactatgtggtgccggatgcggcttttgcatctggagctcccataacgttggacttagcatggccggagttcaaggtcgctgttgaatatgatggcgatcatcatcgtacgagtaaggctcaatggcgccgtgaccaagagaaaaggggtgtgctggtcgggcggagatggctggtcttcgtcgccacggcggcaagtatcgctaacgaggacgctcgtgctgaattcgctttcaacgtggcgagggcgcttgcttcgcgcggtgccgtattcgagtttcatgtagttgccatgtctcttgaagagttggcgcagagcctgctgtgaccataatgtccgaaacggactgatgtaaaggcaatatttgtacgacctgttgttgtggtgtgtgcttgatattgcatgccgttcgattgcgatgcctcgtagtgatggatttcgtgaatgactagtgttcgattgtggagggaaatgtgtcatagtggtcgattgggggtgttgtcggtgcattgagtgtggatttgcgccaatgggtgtgggacgctacgcatgttttgccgatttttgcgtggcgtcccacggcccctcgggtaatggctgtgacgggtgtggcaggaatggcgtctttccggggtttccagtttgagtgtgtgggatgggggaaatgtaaaacgattgacttagctgttgtcccacgcttttgtgggatggcagctctggaatgggcaaattcgtcgtggcgtcccacaacgatgttaaaactcgaccatgatgcaagccgaccgaacgcttcggcggtcatctggccgctgtgaccccacaatgatgatgggaaactcggtcataatataggtagtcgaacgtttcgcggtcatctggccgtcctgccctgcagtgatgttgagaaaatgcagtcacggtgcatgaggagaaccgttgacctgcgtgtttcagtggtcgcgaactgcatatgcgctaaaaaagctctgcagtggattgcatgaatccaatgcagagccttattagttgcggtgaacgcgactaacgcagcgatttcactcgctcagggccttgtcgaccacgacggtggcctcgtcgagtaccttgtccagagcctcgggggagacgaaggactcggcgtacaccttgtagatgttctcggtgccggagggacgggcggcgaaccagttgtccttggtggtgaccttcagaccgccgatcttggcgtggttgcccggtgcctcggtcagcttggcggtgatgtcttcgccagccagggtggaggcggtcacgtcgtcgccggacagtgccgcgaacttggccttctgctccagtgtggtcggggtgtcgacgcgcttgtaccaagactcgccgaagcgctcgacctgctcctggtgaagctgggccgggttcttgccggtcttggcagtgatctcggcggccagcaggtcggggatcagaccatccttatcggtggtccacacgcggccatccttgcgcaggaagctcatgccggagctctcctcgccgccgaaggcgacttcgccgctgaacagcgggtccacgaaccacttgaagcccaccggcacttcgatgaccttcgcgttgatcgatgcggccacgcggtcgatcagggaagaggagaccagcgtcttgcccacggctgcgccctcaggccagcccggacggttgccgccgaacaggtactccacgcacacggcgatgtagtggttcgggttcatcacgccccagttcgggcagacgatgccgtgacggtcggcgtccgggtcggtgccgccgaccagatcgtacttgtcccaagcgccggcgttgagctcgtcgaccaggcccttcatggcgtacggggaagacgggtccatgcgaatcttgccgtcgtggtcgatggtcatgaagcgccaggtcgggtcgacctcaggacgcaccacgccgatgttcaggccgtacttctcgttgatgagcggccagtagttcacggaagcgccgccgagcggatcgatgcccagacgcacgccggagttgcggatcacgtcgaagtcgatgacgttctccaggtcgtccacgtagtgctcgcggaagtcgaagccctcgacgtactcggacttgatggcctcctcgtagggcacacgcttgatggacttgaagtcgccgagcagctcgttggcgcgagcggcgatggcgttggtggtctcggccggggccgggccgccggtgacggggtcgtacttaaagccaccgtcggtgggcgggttgtgggacggcgtgacgacgatgccgtcggcgaggccctcgccctcgaagcgctgggtgccgtcgaccgcacggttgtgggtcaggatggcctgggagaccaccggggtgggcacgaagtcgtcacgggagtcgacgcgcacgtgcacgccgttggcgacgagcacctcgatggcggtcttcttggccgggccggacagcgcgtgggtgtcggagccgaggtacagcgggccggtgacgccggccttcttgcggtattcggcgatggcctgggagatggcgatgatgtgggcctcgttgaacgaggtcttcagggacgatccgcggtgaccggaggtgccgaagatgacacgctgctcggggacttcgggatcggggacgaggtcatagtacttgccgataacctcatcgacattaatcagatctgctggggtggcgggctgacccgcattgtttgctaccatgttccctattctgccacgtttttcgccactttgggtactcttatgttaagagttgtcaacttttgtgcgaatcgtgtgccggttgtctagcgcttggtcatttccttctcgatttcctccagcgacttgcccttggtctcgggtaccaagcgcagcacgaacgggatggacagggccgagaacacgccgaaaatcgcgaacgggccgcccacattgttgccgaacgcatcgagcagcacgaggaagaactgggagacgatgaagttgcccagccagttcgccgccgagccgaaggatgagccgatgccgcgcacgctcagcgggaagatctcgccgataagcacccaggcgatcgggccccacgagaccgcaaagccgaggatatagaaagcgatgagaatcatcgtcggcactgccagcacggccacgtcgcccacgaagttcatcacggcgagcaccgcgagcgaaacggtcatcacggtggaaccgaagatcagcatacccttgcgcgggaaacgatccatgataagcgtggccacgatggtgctcacgaagttcaccacgccgatgcccaccgacacccagatcgcgtcgccttcagggaagccgaagcccttgatgaacacctgcggcaggaagtagatcaccgagttgatgcccacgagctgctggaacagcatgataccgatggcggccaccagcgccggacgagcgatacggaacagttcgcgcacaccacccttggtgtcctgtgcggccacggccttgatttcgtccagctcaatctgcacctgggtctgatccacgtccttgcgaatcagcgtaagcactttgaaggcgttgcgggtgtcgcccttgttcaccagataacgcggggattcgggcagcaacaggccgccgagcagcaacaaggcggccggcaccagcgccgaaccgagcatccagcgccagtcgcggatgccgaagaggttgtggttcaggaatccgaggttggaggcgtaggccagcagaatgccgaaggtgaccatgagctggaacagcgtggacagtgagccgcgacgctccttcggcgccagttcggccaagtacgccggggtcagggcggaggccgcgccgacggcgagacccaggatgatgcgggcgcacaccatcatcgcgaatccggtggaggaggcgcacaggcctgagccgagcaggaacagcagcgcggagacgatgagcagcttcttgcggccgaaccggtcagacagtgcgccgatcgacagcgcgcctgcgcacgagccgatcagcaccgaggaggtgatgaagccggtctgagagacgctcaggccgaagtccgattcgataagcggggaggcgccggagatgatgccggtgtcgaaaccgaacagcatgccgccgagcgcgccgaaggtgaagatgaatgcgctgttgagcgggaagcgcgtggagaagccgtgcgattcggcggcttcgaggtcctcgattgcgttggctgccgcgtttgtggccgcgcccgccactccggccacgccggtttcgatggtttcgattgcggtggccgccgcaccggttgcgctggtttcctgcgccgcgggtgccgtctgtttcgatacgggtgatgccgttgtcgtcgtcattgccttgtcctttcgccgttgacggaccgcgcctgttgcgtggcccctctgccgcgtgcaaggtcaggcttcgattgtctgcagtcgcccgaaaacaaaaaaagacctggaacaacgtggaattcgcatatcacgatacgcaaattccacgtcgctccaggtcttgcctcgttttgagtaacaaccctgctacgcaacgtgtgtgaaagatagaatacgacttccgcagtcgcgacactccgaataggcggcaaaaaacgatgatttttgacaacgattgcaggattctgcatggtggaatgatgtcggaatgggcgctgcggcaaatacggagaacgggtgtggcgaagcatcatcgcggaacattatggcgggacaccatcgcggagcaccgtagcgcatagttgccgtttcgcgatgctttgccggcattgccgtgcttttggggcacccagcgccgataatggaacacagtggcatacggcagcaaggaggaaccgtggcgaacgcatcgaacgcaacgcctgcagtgattgcggcgcgcatcgtcgatgccgtcggcggccccgcgaacattaccagcctgacccattgcgccacgcgactgcacttcgaactggccgatgccggccatgtcaaccagcacggtcttgaatccgtccccggagtcctcggtgcattcccgcgagccggcaatcgttatcaggtcatcatcggcggagcggtcgcctcggtgtacgagcagatcgttcggctgcggacggcgcgattgatgccggcagcgcaattgccatcggcagtgatgcagtcagcgtcgcagtcaacgcaacccactcagtcaacgcaacccactcagccaatgcagcccactcagccagcgcagcccgcgcagtcagcgcaatccacacagcccacgcaacccgcgcagtccgcgccgtacctttccgacgatgccgcaccatcgcgcgatactgccaccgacgccgaacaaagttgcggcccatccaatacatcccgtcacttcacgcctcgtaccgtccgcgagtggggcagtgccgtccgcgcttgggctgccgcgtttttcgactacctgtctgactcgttccgcccgattctgggtgtactgctcggtgcctcgctggtcatcgccatcgtcaacgtgatcgttgcactcggcatcgtgcctgacggcgagacctccgccggctggatactactcaaggcgatttgggagggtgtgttcaccgttctgccgattatgatcgcctacaatgcggccaagaaactggacgtcgacccctggctcggcggcgcgattatggccgcgctgatgaccccgcagtttactggcgtgatgtccggaatgtccggaatatccgggacgtccgtatccagcgccctctccggggcgattcaatgctcggccgacgccgtattcggcgccgaaacctgcaccgtgtcggcgttcggcataccgattcaactcaacgactacggcggcaacgtcttcgtgccgttgctcatggctgccgtgctcgccgtggtctaccacgggttgaagcgcgtcattcccgacagcgtacagctggtgttcgtgccattcctctcactggtcgtcgtttttgcgctcaccatactggtcatcgggcctctgggaatatggctcggcggtgggctgggagcggccacagcatggcttaacgcgcacgtgccgttcctattcgcgctcatcatcccgatgctctacccgtttctcgtgccgctcggtctgcactggccgttgaatgccctgatgctgatgaacattcaggcgctcggctacgatttcgtccaaggtccgatgggtgtatggaactttgcctgcttcggtgccaccgctggcgtgctcgtgctggccgtacgcggcaaggattcggccatgcggcagaccgcggtgggggcgttgctcgcgggattgctgggtggcgtttcggaactgagcctgtacggcatccatctgcatcaccgccgcgtctaccgctggctgctcgccggctgcgcggccggcggcgtgaccagcgcggtgcttggctggctgttcccgtccgtgctgccatccggtcagatggtccggggcgtcacgaccacggcgttcgccttctcctcgttgctgacgattccggtgtttgacagagtgtgggtgtacgcgctgtccatcgccgttgcgtttgtaatggcgatggtgctgacggtgctgttcgggtaccgtacgccgccgcgcgccacggaggcgcagatgatctcggcgggcgagaacgtacgctcgcaggatgcggtgagagggattggcgcgacatcgtcggatgcggagtctgcggaagattccccatcgcggcctgcctccgatcggactcctgactccaacgccatcctgtcgccggtcgccggccggttgatgaatctggaagcgactggcgatccggtgttcgcctcccgcgcgctgggggagggtgtaggcgtcgtgccggagacggccggcgagacggccgtgctggcaccggtcagtggcacgctgaaaaccgtggcccggaccggccatgccttcggcattaaaaccgatgacggcatcgaagtgctggttcatgtcggcattgacaccgtcaatatggatggcgagggattcgtcgtggccgtgggcaaaggcgagcggatcgcggcgggagagccactggccaccgtggatttcggcaaagtcgcggcggccgggcacagcgttgtggtggtggtgacggtggtcaacgccgctgaactgaccgtggtcacgccgttgatcggcgacggtagcagcgacgacaacggcggcgactgcaaaaccgtatcagccggcagcccgatcatcgatgtggaacaatgacgttgcgaaaggatgccatggaaatactgcgagtgttcaacaacaacgtcgtgctcgccaaaggcggcgacggcggtgaggtgattctcaccggccgcggactggggttccaggccaagccggggcagacggtcgacgagtcgaaagttgtgcgcaccttcgtgccatcggacgggcgcgaccctgaccatctggcgcagatgctggcggacattccgcccgaaatcatccgcgtggtcgtcgaatccatgcaggagaccggactgggggagcgcgagaccggcagcaccacgctggtcatggccctgtcggaccacgtggcgaatgcggtggagcgggtgcggcgcggcatcgacatcacctacccgctgctcggcgaggtgagcaacctgtacccgcaggaatacgcgcaggggcgtgcgatgctcgcatcgctcaatgcacggctcgacgtcacgctgccggacggcgaggccaccgcgcttgccatgcatctggtcaacgccggcttcgccaccggcgacctgtcctatacgtacacgatgacgggcgtgatccagcaactgcttgacatcatcgaccacagctacggcatcacgttggaccgcagttccgtgaacgtgggccggttcatcacccacctgcgctacctgttcgtacgcatccaccagcaccagcaactgacggacgagccggcaccggtgatgaaggtgattcgtgagtcctaccccgctgcgctgcgatgcgcgcgaaccatcgcctccctgctcgaactgcgcctcgacacggatatcagcgacgacgaaatcgcttatttggcgatgcatgtcgcccgagtcaccggccacgcatcgtagtaacggattagcggattggcgaatcagcgaatcggctcgagtgtaccggtcatttcggcgaaattcgaggtggcatttgaagcagcggcctgcgcggtcttttccagcgcggaggcgtcgggcacgcgcacgatcagcgcgcggtgatccaccgagaaacggatgtggcgggtttccggcagcatgtcaccgtccacctgcgctttggccggcttttccaatgtgatttcggcactgacaccctggacctgttcgatggtcgagttcgtggacagcgggttctgttcgggcttgccgatgatcgtctggtgcaccacgtcgccgaacaggttggcccagccgaggatgccgccggtggtgtcgatgatttcgaagtccagcagaccatcgtcataggatgccgccggcatcagcgagaacatgggaatctggccgcagttgccggccatcaccgtgcggaagtcgagattcttgatggtgtgggtcgagccgtcggcgctggtgactgtcagcgtgccgcggaacttcggcgcgaacaggttcttcacgccgcccacgaagtaggcgagccagctgatgttcgccttgagctcggggttggtgtcgtcgatcatggccgcatcgaagccgatgccggcgatgatgaggaaggcgtggccgtggtcgtcctccgggtggtcgagcagggtgagacggcccatgtccaccaggcgggagccgtgggaggtggccacggtcagcgcggcgtcgatatcgtccacgggaacgcccatattgcgggcaaacaggttgccggtgccgatggggatgatgcccagcgcatggccggtgccggagacggcgctcgccaccgtgcgcaccgtgccgtcgccgccgaccgcgatcaccacgtcggcgccgtcctccagcgcctcaagcgcgcagaccctgccgtccttgtcaagctgggtgtcgtagaagcggatgcgattgagccccttggcctcgcagaacctctggatatgcagccggcgggcttcggcctgcggtttggacggattcacgatgaaggcgtactgcacctcgtcgtcccggcgcttctccagcgtctgagccagcttgcggcggcgctgcgcgcgcagggcgatgacgatggcggcgatgagcaccaccacaatggcgattgcggcgatgatcagaaacacggtgagggcaggctgaggcatggctcctattgttatcggtggggaggtcgtttgcggccatggtgcgccgtacgtgaacatttcctgcacgcaacagccccgtggggcgcgattatggttcaatcgcgtctcatctgacgaaattggccgggtggacccgtccgcggactttcccgggcttccctgtgatttccgcgtgactcccgcgcattcggccattgtcggtgtctgcttacgcggctagtctggtgcccatgcttgatattcaattcatccgtgaacacaccgatatcgtcaaggaatcccagcgcaagcgcggcgagtccgtggaactcgtcgacgaagtgctctcctccgacaccgcacgtcgtgaggcgctgaaggccttcgaagaggctcgcgcccagcagaaggagatcggcaagaaggtcgcctccgccccggcggacgagaaggccaagctcatcgccgagaccaaggaactgtcccagaaggtctccgaatacaagtccaaggccgattccgccgccgaggaatacaccaccgccatgtggaagctctccaacatcgtggagcccgaagctcccgaaggcggcgaggacgactacgtggtcgtcaagaaggttggccagattcgcgacttcgcggccgaaggcttcgagcccaaggaccacctgaccctcggcaccggcgtggccggcatcgacatgcgccgcggcgtcaaggtcggcggctcccgcttctacttcctgcgtggccaggtggcccgtatgcagatcgccatgctcaccatggccgtggaccaggccgaggagcacggcttcacgctggccatcaccccgacgctggtgcgccccgaggtcatgcgcggcaccggcttcctgaactcccacgccgacgagatctaccgtctgcgcgagcccgacgaccagtacctggtcggcacttccgaagtggcgctcgccggcatgcacgagaacgagatcctcgacctcggcaacggcccgctgcgctactgcggttggtcctcctgctaccgccgcgaggccggcgccgcaggcaaggacacttccggcatcatccgcgtccaccagttcgacaaggtggagatgttcgtctacgccaagcaggaggactcctacaaggagcacgagcacctgctggccatggagcaggagatgctcgccaaggtcgaagtgccctaccgcatcatcgacaccgcagccggcgacctcggctcctccgccgcccgcaagttcgactgcgaggcctgggtcccgacccagggccgctaccgcgagctcacctccacctcgaactgcaccgagtaccaggctcgccgtctgaacatccgcgagcgtatggaagatggcggcacccgtccggtctccacgctcaacggcacgctggccaccacccgttggctggtcgccatcatggagaaccaccagcagaaggacggctccatcgagattccgcaggccatgcgcgcctacatgggcggcaaggaagtcatcgagcccactaagtgggaggcctgagtctcatcgtgctttagctccctttaatgggggagctgtcagcgtagctgactgagggagagatcgctaatagccagcaggcgaatccaagaccgaccgcactgccgaatatcaacatccctcccttctgtataatgaatacttgcgcgtgtgaacgcgcatcaggacaggtgtctgagcggcctaaagagacggtcttgaaaaccgttgaggggcaaccctccgcgagttcgaatctcgccctgtccgcgaaccgaggcctgggcaacatgcccaggccctttttctttttctggaacctgtcttcttgatcgccaccggggtgctgatatattggtttgtaatgccgtaacatgcggtgtccccgttgatatgacgggccaatcggcgtgagccgataagaaaaggcccgacgtttgcggcatcgggcctttgcgttgattaccggcttgcgcttttaatcaacaaggttgcaagatgaatcatatcacgatgcacggtagtctgaccgtgaacgggcgcaccgtgatcgtccatgtgggcgatggcgaggtgaacgccacggttgacggcacgcacttcaacgtgcgtagcctgtggcagctctaccagttgctgagactgctcgtgtagcgtctcattaaggcgcggtgcccccccccctagtcgggtatcgcgccggcaacctgaaaaccgataatgttggcaagtgcttgcaatttgtggtggacgattgcaagctgacgtcttggattgttgccgctatccaatatctcattaggtctaccggtggaccaaaagtacgttgctttgtaaggggagttaatgaaatgaacaaacccgcacaatcgagcatcgaatcggtttaatgccactcacctcaacgggacgcgcggtaattgttagctaagttgacaataaaagagcaaaggcctaaattagcaatcagtcatcacgctgaggtgatgatttcactaggaaggagtagagatatggtatcgcacaataagcgcatcgtggctgctcttgccgcggtagcagcaatgggtattggtttggccggttgcggcggcagcgacactgccggcgacacgaagtccggcagcgatggcggtgtggtcaacatcacctatatgcatcgtctgcccgattccgaaggcatgaccttggtcaacgacattgtggccaagtggaacaaggagcacccgaacattcaggtcaaggccaccaagttcgatggcaatgccgccgacatgatcaagaagctcgagaccgacgtcaaggctggcaatgcgccggatctggctcaggtcggttactccgaggttcctgaggtcttcaccaagggccttctgcaggatgtcaccgatgaggccgccaagtacaaggacgatttcgcttccggcccgttcgcactgatgcaggtggacggcaagacctacggtctgccgcaggacaccggcccgctgacttacttctacaacgccgctgaatttgagaagctcggcatcaccgtgccgaagaccgctgacgagctcattgagaccgccaagaagaccgctgcccaaggcaagtacatcatgaccttccaacctgatgaggccatgatgatgatgtccggccaggccggcgcttccggtccgtggtacaaggtcgacggcaactcctgggttgtcaacacccagactaagggctccaaggccgtggccgatgtctaccagcagctgatcgacaacaaggccgccctcaccaacccgcgttgggatgcatcgtttgataactccatccagtccggtcagctgatcggcaccgtggccgccgcttgggaagccccactgttcatcgattccgccggtggcactggtgctggtgagtggaaggtcacccagctcggtgactggttcggcaatggcaccaagaccggcgccgatggtggttccggtgtggccgtgctcaagggttccaagcacccggccgaagccatggagttccttgactggttcaacacccaggttgatgaccttgtctcccagggccttgtcgtggccgccaccaccgcggatgccaagaccccgcagaagtggtccgactacttcagcggacaggatgtcatggctgagttcaagaccgcgaacgacaacatgggtgacttcacctacatgcctggcttctccgcagtcggcgctgcaatgaaacagaccgccgccaaggctgccgatggttctgccaaggtttcggatgtgttcgacaccgctcagaagacctcggtggatacgctgaagaacctcggtctgtccgtcaaggagtgacctcactaggtcttgtcaacgggccggcttgaaatagccggccgtccaagacctccgatgcctcgcatcaccatagcgaaaggccggggcacatactccggccttccgtattgtttgggggtattgctgcaggggcgctgtggcccttgtcatttgttttactgttctttgcgaagacaggttttgtattatgactgcatccactactcaggcgaagggcaaagcacctaggcgtgccgccgccaagccgaagcggtccggcgctcagaagcgcgagaaccgcaccggctgggcgttcatggcaccgttcgccgtcctgttcactttcgtgttcatcttgcccatcatctgggccatctattccagcttcttccgtcaggtcaccgagggcggtggcgcatacggcggtggcgagctggtcaataaattcgtaggattccagaacttccagtatgctattacttccggcaacttctggtccggcgtcggcagggtgctgctctacaccctgattcaggtgccgatcatgatcatcgccgcactggcgttggccatcgtcatcgactcgttcgtggtcaagcatgtcaccggtttccgtctgggctacttcctgccctacgccatccccggcgtcgtggcctcgattatctgggtctacctgtacaacggccaaatctcgccgatcgtcaagggacttgccgccatcggcgtcaatgtggacttcttcaacaagaacatcgtgctcggctcgatggccaacatcaccacatggaccttcaccggctacaacatgctgattttccttgccgcactgcaggccatcccgcatgacctctatgaggccgcccgtatcgacggcgccaatggttggcagattgccacgaagatcaagctgccgaacgtgcgtggcgcggccctgctggccatgctgctttccatcgtcggcaccattcagctgttcaacgaaccgcagatcatgtctacggctgatccgggtatttccaagtcgtatacaccgatgatgatggccatgaacacttctcagggcaccattaccccgtctggtgacggtccggcctcggccatcgccattgtcatggctctgatcgcaggtgtgcttgccgtgctgtacaccttggccgaaaggaaggtgaacgagtaatgagctccgcaaccgttgaagaacgcgcccgcaaaaaggccgagcgcaagctcgaaaagcagcgtcaggctgcgcaacacgatttgcctcgctccatgcgaccgtccgcggccgtgaagaccctcaccgtggtgctgctggtactggtgttgatctacttcctgttcccgatttactgggccatcatcgcgtccaccaagacgccggcccagatgaccggtagcaacggcatgtggtttgctgtgccgcttgaccagctgcccaatgccatcgccactaactattccaaactgcttggctggactcgtggcaacttctggcgctgggtgctgaactccctgatctactcgggcgtctcggcattgatcggcaccatcgtgtctgtgatggctggctacgccaccgcaaaattcaacttccgcggcaagaacgcggccatcggcatcattatggcctgcatgctcatgccgtccgccctgctgaccatcccgatgtactcgatcttccacacgttgcacctgaccaacactatgctctcgatcatcatcccgtgctgcgtttcgccgttcggcttcttcctgggccgcacgtacgcacagagttcggtgccggacgaactgcttgaagccgcccgcatcgacggcgcgagcgaggcgaggatcttcttcaccatcgtgctgaggctcctggccccggccatggtgacgattttcctgttcctgttcgtggccacgtggaacaacttcctgctgccgttgatgatggtgtcttccgacaccttgaagcccgtgaccctcggtctgtacggcatggtctcgctggccacgttcaccgatcgcggcgccctgatgatgggtgcgttgctcggcgtgctgcccgtgatcgtgctgttcctcggcctccagcgctactggcagtccggcctcgccgccggtgccgtcaagggctaaccaatccgctgcccggcatgtcgtgtcactccttccggtgccgggcaacgtccctcccatattcagtgacacgattccaatcgtccggcgtcaccgtaagcgtcaaggatctacgcagtcagggtcccagggcccgcgatgacgccggtcattttgtatgcgacgaattcgtcgctttgtagttttttgatgaccaaccccacaaaggagcactcatgaccagcaccggccgcttcacgctgcccagtgaagagaattttgccgaaaagaccaaggaactcgccgaattgtggggtgcggacgccatccgcaactccgacggcacgcatctggacgaggcagtgctcgctcttggcaagaaaatctacagcgcctacttcccgacccgcgcccacaacgagtggatcaccctgcacatggacgagaccccgcaggtctacctgctgaccgcccgtatcctggccgagtccaacgcggtggatgtgccgctgatggacggtttcttcgaggaacagctcaagcctaaccgtgacgccgaccctcataagtactgggaagtcgtggaccgcaccacgggcgaggtcgtggacccgtccggctggacgctcgacccgggcgaggacaccgtgcacgtgaccgctgccgtgccgatgcacgaatacacggtgagtttcctggcctacatcatctgggacccggtcgagatgtacaaccacctgaccaatgattggggagacaaggaacacgagattccgttcgacatctaccatccggccacccgcaagttcgtgttcgatacgttcgagcagtggctgaaggacagcccgcaggtggatgtggtgcgtttcaccacgttcttctaccagttcacgctcctgttcgatgccaagcgtcgcgaaaaggtggtcgactggttcggttgcgcctgcaccgtgagcccgcgcgcattggacgatttcgagaaggagtacggttaccgtctgcgtccggaggatttcgtggatggcggtgcctacaactccgcgtggcgcgtgccccgcaagtcgcaacgcgactggattgacttcctctccggattcgtgcgcgagaacgtcaagcggcttgccgacatgtcgcacgcggcaggcaaggaagccatgatgttccttggcgaccagtggatcggtaccgaaccgtataaggacgggttcgaaaagctgggtttggatgcggtcgtcggctccatcggagacggcaccaccacccgcatgatcgcggacattccgggcgtcaaatacacggaaggacgcttcctgccgtacttcttccccgacacgttctacgagggcaacgacccgagcatcgaaggcctcgacaactggcgtaaggcccgccgcgcgatcctgcgttcgccgatcggccgtatgggctacggtggctacctctccttggccgccaagttcccgaagttcgtggacacggtgacccatatcgccgacgaattccgcgacatccacgaccgcaccggtggggtggccgccgaaggcgagctcaacgtggcgattctgaattcctggggcaagatgcgttcctggatggcgttcaccgtggcacacgccctgcccaacaagcagacctactcctactacggcattctggaatccctgtccggcatgcgcgtgaacgtgcggttcatcagcttcgacgacgtactcgcgcatggcatcgatagtgatatcgacgtaatcatcaacggcggcccggtcgacaccgcattcaccggcggcgacgtgtggaccaacccgaagctcgtggaaaccgtgcgcgcctgggtgcgtggtggcggcgcgttcgtgggcgtgggcgagccgagctcggcaccgcgcttccaagcgggccggttcttccagctggccgacgtgattggcgtggacgaggagcgctatcagaccctctccgtggacaagtacttcccaccggtggtgccggaccacttcatcaccgccgatgtgccggtcgacccggcggcccgcgaggcttgggaacaggccggctaccgcatcccgctgagcggttgcggcggtggccagtccatcaagccgttgggcggcatcgacttcggcgaacccgtgctcaacacgtatccggtcaatgaaaacgtgaccctgctgcgcgcggacggcgggcaggtgcagctcgcgaccaatgattatggcgaaggccgcggtgtgtacatctccggtctgccctattcggcggccaacgcccgactgctggaacgcgtgctgttctacgcctcccacaacgaagacaagtatgcggcttggagctcgtccaacccggagtgcgaggtggcgcacttccccgagcaagggttgtactgcgtaatcaacaacaccgatcagccgcagcggaccacggtgactctggccgatggcaccaccgaggacttcgacctgcccgacagcggcatcgcatggcgtgaagcctgattcccgcgttttggagaacggacccatcatgaccgaaagcaatgaagttttattcggcatcgcctcgcattttgcgctggaaggtgccgtgaccggcatcgaaccttacggagacggccatatcaacaccacctatctggtgaccacggacggcccccgctacatcctccaacagatgaacaccagcatcttccccgatacggtgaatctgatgcgcaatgtcgaactggtcacctccactctcaaggctcagggcaaagagacgctggacattgtgcccaccacctccggcgccacctgggccgagatcgatggcggcgcatggcgcgtctacaagttcatcgaacacaccgtgtcgtacaacctcgtgccgaacccggacgtgttccgcgaggccggcagcgcattcggcgacttccagaacttcctgtccgaattcgacgccagccagctgaccgaaaccatcgcccgcttccacgacaccccgcatcgtttcgaggacttcaaggccgccctcgccgcggacaagctcggccgcgccgccgcatgccagccggaaatcgacttctatctgagccacgccgaccagtatgccgtcgtgatggatgggctcagggacggttcgattccgttgcgcgtgacccacaacgacaccaagctcaacaacatcctcatggacgccaccaccggcaaggcgcgtgcgatcatcgatctcgacaccatcatgcccggctccatgctgttcgacttcggcgattccatacgctttggtgcgtccactgctctggaagacgaaaaggacctcagcaaggtgcatttcagcaccgagctgttccgtgcctacacggaaggattcgtgggcgaactacgtggcagcatcaccgcgcgcgaggccgaactgctgccgttcagcggcaacctgctcaccatggaatgcggcatgcgctttctcgccgactacttggaaggcgatatctactttgccaccaagtaccccgagcacaatctggtgcgcacccgcacccagatcaaactcgtgcaggagatggagcagaaggccagtgaaacccacgccatcgtagccgacatcatggaggctgccaagtgagccgtcagtcgaaccatacccgaaccagcatgatgggggccgagcaatgagcgatcagctgaccgaggtatacgccagcatcgacgccctagtcgattacgccttggatcatctcgacctcgatccacgcaacgcagactggacccgcaaccaaatcttcgccctcttccacctggattcctaccccggacccaaaaccacaacgtcggcggcgtcagtgtcagacgcagtccaagacattgtcggcagccgaagccaggccccctctgacgaaaagacccccgaccccctactcgccgccttccgcgccgccgccacaaccgccggcctcttcgatccggaggaaggcccggcctacgccgacaccatcatgggcatcctctccgccaaccccgccgatctcgacgaccggttcctgctcatcgagcacagggacggcggcatggccgccatgcaatggttctacgactactgtgtggccaacaattatgtcaagcgtgcccagctcgaccggaacccgcgcttcgactcgcacgggctgacggtgaccatcaacctcgccaaacccgaattcaagaacatgaagaaggcggcggccggcaacgccgtgtccggcggctacccgaagtgcacgatctgccatgagaacgagggcttcgccggacgtgacaagcgcacgctgcgcaccctgccggtcacgctcggcggtgagtcatggttctggcagttctcgccctacggctacttcgaccagcacggcatctgcgtgaacaccgaccacacgccgatgcatgtggaccgcgacaccttcggccatctgctcgacttcgtggaccgcttccccggatacttcctcggatgcaacgccgcgctgcctcgcatcggcggctcggtgctcgcccacgaccactaccagggcggcggcgaactgctgccgatgcacaaggccgccacttgggccgccttcacgctcgccgactatccggacgccgtggtcgaaatcctcgactggcccggtaccgccgtgcgtgtggtgtcgaaaaaccgccagagcatcatcgacgtatccgacatcatccgcgaggcatgggtcggttatgacgacgcggcgaacggcatcgccagccatgacgcggacggcaaccgccaatccgccctctcgcccagcgcgatcatcaccgaacgtggctatgagatgagtctcatcttccgcaacaatgcgatcagcgacgagtacccggaaggtattttccatgcacaccccgaatactggccggtcaagcaggagccgattggactgatcgaagcccaaggcctgttcatcctgcccggacggctcgtcgaccagctcggcatcgtcgaggaggcgctcgccgaaggccgcgatttgcccgatgaagtcagcgaattcagtctcgaatggggcgaactcgctgaaacattggccggaaaccgcgaccgcgaggccatccaccaagccgtacgtgacgagctcggcagcgtctgctaccgcatcctcggcaacacggccgtcttcaagcagaaagccaccacgcaaacattcctcgaaagtcttggttttgccgctaggtgaaacaggtcaagtgaagtaagctcaatactgaaggaaaaccgaaggcaagtccttccaaaggaggagatatgactactgttctggttacgggcggtgctggattcatcgccacccacaccgacatcgaactgctcgacaagggctacgacgttatttccgtagataactacggcaactcgtctcccgtggcgcttgagcgcgtcgagcagatcaccggcaagccggtcaagcgttacgacggtgacgtgcgcgatgaggcgcttatggaacgcgtcttcaccgaaaacaacatcgattgggtcattcacttcgccggtctcaaggccgtgggcgagtccgtggccaagccgatcgaatactacgacaacaacctgtactccacgcttgtgctgctcaaggtgatgaagaagcacaacgtcaagaagatcatcttctcctcctccgccaccgtgtacggcacgccgaaggaactgccgattaccgaggagacgccgaccggcggcaccaccaacccgtacggcacctccaagctgttccaggagcagattctgcgcgacgtacatgtggccgatccgtcctggaccatcgtgctgctgcgctacttcaacccggtcggcgcacacgagtccggcctgctgggcgaagatccgaagggtattccggcgaacctcaccccgtacgtggccaaggtcgcggtcggcgagctcaaggaagtccaggtctacggcgacgactacgacacgcccgacggcactggtgtgcgtgactacatccacgtggtcgacctggccaagggtcacgtggccgtcattgaccacatcgacaaggaaggcgtgttcgtctacaacctgggtaccggccacggctactccgtgcttgaggtcatcaaggcttacgagaaggccgccggccatccgattccgtacacgatcaagccgcgtcgccccggtgacatcgccgcctgctacgccgacgcttccaaggcggagaaggagcttggctggaaggccgagctgaccatcgacgacatggccgcctcctccctcaactggcagaccaagaaccccaacggtttccgcgacgccgagtgatatgagcagatgagctccctctgatgagggagctcatctgtcgtttatcacacaatgcgcctatcggcggcccagcgggtgagctcggtgcgattcgaaagctgaagctttcgcagcaccgagctcacgtgcgtttcgaccgtcttgatcgaaatgaacagttcggccgccacctctttatacgtgtatccgcgtgcgatcagccgcatgacctcctgctcgcgggcggacagccggtccagctcctcatcatgagcccgtgccgcaccatcagcgccgccatcagaccccgccgccggcacaccctgaaaggccgaaagcacaaaaccggccagttttggcgagaacacggcatagccctcatgcacctgcttgatggatgaaatcaaatcagcgccggtaatcgtcttggtcacatagccctgggcgccggcgcgaatcaccgcccccacatcctgcggcgcatccgaaaccgacaatgccagaaacacggtggtgggggagtagggccgcgatttggcgaggatctcggcaccgccgccaccttcaccgccgggcacgtgcacatccagcaacaccacctgcggcttggtctgtgcgatcatcgccaccgaaccgggcacgtccgccgcttggccgacgatatcgaaggaatcacgcaacgtggcgattacgcccgcacggaacatctcatggtcatcgaccacggccacacgaatcttggctgtctcgttctcgctcatcgatgttctccctgcgccgctttcagcgcgatcggcatatgcattctgacctcggtgccccagccggccctggacactatctccactgtaccgccgcgccgtttgacgcggccgataatcgattcgcggatgcccagccggtcgggtggaatggcgtccatatcgaagccttcgccatggtcgcgcacgaacacttcaaccatcgtgtcgctggcctcgcaatacaaagacaccggctcgccgccatgcgtgaccgcattgaccaacgcctgacgggtggcgtccagcagcgcatcggtctgggcgctcggccgcgcgtcgcccacggtgaccacctcaatcggcttgccgtgctcgtcctccacctcggcggcgatctgcttcaatccggctcccaccgaacgatccgatgtggaacgttcctgatacagccattcgcgcagctcgcgctcttggctacgcgccagggcgaatacggtggtcggttcctcggagtgcagctgaatcagcgccaacgtttgcagcacgccatcatgcagatgggcggtcatgtccgcgcgctcctcttcgcgctccttcaatgcctgctcgtgggtgagtcgttgcagcatcgcgttcgcccacggcatcaccgccaccacgataccgacgatcatcacgaatccgctggcaacaatgcgtcgaggagaggtgccccacccgggaatgctgacattatgcacatacaatgcccatcccatgaaaatcagtgcgatgccgcccaacatagacaacagctgcgtgccttgcggactaagattcatccatgccagtgcgatgccgcccaaccctaccagcagcggaagcacaatctgggcatccgcaccggtgctggtgagcagcagtccggtggccatcaacgcgaaaccggccaatgccacaacggccggtttcggagcacgttggatggcctcggacaatgattccggtgcggcagccgattcgtcgtcatgagcggcaagtggctgattgcctcgcgcaagcggcgcctgatcaacgggcactgtgcgagccgcagccgccaccgggtctccggcgggcatgaacacccacaggaatacataagcgatgatgcctgcgccgtagaggaaggtcagagcgatgaacgcaatccgaacccatgtcacgccgatgcccaagtgcagggcgatgcccttgcacacgccggtgagccagcggccctgccgggggcgcatcagcggcatgcgcgcgggcagcaatggttcgggagatgacgtcatactcctattgtgccgcgctcagggcgttgcggccggggttttacccggtgttcagggaacaatcagggtgttccccgagcgttgtggcagtggtcgggcggtgtaatggaatcatgagcaatccaaacgcgaatccgtatcagccacagccgcagcctggtccgcaaaaaaacaagacatcgcgacgcttcttcacttgggtgcgatccagtggactggttcgcggcgacgaccggtggatcggtggcgtatgcagcggcatcgctttacggcttggctggagccccacactagtacgtgcgttggtgattgtatgtacattgttcttcggcttcggcgcagctctgtacgcactcggctggtttctgatgccggatgtacgcgatgggcacatcttggccgaggacctcattgccggccaatgggactggaattgtcttggatgcttcctgttcctagccgtggcaatcgtgattccaggtgcggggtgggtttgtattgcgctcgccgccttagcgctatggttgttggccaaaagcggcattcgccagcaggaagggtacggattcggggcatctgcgccgcgaccggtttcacagcctgtgtcgtatccagctccacagcctgcctcatatccagccgcgcaaccggtccctctatctcctttgtattcagctccgcaacctgtttcacaatctgtttcacgaaccgcgcctagtgtttcacaacctgtttcacagcctgtctatcagtcgatgcccagcgtgatgcccggcgcggtgcccggcgtgatgcccggcacagtacccaacgggccgtttgcccccgaccgtatgaatgcgacggcctatgcccccaccgagtccaagcgccgcaagccggcgggcccaatcgtggtcttgagcatactgggccttaccttcctctcctttgccggtctgatgggactgatttgggtaaacgacatgggcattatcggcattatgcgtctgagcaccatctggattgccgcagtatgcatagtgatggggctggtggtcatcatcctcggattcagagggcggcgtaccggtggtctgattcctctcggactggttgccggtggatgcgcgctctgcatgaccatcgtttcaggcacgtatggcgtgtactaccgtgatcttggtgccagcggcatcaatactgttgtttcactgagccaatctgtcagtgcgagaaacagcgacggcatgaacgatgtgcaaaaggatggcatcttcgttgccgatgccagcgatgccacgttcgaaacattgcagcaaggtgtggcgttcaacggtgaaaactacaacaccgatcaggcaatcattgattggtccgattgggacaagacacatgggccgcacacggtgaagatgctggatggcaaaacttccatcagtaattgcccggtcggtaccatcaccatagccgcaacacaggcgcaagtgcatatcgttctgccggattcctgcacttacgccttcggcaccgccgactcctacttcacttcgagtggcgttggcggcaaatacgagatggtatacaacaactacatgggtctaagctttggtttcttcgaagctgaaagtgccaccaatcccatgaatgggcctgattacgaatggttggataagggatccgccatgccggacaacggcccagaattaaaaatcaatattccctatgcggtggaagcacgtgtcaacgtggtgtacgcctccgattggaaaggctccacgttccagccgcttgccgatatatacgatggcaacagcacaagcaagaacacaaccgaacaatcggaatgatcaagccgttacaaccaggagatggaatcatgactgatgaaaccaaggaattcgcctccatcgaggatgcgacaccgaccacggccataccttccgaaaccgacgcgaccaccgcgacaacaaccatggtgaccgtcgatgaccgaaccgataccacggtgctgccatccgcagctgatgatgacgaaacggctgtgctgcccgtcaccgacaatcatgcggatgcgtcggtctcggatgtggatacgcaggcgacaactgcctctccatcgcccatcgaaccatccacagatcggattgccctggaaacagttgccgatgccgtggagggggatggtgggccgattccatctgccgatgatgtaccgatgtacgcagcatcttcagcgcaaccttcctatgagcagtctcagaccgccggcaaaccatgccagcctggggggagcgccaagaacgtccagaatgctaaggatgtcaagagtgccaagaacatccagaaacagagcatcagcgcgcttactgtggtattcggactattaggcgtgattatcggcgtgatcgcgctggttttcgggtgcatatctccggatcggatgatttcgctgttctcgccgaatccgcaattgctgacggctattatctgcgccgtagtgggacttattctggtaatagtggccgttgtatgggccatagtcggtgccgtcaagaagagaaaatagcgttacaaccattgcattacggtcccagtagaagcacattatgacgggagccgaccgttctatgctgatggggggaggcatagtaactatgaaacggatttcggcgcggcgggtagcgagcgtcatcgccaccgcgatggcgatgacgctggtattcgccacacttggctgggcgatgatgccgcaatggaacacacggccctacaccaagcacatcgctatcgcttctgccgacaccaccatcacccctgcccatgcgaacattccccacgaggggcgatatagtacgcgtgaaacccgactatccatcaagaccggcgacggcgtcacgctacccgccgtactacgtgaaccggtcgacgctcccgggccacgcccggcttgtctgttcattcacgggtccggtaccagcggtgccgaggatttcggcgatatcgccaacgccatggcctctgccggcatcgtgaccttggtgccggccaagcgcaacgacaactacaccgtgctgcatcgcgactacccgcgttttgctcgcgaatacgggcgttcgctcgacgtgctgcgtggcataagcggcgtggaccccgccaaaaccggcatctacgccgaatccgaaggcacctggatcgccacgattctaacctcgaaacggcaagacattgcctttgccatacttacatccgcaccggtgttcaatggacgtgagcaaatggccatggctgtcagcgcctatacgcatgaggccggcgcgcccaagcccgtggtcaaagacatggccaaattgatgtcgctggactacgcgccattcgatctggcctatgccgactttgatgccgaccagtatctgaaatccctcaccatgccggtgctggtgaactacggcacctacgatacggccatgcccatcgaacagggggcgcagcggatcatcgccacggccaacaagtccggcaacgagaacgtcaccgtacgctatttcgccggcaaccatcagatgcgggctggtgagggcttattcaccccgaacctgccattggccgaaggctatacgcaagcgctggaaaattgggtgaacggtgtgactgccggaaccaaagccgatggatgggcaacgccccaagtcgccggtgcgacacctcaccagcgcttcgccgcgccgcaacgtaccagatccggtatcgtcggctcgctcggcgtgctggccggtctgatggtggcagggcccgtgctgatcgtgatggcggcgatattaggtattggcttgactgtgttttcttggctacagacgttgctggtcgggcgacgtagtgtggcgactgtgcgggccatgcatgcgacgccgagtgggctgggagccgcccaacagcgtacgttgcacggcattgccggcttatctgccggtatcggcacagcggtgatggtgattaccgtgctgttgtatggctatatgagcgccgtaggcgtatcggctgtattggttatgcctcaaccgcagttgttttcccttgggtggagggcattgcaggtgctgaccgtgctgttggtcgtgctgttcgcgtgggaactggaacgtatgtggcggtatcgcgccagcattatcggcgtgcgtcgtgtcatttgcgtgatggtgacactggctgcacttgtcacattgacgatattgtctttctgggggttgttcagtctgtgatattcacggtcgttaccggctccttcccgaatatgtgccactgagtcgccgtgagcgtcacaaattcgggaaggtggatggggcgtgacggcgtggaggcactgtcgtcagcgctgagcggcttcagcctcatccaaagtgtcgaaaccgccgagctggactgtgtgcaacaaggtttcctcagtgatattgcgttgcgggctggctgcggcgcgctcgctaatcatcacctcgtagagctggaaggtccgttcggaatacgtaccaagctcgccgcgcagataggtttcgaatgaggtggcagatggtgtgtcttcggtggtggtgagtacgcgcatcgcctcgccgagcttggggtagcgctcgcggaaatccttggcccaggcgacctgctgggcgatgacctgttcctgacgggccacgcgctcttcagagggacgcggaatatacggctctatgttcttcgtgaaatcttccggtgcggtggaggccatcatgcggccgtatttttcggtcacgaggttgcggcccacgtggtcggccgcgtcaagatcagcggcatagctggtgagtaatggccgctcccatgtgaggaactgggccaaccgcatctggtggaacaccggccagttgccttggcatgccgcgcgtccaccctcattgttggtgcgctggaactgatcccattcatgacgcacaatagcctcgcgcagttcatcatcagtcagttcgttggtcatcgacgttcctttcgctaatacctccctctgatgagggaggtggcacggcgaagccgtggcagagggagcttgaatctacaaacttttaagcaccggatcatcagaggcgatgtggtcctcgacatacgggcgctgccattcgaggaaggtctcgccggacgtggtcaggtgttcgcgtttgagttccttgacgatatccaccgcaatctgctccacaatatcgttgattttctcgattgctggagccgcgcccttgccgccttcgccaaatccggccccgccatagcaggctgccgaactcaatcgcatcacggtttccaactgttcgcccacgttcggcaacagcgcgaacatcgagccagacagcttgcgcaatgctgcgaactgccacttgtaatacggcatatagcccaccaccatcggcacgttaaccaggaacaccaacgaggcggtggcctgcacgaactcgtggatggacagccatgcggccgcgccgtcgccgcgcttcaacgaacgcggcagattatattgaccggcctgggcgatcatgccgagtcgcttggagatcagcgcgagccgcacatcgtcgggcatgttcttgaacccttggcgcgtcttggaaaacagaccggtgggatcggcgaacacctcgccattggtggcggcggccaaggtcgattcctgaagcattagccactcatgcggcgcggtctgcgccggcgcagtgcgatacccggtgatcgactcaaagaagtcaccgatgcggaacacgccgtcacggcgattcgcgccctgtgcgcgcggcgtgacgggggagagcggtgcgtcaatcggagtcgtcatcgcttccgccacatcagaggacgccgcgcctgactcggcagtggcggtatcgtccgtagcggtgccgggggtgggtgcgtttgccgcatcgggtatgacggtggagcctgcacctgcggaggggaatgctccggaagcatcggacctggcatgcgcctcgaacgtcacgcggccttgcgcatccacgctgaatttgcgcggcagtgcctcgtaatcgacctcaagttgctcgccgatcgccgcgtaatcctcatccgtaagccacaggcagaagcgcgggccgaaatcgtggtcctgcgaatacgcatcatcgaatccgtagcattccgagccatgacccaccagaccggcggcgatacgcccggtatactgcggatacttcgccgcaatcatcggcttgcccatctgcgtccagaacgcgcgggccagcttcagtccggacaccgggcatgcggaaacggcctcggccgcgcccgcagaaccggtcgacaccgaaacggtggatggggaagatgccgcgttcgcaccggtcttgccctgtgccgggctgttcggcagccgcgagccggactggggcagcgcgcctgcatcgccagcaacacccgcattgtcaaccgtcaccccggcctgcgccgccgcttcctcggcctgccgcagattgtcggcggtgatacgccagtaatcggtgtccttgccgtaacattcctcgatcacggccagcgcatgccggtatccagtaaccgcatccgcataccgtctctcggcaaagcacacctgcgcgaagcccgccagtgcggaggcataatgcgcggaatgttccagatggccggtgcgatagatttccagcgccttggctgcatgccaatgcgcgtcctccaacttgtgttcggtcagcagagtcaacgccagattcgtgtgcgagctggccacgtcgatatccgcgtccgggttcacgctcgaggcttcgataatgcgcagcgcttcacgcaactccagttccgccttgtcgggccgattcgtctcgctgtagagcatcgacagattgttgtgcagtgctgcgagcctacggtcggtgggtgccagcgaatgccggcagacactctgcgcctgatgatacaaatcctcggcctgatcgtattgtttggccgcgcgcatcgaggtggcgcaattgattagcgtggtggcccacgcctcggatgtgccggtggtcaagcccatacgagcggccagttccagcgctcgctgcacaatccactgattctccttgtgccgaccttgcgagcgatagaagcccatcgtttcgttgagcacggtgagcagtccggcctcgtcgccggcgttttccgcgtccaccatcgcctgttccaagtatgggccggcttcggtggcagccgtgtggcgatcgaaaatcgcgtccagtccgttcaggaattgttgggtatcaaaggttgcgggcgattgatcggcatcgtccgcaacctggttcgccgtggaatcggcaccttgtgctgcggccgccgcatcggtgtcgtcggcatcgtctggaccatgcgcgaattgcgcggcgaattgtttgagcagtgcttcctcatccataccgccagacctccctgaatcgtgtctgatttcagtctattaatactgtgaacaaacacgtcagggagtttgctgtgagcttggtctcagtccaccttggtttcgcgcatgcggtgaatggcgtcggtatcggtttcgcagcgccacgagtagaaggccagcagccctacggcaagcagagccagcggcataccgcccaggccggtatagcgatagttcatcgagaaggtggtgagcatcgcgccgccgacaatcgagccgatggcattgccgaagttaaacgccacctgtacagccgcgccggcgatcagctcgccgccgccctggccggcttcggtcatcagcaattgctgtggagcggaagtaaagaacaatccgacggcgatccagaacgtcagtacagcggtcatcggctgattgcccggagtgatcagcaccagcaacaagccgaggcaggagatggactgacctattgcggccgcgccggcatgcctccaatggtcggtcagacgacctccaagcagaccgccgatgaccataccaaagccggcaagcatcatcagcatcggcaccagggaagacgaccatccgccggttttctgcagccagggggagacgtagctccaccagcagaacacaccggcattgccggtgaacacggcggccaaaatcacccacgggccacggcgggtgaggaacttgaactgaccggcgatgcccgcgtctttaatcggtgcaacgtacggaatccacgccaacgccagcacaatcgtcattgccgcccaagcggccaaaatgccgaaggcaagacgccaggaaaggaactcggccatcagggtgcccgccggtacgccgagcatattggccacggtctgtccggtgaccatcacggatacggcctgcgcttccttgcctttctccgccagagtcttggcaatgagcgtggccgtgccgaagaacgcgccgtgcggcaggccggcgacgaatcgcgcgacgaccagcatggcggcattgacggaaaacacggaagccagattgcctaccaaggcaatcgccataaacaatatgatgaggttcttcggcggcaccttgcggccgaacaccagaatcagtgtgccgaagcacacgccgatcgcatacgcggaaatgtaatggcctgcggtggggatgtccacgccggtggcggccgcggcctgcggcagaatacccatcatcacgaactcggcggcaccgagaatgaacgcgcccgaagccagtgcaagcagactcttcttcatggttcctctaattacttcagtattacttacaaaaacagtgcggcaatcgattgattcgagcgatatattacggtggtccgccaacaaatacgggccttgccgcgacgcggtttgtcgctgtgcgcggcgggttgtttaccgctgtccgatcgcttggtctgattgttgggttaggaaacgaaaaaccggattgctgatttctcaacaatccggtccagttgtcgggctggcgggatttgaacccgcggcctcttcgtcccgaacgaagcgcgctaccaagctgcgctacagcccgtttggcaacagacgtagatattacattgtggtggtggacaatgcaaatcggcatgtcgcgagtgttgcgtgatggtggattcgccgtgtgtacaggtctctcaagccttgtgcagagccggttttgcgtcatgtgagcgggtgttcagatggccgtacggtctgccgggctcataatcgccggccttgcgtacactgatgaatcatggctgaagttgtcgaaaataccgaaaacactgagaatgaaaccccggccgtcccgcagatgagcaccgtcgaacgtgcggaaatgctgctcgagcaggacgccaccatccgcgagaagatcaagtccggtgccacgctggacgaagccgtggacccctccaacaaggagttcggcccgctggctcaccccgagcaggtgcagatgcgcgtggccaagcgcgcgatgatgcttgaggccggcatcgccccctacccggtgcacttggacgtcaccgacaccatcgaggcggtccgcgccaagtatgacggcaagctcgaggctggcgaagagaccgaagacatggtcggcattgctggccgcgtgctgttcctgcgcaacgcgggcggcctgtgcttcgtgcagctgtccgccggtgacggtaccaagattcagggcatgatctccaagaaggagattggcgccgactcgctcaagcagttcaagcagctcgtcgaccttggcgatcacctgtacctcaagggccgcgtcatcgcctccaagaccggcgagctgtccgtattcgccactgagtgggctatcgcctccaaggccctgcagccgctgccggccctgcacaaggacctgaacgaagacacccgcacccgcaagccgtacatcggcatgatcgcggacgagaacatccgcaacatggtgcgcaaccgctccaaggccgtggcctccctgcgccgcacctttgacgaccacgacttcctcgaggtcgaaaccccgatgctgcagaccctgcacggtggcgcggccgcccgcccgttcaccacgcacatgaacgccttcgaccttgacctgtaccttcgcatcgccccggaactgttcctcaagcgctgcctggtcggcggcatcgatcgcgtgttcgaaatcaaccgcgacttccgcaatgagggcgtcgacgccacgcacgcccccgaattcaccatggtcgaggcctaccaggcctatggcacctatgattccatcggccagctggtcaaggagctcgtgcagaagaccgccatggacgtctacggctcgcacaaggtcaccctgctcgacggcaccgaatacgacttcggcggcgaatggaagaccatcagcatgtacgattcgctgtccgaggcattgggcgaggaaatcgtgccgaacggcggccctgagcatcccggcacctccgttgagcatttgggcgccatcgccgacaagctcggcgtggagcgcgacgacgtggagaaccacggcaagctcgtcgaacacctgtgggagcacttctacgaggacaagctttacgagcccaccttcgtgcgtgacttcccggtcgaaacctccccgctggtcaagggccaccgcaccaagcccggcgtggtggagaagtgggatctctacgtgcgcggcttcgagctggctaccggctactccgagcttaacgacccgatcgtgcagcgtgagcgtttcgtggcccaggccaaggacgcactcgccggcgacgaagaggcctgcgacatcgatgaggacttccttgaggctctcggcgtgggcatgcctccggccggcggtatgggtatgggcattgatcgactgcttatcgccttgaccggtgccacgattcgcgagaccatcaccttcccgctggtcaagccgctcgttggctgattaggcatactctggctcccctcagagaggggagccagagttatatatgaaagggattgcttatgtctatcggcttgtgggttcggggcgcgcgtcccaagaccttggccacttccatcgcgtcggtgatggttggggcggtgatggcgtacgtgcatatcgagcggtcgggcacctgcatcgcaatatatccagaaccggcctcctgcgccacggcccgtgaacagcagaccctgctgatggaccgattctggccggtgaccatcctgtgcctgctagtcgcgctgttcctgcaaatcgccgtcaactatgcgaacgactattccgacggcatccgcggcactgacgccgggcgtgacacggacgaatcgaaatcaggcaaaccccagcgactgaccgcatccggactagtaccggccaagcatgtactgttcgcggcgatgatttgcgccgccatcgcctgcatatgcggtgttgtggcggtcgtgctcgcccaagcatggtggttgctggccgtgggcgcggcctccttgctggccggctggttctacaccggtgacaagcatccgtatggatacgtcgggctgggagaagtcggcgtgttcctgttcttcggcttggctgcggtattgggcaccgaatacgcgctgtgcggcacggtggacgtcggcggactattgggtgctgtggcggctggcctgttctcctgcctgatcatgatggtgaacaatatccgtgacatcgacgaggatcgtgagcatggcaaacacacgctggccgtacggctgggggagtccggcgcgcgtacgttgctgattgtgtgctgcgtcatcgcatggatcatcgccctgctgatgtgcggtacattatggtggccgtggggtgcggtgctgttgctctcgggcaccggaatacctgtgcgcatggtctccagcgtgaataaacgtcaattccgcccggctctgcccgccgccagcttccagaccttgctgtttgcggtggtgctggcggttgccgtggcgctatgagagcgaaataataagacgaatactcgtgtttgggcgcacgcggctgtagactgaaccgtatgacttataaactagtactgctccgtcatggacagagcgcatggaataaaaccaaccagttcaccggctgggtcgacgtaccgctgaccgagcagggtgaagccgaagccaagcgtggcggcgagctgctcaaggagaagaacgtccttccggacatcgtgttcacctccctgctgcgtcgcgccatcaacaccgccaacatcgctctggatgccgcagatcgtctgtggattccggttcagcgtgactggcgtctcaacgagcgtcactacggcgctctgcagggcaagaacaagaccgagatccgcgaagagtacggcgacgagaagttcatgctgtggcgccgttcttacgccaccccgccgcccgagatcgacccgaacgaccagtacgcccagaacaacgacccgcgctacgccggcgatccggttccggaagccgagtgcctggccaacgttgttgagcgtgtgaagccgtacttcgagtccgccatcgagccggagctcaaggccggcaaaaccgtgctgattgccgctcacggcaactccctccgcgccatcgtcaagatgctggacaacctgtctgaggaagagatcgccaaggtcaacatcccgaccgccatcccgctgctttatgagctggacgagaacttcaagccgatcaagccgcgtggcgagtacctggacccggaggctgctgctgccggtgccgccgctgtcgccgctcaaggccagaagtgagcctaagccgctaacacggtacaagctgtaaggggagtcgcgcataatgtgtggctcccctttgctatgcctgccaaatccccatggggcggtgattaccccatggggcggtaaaactctcatggggcggtaaaaccctcatggggcggtaaaactctcatggggcggtaaaaccctcatggggcggtaaaactctcatggggcggtatgccagaatggcttaattccgcggtttcacatatccttcaaaccgccccatgggcaagttaccgccctatgggtgttttgccgccccatggatacgccggtgtaccgcccaaaagcaacaaaaaacggcgtccagccgtagccggatcgccgctttcgggcatcctcctcaaaccacaggagaacaagtgttcagttatttgcccaatgtgagaacaagtcccaatcagtcgatgtcggtgccctcgtcgcgggtcggctccttagtggggtcgaagccggagacgatgtacaccacacggcgggcggcggacacggcgtgatcgccgagacgctccaggaagcggcccagcagcacgatatccacggtctgctgacgggtgatgtcatcggacagcgctagatcgaaggtctggtggtgcagattgtccagcttgtcgtcagccaggatgatggcctcggcggtcttggcatcgcgatcgaagagcatggccaccagctggtcagcggtgttgtccaggaagtcgatcatctcggcgaacaccggctgagcggattcaggaatcgcggcggccggataggtgcggcgagcggcctcggccacgtggcgggcaagatcgcccatacgctcgaacgtggaagccagacgcatggtggaaacgaccacacgcagatcggtggccaccggattctgcttggcgagcaacttgacgcactggtcaatcacagaggactccagggcatcgatttcgatgtcgccgtcaatcacagtctgtgcggcttcaacgtcctgattcagcagggcttccccagctcctttgatcgccttgcgtacgttctgcgccatacggtcgaggtcgtcagcaacctgcttcagctcctcgttgaaaataacgcgcatttctctagcctttcatgcttgcttattgcaacctgtaccagtgtattattccagtacttgttccccacttcaacgtaggtaatggcaacctcaagttgttctactgttcattgggttgttcacctgaaattcatgttaccggcgtgccggcaaaccgcaatcccggcgtgtggtgtgaaagaatgggggcatgacacagatgccgctcgtcgccgcgattgctcttattgtcacggctgttttatttgtggtaggaatcatcacgctcatcgtgggattcgcgacacatcgagtgtccatggaatcgccgctggccgatgatgacgacaatgacgatctgtccgacgacaccgccacgctgctgtccatgctgccaggtgcgtccgtggtggtcgacgagcacgacgaggtggtccgctgcaatcccgccgcctaccgcctgggtgtggtgtcagatgacgccattgcccagcagcatgtgctggatgccattcacgaggcgcgcaagtccggtggcaagcgccagttcgacttgaccaccgatactccggagcggtacgtcgcagaccagaacaagggcgatcacgtcgccacgcagtccgtccaccgccccaactggctgaaggtgactgtagggcgtatcaacgagcagttcgtcatcgtgttgattaccgatgtcagtgatgtgattcgtttcgctcaagtgcgtgactcgtttattaccaatgtgtccgagcaattgttggcccccactgaggctctggccaaactcgccgattcgctggagtccggcaatctggacgaacagcaggtggctgccgacgctcgccaggtgcgttccagctgcagcaagctcaaccacatggtgtctgatttgctgctgctcatacgcgcgcaggagccgattacgccgtcttccgccaaccgactgaacgttatggaacagctcagggccacggcggcgcgactggagccgcaggcagccgaggctggcgtgcagctgaacatcaagggcgacgatgatctagtcatcaatggtgaggcggaccagatcgacagcgccgtgaccaagctcatcgaaaacgccatcggctattccaaggaaaatggcgtggtcagcgtgtccgcatccaaagacaaggatggcgaccgcgcggtgattcgcgtgattgaccaaggcacgggcatcgctaagaaggaccaggcgcgcatcttcgagcggttctaccggggcgtggaacagagcaatcgcacggcggatggcgtgggcctaggcttggccatcgtcaagcatgtggcgctgacccatcatggcgatgtgaccgtatggagcgcgcccgggcaaggcagtacgttcagccttacgttgccgttggcgcagtgaggtaaggaattggtggcatgccttgcatgccaccaatgctgtttgatgagcgacctgcggccgcggtctctccctcaatcagctacgctgacagctcccgtcatcagagagagcttgtgttgcgttactgtccgaggcggcggtagtcccagcggtcgaagtattcccagaccagcagtagcaagccaataatgacgccggccacgcacataatcaccaacggcattacgctgtagcccacggccagcagaatcagcacgacaatcaacgccacaatccatagaccggtaccgatggcaaacaccttacgcagatccacccgtacgggcttgggtgcgggtttgcggacggcagggtcaatgagaggcgcgaacttcatactcatgcactgtagtaagagtagggaggggcgtcaaacatccctccctacgatttattcaatcggcatcagttgagaccgatcaatgtgcatggcatatatggtcggcaatgcggggcatatatgccatcacaggtgctcgaccacgtagtcgacgcacttggtgaaggccatgacatcagccggttccaccgaggggaacacgccaacgcgcagctggttgcggcccagcttgcggtagccggcggcgtccacaatgccgttctcgcgcaggatggacagtacctgagaggcctggactcgctcgtccagatcaatggtgaccacggcgttcgagcgtgcgtccgcatcgacgacgaacggagcggcgtattcggagcgctcggcccacgagtacaggatggatgcggacttggcgcaacgtgtggtggcccaggcgaggccgccgttgttgttgagccagcgaatctggttttccatcatgatcagggtggccacggcgggcgtattcagggtctgatccttgcgggagttgttcagtgccgtggtcagcgagaggaacggcggcacccagcgatgtgcgccttccagatgagcgcttgattcgacgcctgccgcacgatcgatagcttcgggggagaggatggcgacccacagaccgccatcggcaccgaaggccttctgcggtgagaagtagtagacgtcggtctggctgatgtccacaggcaaagcgccggctgcgctggtgccgtcgatgacggtcaaggcaccggcttcacgacttccggccacgcggcgaatcggggcggccacaccagtggaggtctcgttgtgagcccagcaatatgtgtccacgccctcggtgagctcaggcagacggtaagtgcccggctcgccggggaacagcaccgggtcttcaaggaagggtgcgttcgcggcggacgcggcgaacttggcactgaacgagccatacgtgccgaatgcggcgcgacgggtgatcagcgaagcgcaggcaatctcccagaacgcgctggcgccaccgttgccaagcgccacctcatacccttcaggcaggtggaagaactcgcgcagaccttcacgaatcgaagcgaccagttgcttgactggtgcctggcgatgtgatgtgccaagcagggtggtggcgccggcgtcgagcgcggcgatctgttcggggcggattttgctggggccggagccgaagcgaccatcttcgggcttcagcgactcgggaatactcagtgtgatagtcatggtttcaagggtagaccagtgttggggaatatcgcggataatgctcggtgtgcgggattgctgcggggctactgcggaattccggggtgccgggcggtagtagcggcaatgcggaatgcagtgcagaatgtacgcagcacatcatggctacggtgtgtcggaatgacatgagttagtgattcttccgataaccggatagtgaggttcgtgaacgggcggaaacaaggcagttttttcacccggccgcacggttacgtaaatcgtttgacacacccggatggtgggggatcacattgaggattgacctctgttcgttgtacagtactcaattgtgacggtcatacgaggtcatcgaaatgaccccgccgaacccatccaaggagttaacgtagtatgaagcatgcttcgcataaagcgaccacggtctcgcgccagaagttcagcttagcgaaggcattgtttgcctccggcaagggttctcattccgttcgtgctgtgcgtgcggtgcaatccgctggtagcgacgccgttgttttggggcttgatccggccattgccgagaagatcaacgaaatcgctccccagacccgccgttccattcgtgaggccgctcgtgccgctgaacgccgtagccatattcttgcctcggcctcactggccgctctggtcggcacggccgcaggtgctctcgcattttccaacaataaagacgccacgaactcgttcgtggctgatccggccacgacgaccacgcagattaagcgcatcagcgatgtgactgcggcttctcgttccgaagcgcgtactgatttgagttcatcctccgttaccgcacagtccaccaatgaaggcggttgggggctgagcaattcagacagcaccttggacaccaagctgatgaatcgcaataatgcgaacaatcctgtggtgtcggctctcatggatgccgatggcgatgctgtgccggctggcttcaacccgaaccatgccgttggcaccaactccaacaactatccgtggggtcagtgcacgtggtacgcgtaccagcgtcgtgccgaactgggactgccttccagcggcaacttcggcaatggtggcgagtgggcggcgtcagcttccgctctgggctattgggtggacaacactcctcgccatgtcggtgatgctgtggtgttcgctcctggccaggccaatgccgatggcacatacggccatgttgccattctggaaaagatcaatgccgacggctccattgagatctccgaatccaatgccaagggattgggtgtgatttcgacccgtacgttcagcgccaccgaagccggtaagttccagtacgtccactactgattcatttcattggcttacattcggtgattactgttcggatgtgacgtcgccctatcggcaatcgttcgcgcgaaatgacatttcaagtgttgcgaccgcgtattagtccgaactgacctgtgccgacacgccgatatatcccaatagctccggggtgttttatttcttccatcctgtacgagttaatgcgcaccgtgtaaggtgatggttctatgaagaccaaaactgtagcttcttccattgttgccgcgattgtctcctgtgcttgctcgtttatgtttgttcctacagcgactgcagctgagggtgttactgtgacttccaccaagtccttcccctcgtacacccaggtgcgcaaagatctgacgactgaagccactgccacgaatgttgaggacaatgctgattggggcggcattgagaacctcgacgtgccgcagacggaatctcaggcggaaaaggatgccgcagcggccaagaaggctgccgaagaggaggccaagaagcagacggaggccgaggctcaggcgacccagaagcaggccaacgccgcgagccgtaatgagtctcgctcttctgttacttattccgatgccagtggttcggtttccgctggtgccggtgcctctatcgaccgtgcgtattctttgatcggacagagcatggactgcaccgcattggtcagtcaagcgttggcggcccgtggtattaacttccacggttggcctgaagagtacgtcaatgttcccggtggccacgtagttacagacgggtccctgcagccgggcgatattctgatttatgccaacaccggtggatggaatggcggcgcgcactacgatcatgtggcgctgtatgtcggcaacggtcaggcggtccatggtggctggaacggctacagcgtggctctcgctagcgccatgaccgaaaaactcaccatcgtggtacgtatcccgtgatgcagtcttattgattgatatattgcaggcctcggatgccaatcggtatccgaggcccgttgcgttctcctgccgagtgatacacccgcgacatcatcttcgaaaagacattcctgttatgaaatcgacccatgtgtgctaaggtaaggcgctgatgacgaacgttaagaatattatttccacatcagtggcggttatcgccacgggtgccatgtttgcatgcgtagccccgtttgcctctgccgattccgcgcagacgagtgctgtggtgtcctcacgctctttcccgaaggcgagttcggtgaagaagaatttgttcgccgaatccacctccacttcggttgacgagaactctaaatggggtggcatcgagactcttgatgtgccacagaccgagtctcaggccgagaaggaagctgctgctgcggcggcggctcagaaagccgctgatgaagctgcggcagcccagtccgctgctgctgctgcagccagccgctctgaacagcgtgcgtcgattccacaggttgacttgggtaaaatgactggcactggcgctgagcttgccagcttctcactgaagttccaaggctatccgtatgttgccggcggcaacactccggcaggatgggattgctccggttttgtacagtacgtcttctcccagtttggcatttccctgccgcgaacctctggtgctcaagccactgtgggtactccggtcgcaagcttggcggatgccaagccgggtgacattcttgcgaatggtactcatgcggccatttacatcggtaacggacaggtgatgaatgctatgaacccggtgcagggaacggcaataagcaacgtttccgtgttcggtggagctggatattccattcgccgcgtgatgtaacaagaattatgcggtaagcgaattcgtattaaggcacgtcctttgggatgtgccttttttcgtatacgcggatttctttttgagcggaggataccggccaaaccgagtgtcgcggggtattgttggaggtacgcggtattcgtgccacaataacttcaaggaggtcgtcatgattaacgacaaggccattctcgtcggcgttgacgggtcgcatgccagttacaaggcaacatggtgggccgcgaattatgcaaagcacgcggggctgacgctgcagattgtctgcgcatattccctgccgagctatgccgccgtttcgttcgatgcaacttacacggcgatgggggacgataacgccgcgcattccgatgctcaggagattctggccaaggccaaggccatcgcagacgagcagggcgtcgaagccgccacactgattgttaccggagacccggcatcggtgttcgtcgaattgtcgcgtaactacaatctgatcgtcattggtaaccgtggcaagggcggtctggccgagcgtctgctgggcaccacgtcctcgtcgctgccggcatacgcctactgcccgattgtagtggtgccgtacaccgatgatgacggcaacctgatgcacctgaacaacacgattaccaaggtggccgtaggctccgacgaatccaagtggggtctgaaggcgctggacattgccgccgacttcgccacgtgctggggtgcggaactggacgtgatttccgctgtgccgaacctgaagggcgtggatggcgaggatgccatcatggagtcctacaaggacgatcttgaggtgcgtatcaagccgttgcaggaatcgcatcctgatctgaaaatcaacaagcagatcgtttccggcccggccgtcagcgcactgaccaaggccagctacgatcacgatgttgttgttgtcggctcccgtggtcgcggcggcttcaccggtctgctgctgggctccaccagccagggactgctgcagcatgcggccggcccggtgtacgtggtgccacgcaagtatgttgaggctgcggaatcgcgtctcgacaccgtgccgagctcgcccgccgaagtgcctaccaagtcgctggaggagattgccggcgtcgaggagattccggtgtccgcagccgagcctgaagtcgcccagcagatcgaaaagaccatcgatcccgacaggcagtaaagtccgggtatacaatgagctccctcatcagagggagctcaatttattagtacgtcggtttattagtacgtcagtgcttgacggtgacgttcatgcgcaccggggtctcctgtacgtaggtgtgcttgaccgtgcagcccttgtcgatatggcgggtgacgcgttccttgagcttgttggcatcctcctcggacaggctggcgtcagaagcatcaatcaccacctgctcctcgaaaccggtgtaggcgtcgttctcggggtcgtacgtgccatccaccacgatcttggcacccttgccctcacccagcgtatgttcgatggcgaactggctggatagcgcggcgcaaccggccagcgcgaccttcatcagatcgcccggcgtgaactggccacgatccttgccgaacttaatgtgcgcgccatcgtcgctgaacgcatcccacgaaccgtccttgttgcgttcaacccacagtcgcttacccatagctgctcctttattttcagccgccggcgatctggcccatcgccatgccagcgggggagcgcggcacccggccgctctcccgcatcatcggacttctctattatgcccctaagctacactggtgcacatggctttgaccgaagaacaactcgcagatattcgctcccgtatccccgcacgtcccgaaacggacattccgatgccctatgaggacctggtgcgcaagatcctgaccgaaggcacgctgaagtccgatcgcaccggcaccggcacgatttccctgttcggccagcagatgcgcttcgacctgtcgaagtacttcccgctgctgaccaccaagaccgtgttcttcaagggcctggcctacgagctgctgtggtttttgaagggttcctccaacatcaactggctgctggagcacaacgtgcatatttgggatgagtgggcggacgagaacggcgacctaggcccggtctatggcgtgcagtggcgttcctggcccgcaccgacccccgaggacccgaatcgcaccatcgaccagatctccaatgtgctcgacctcatcaagcatcatccggattcgcgccgcatgatcgtctccgcgtggaatccggccgaggtggagaagatggcgttgccgccctgccacgcgctcttccagttctacgtggccgacggcaagctaagctgccagctgtaccagcgttcctgcgacatgttcctcggcgtgccgttcaacatcgcttcctactcgctgctcaccatgatgatggcgcagcagaccgggctcaagccgggcgaattcgtctggaccggcggcgactgccacgtctacgacaaccacgtcgaccagttccttgagcagctgggccgcaagccctacccgtacccgaccatcgagattcgtaaggccgattccctgttcgactaccagtatgaggacttcaaggtcgtcggctaccagcatcaccccactattaaggcacctgttgcggtctgatgctgattaccatttcgtggacagcgaagactgtggaggcgacgggccccgagtcttcgctgtccactacactaaggcccagttccgcaatccaggaggagtaagcgaaatggagcatgacagtagccgtagcggctatcacgaacccgagcccggatctgccgggctgtctgccactgaagaagactggggtgacgattatcccaagaccttctcggtgaatcttatctgggccgaagcccgcgacaaggaaggtcgcgccggtgccatcggcctcaatggcggcatgccttggcactgtgccgaggatatgaagcatttcaaggagctgaccgtctcccatccggtgattatgggtcgtaagacttgggaatcgctgggggtcaagtaccggccgctgcccaaccgcgacaacatcgtcgtttcccacgatccgatgtaccgtgcgccgggagccactgtggtcaccagtcttgacgacgcgctcgatatggcccgtcaggaggcgattccggacgacggtctggaccgttcggagatttggatcctcggcggcgcccagctgttcgccgaggctttgccgttcgcggacaaagcctatgtgactgatctggccgccaccgtggatgccgacagctacgcgcccgatatggcgtcactggtcgaggccgggatgtggcgggaagccgaagtgggcgagtggcatacgcccgccaaggaggagtccggcatcgattcctatcgtttccgtatcttggtcaaaaccaagtaagcatgcgaatccggcttatgccctttatagcggcatgagccggattcatattcattcgaccccaaaaacacattcgggccgtgtgcggcccgttgaagcccgattgaggatttattcaaagctatgagcaatacccagccctacaccgtaatgaccgtctgcaccggcaatatctgccgttcgcctatgggcgagatcattctgcgtcacgtctttaatgagcgcggtctcggcgaccaggtgaacgtggaatccagcggtgtgtccgacgaggagtggagccacccgatcgacccgcgtgccgtgcgcgtgctacgcgaacgtggctatggtgatgagattccgcgtgaccacttcgcacaccgcatctcacgtgaggaaatcgaccgtaccgacctgttcctgccgatgaccgcctcccacatgcgcgccctgctgcgcatgctgccggccggcaagcgcgccgaagtgcacatgtaccgcagcttcgacccgaatctgcccaagccgaagcccggccgcgaggatcagattgatttggtggatccgtggtacggcggcaagcacgagttcgaggtcgccatcgaccagattgaggaagtcgctccgtacatcgtcgattgggtggcgaagcagctgtaggaatcggcctgtggccgatgctgtgtgtttcgcagtcttacgaccgcgggtctctacctccgcttcgctgcgttcagcacctccctcacagagggaggtggtcgccgaaggcgaccggagggagagatcaacgaaggagaagccgagcccaacctcagaacaccagctgcaccagtagcatgtatacgatcgtgccgccggcgattgaaagcagcatactgcgtttccagacgtgcagcagcacgatgacggtgcaggcgatgagttccggaaggccgtgtgaaccggtcagaatcggggtgttgcgcagtgcgtataccaccagcagaccggtcatcgcatagggcaggactcggccgaaatattcgatgacgcgcggcggctgcttggattcgggaaataccaggaacggcagaaaacgggtgcacatcgtccccagcaccaccgtcacgatggtgagcgcgccttgccagatggtcatcgtcatcgcgtctgtccttccttctgctggttcgctgcgtggctcatggcacggtctgccgtggcttccggggcgtcggcggccggccgcaacacatccagatgcgggcgcaacgcgacgaacagtatcagcatggcgatcattgagggaatcatgaaatcattggccccgaatatcagcaggcaggccagcgacgtcagcacaccgatgacggcggacagtcgctcgcgatgcttgccggcgagccactgatcgaggaagatcaccagaaacagcgcggtcagtacgaaatcaagaccgtcggtattgaacggcagatgcgcgccaatcagcccgcccagtgtggcgccggtcacccaatacagctggttgcacagcgtgacccagaagtagaaccagcttcggtcgataccggcggggattttcgcggtggagttgatggcaaaggtctcgtcgcacatgccgaaaatcaggtacggacgcttccagccgagccccttgaatttgccgagcatggatagtccataaaacaggtgacgggcgttgaccatcagggccagcagaaagccggcgagtgggttgaacgcggagagcagcagattcaccgtgacgaattccatcgaaccggcgaagatgaacgcgctcatgcacatcggccatacaaacgagaagcccttggtgcccatgagaatgccgtatgaggcgccgagaaacaagaatcccaggcaaatcggtatggtcagcggaaacgccgctttgagcgccggcaaccaggcgttggtgttggcggtgtctgccatgtggatgatgttctccttgtgcaactggtctgccggccgatattcgccgataatgccatatgtggttatacacgcatggtgccgataaacgaggtgaggacggtgtcgggactctgtgcgcgaagtcacagtgtggatgatgtcacatcgtctacggtgggacagtccttgtggtgggcgtgaacacgtgctgagatgaaagcatgagcacatatcaaggtaacgaaccatcgcaaatcgtctacaccgctacggcgcaggttacgggcggccgcaacggccacgccgtgagccatgagccggaactggagttcgacctggacacgccggtcgccatgggcggcaagggtcagggcacgaaccccgagcagctgttcgccatcggctggggcgcctgcttccaaggagcgttggcgcttgccgccaaggagcagcgcgtggcggccaccaagctggccaagagtcaggtgcgcgccagcatctcgctcggtcctgaaggcgagtccttcggcctgaagggcaagattgaggtagttctgcccgatcttgacgatgaggctgccgccaagctcgtcgagcgtacgcaggagctgtgcccctactccaaggccaccgcgggcaacgtgcccaccgaggtcgttgtggtgaagtcgctggactgaagccttccgggttgaaacccgagtccaagcattcggcccgtttccttcagggaagcgggccgaatgctttcaggcctggtcccgcgaatacgaaaagacctcggtcgctatgaccgaggtcttcaaagaagtacccccagagagggggatacgaaaggcaattgcctcaagagcaaacggcaaatccttcaaatgtatatttacttattatcaatctgaattttaggtatagcaacgattcccgcctccttccagtagacacgcgagcggtgttgctccttagcgtcatcttcatgcggctgatggccgaaactacctgtgacgagtgatcgaatcatcctaaaccccaatgattgcaatgcctaaggtgccgtaggtgcatttttaggtgcaatggctcgccgagagcccattcggccacttggtggcatttttggtggcattttttcgaggccgttatgcgtgccatcgatcctggattcagcaaggagcatcatcatgtccgcaaggacgaagaaggacagtacggggccgtcgtcggagcggcggagcaggttcggcaccgtgacgccgcgctacgataccgcgggcaatctcgtcgcctggcaggtgcgctacccggacccgaaacgcccgggcaagaaggtccagcggcagttcaagccggacatggagcacgaggcgcaccagtggctcgaagaggaacggcatctggtggaactggaccgcaagaacatccaggaatgggtccatccgtcagaacgccgccgcaggaagcgcgcgagccttatctcgttcgaggattacgtgacccggtgggcggaaggataccggctgccgaacggcgagaggatagccggcggcacgcgccggaacctgtatctcgacatcgcgcacttcatgccgggcttcaagggcaagctcctgaccgagatcacgccgacggacatcaaacgctggtatgacgcaccgcaccccgaggggcaatgggcgttccgtcgctcatgcatgcgtctgaaggcggcgttcgccagcgccacgaagatgggcatggacggctccccaccgttgatccgcgacaacccgttcatcctgcccataccgccagcaccacgatccgccagggaggacgttccaccggtcacgccgctggaactcaagctgatcgcggagagcatgcccgactacacgagactggcggtgatactcgccacgctcgtcggaggcctccgttgcggcgagctgtgcggcctacagatcaaggacatcgacctgaagaccaaacgcctgaccgtgcgccattccgtcaacaggggctatgcggatcgtggttcgacacgcatcgccaggaccaagaccgactccagccggcgcaccgtgcccatccccgacgggctcgttcccctgattcacgaccatctgctcaggcactgcgaatggacggacccggaagccatggtcttccgccccagacgagcctcggtgatgagccagaccaccctggaagcccagttccgcaaagccagggagaaagccggccgccccgacctgaccttccaatccctgagggcgagtcacgcgaccttgctcatgctcaagggcggcaccttgcgggaggtcatggacgaactcggccacgtcagcgagaaggtcgccatcaagcactaccagcgcatcgtcgcccgacaccgcaaccagatcgtccaccaactcgccgaagacttcatcaaagcagcgcaatgaccacatatggacgaatacggattgaggtgccctgttgcccggtgtatacagaactattcccaatccagaatagttctgtatacaataggaatatggctatcagaacgaatcggacgctgctcacacggcgggaagccgcccgccggctcggagtgagcgaacggcgagtcagtgcgctctgcgctgccggccagcttgaatctctttccgcgggaggcggctcgctggtcacggaggattccgtacgccgccaatcacagtggcaaggggcggacgggcgcccttattcaccagacatggcgttcggggcgctatacatgctcagcggactcgatgcgccatggctgggccggcagcaacggtaccggctcaaaggctacctgaggcagatggatgccgagaatctgactcgtctcacccgacggcgcgcaatgatggtcgaatactggtgcagggactccaacctcgccaaggtcgaaaccctcatccgtccctccgccgccaccggcacattggcggactcattccagctggccgccacagacgtggtggaaggctacgtcaccgccagcgctctggatgacatcgtccgtcaatgtcggctgaagcaaggcgtgacacccgtccgggtgcgactccacgtcaccgacaatctccccgccggcgaaggatcgatgcctctcggcgtgtgcgcggccgacctggccgaatccaacgacccgagggaacgccgtgccggcctgaaaaccttccaacagctgatcgacgaccaccaccgcaaggagcagcaggaatgacccccacaatccacatccccaacacgggccgtccatggagcaccgtatacgcggtcgccgcggcgaacatctcagagtcatggctgctcacgggcgggcttatggtccaactgcacgccatcatgggcggattgaccgcgcgtcccaccatcgacgccgatctacttgccgacctcatggcagatcgacgcggcatcgccagactgcgcggtgtccttaccgcccgagggttcgagacgcagccgggtacgctgaccggatacacgacccgcatgagcgcgccgaacggcgacgtcgtggacctgctggtcgccgatcacctgcccaagttcctcgggactgatgcgaccatcgccggcgcgccggtgctgtccatgccgggcggcgcgcaggcagtggaacgcagcatgcaggtccgactcatcgacgaccagagcgggaccgaagtcacaatccgcatcccggacctgctcggcgcgctgatactcaagagcgcggcctacggtgccgaccacgccggctacggtgaccgccacctctacgacgccgctacgctggcatcactcatcccggaccctgatgccgagctcgcacgcctgcacagcggcaccgaccgcaaacgcatcaaactcctgcgcgacaagctcaccgaggactccccctactgggacaacctcgacgaagcacaccgccaggacggattggacgccatcgaaacactcgccacatggtgacgggcctgtagacaagttgtatatatatgaggacatgaaattctgaattatgtagctcaaaatgtcatatcctcttacttacgtcggaatgcagccgaatacttgatattcgatgctttgttaaaccagctttgacagggtggcttctctttttgatgtcaattttgatttagcagagccagagtatccggcagtcggtggacgcgacgtttttccgctggtgttccggcgacagcaagtgcaggatggcaatgattttctatgggatttgtgtgggtggacttatgttccgcccacacaaatcctaattgcaagtgatgggacttacgtctgaccttgatggctccaggttataaggggtctttagcattccatactgagcatgacaattgaactgttttctcatggatgcgtcagcccatgccgaatagtaagtccaatgtctacttgtatggaaacgatcgtaaacctgtccccatccgcggtcggtatcccatagaagcgctcttctaggcataatggacaaggaccatacgccgctgcgattcatccaatatccatcggaaaacaggtccgtgctccaggagctatacaaacccgcttccatggtggtagtggtagcggcatcttcttcagcgttagccttgaggtaggcttccacgtcttctctggtgcgaccatatttcttgtattgcggatcattgagatatgcttcaatctccgcttcggaaggataatgtgactgcgcatattgcggcgtcttagccgcattggtggaggtcgtctccgtcgcggaggccaccattaccgaggagaaggagaccgtgacggcgagcaagagggaggccgtcgatttgaccagtcgattattacgcattgcgattcttcttcttggatagggaaatttttatggaatatatgatttccatgagtatgagaattcccaacaggatggaaaccaaagggatatatgagatatagaaatctctcatatccatatctgcttttgctgaataagcgacatcgcaatatgtcagcattacaaaaacggcagagacgatcgagataagtatcggcaggacgaagaagcgtgcaggaatccactgaaatcggtgccgatcaagataatgcagataatagatattgcatccaatcatcgaacaataaagaagaagcgtccacatcggagccaactcaatggtgtttgatatagccatttctctcctttgagtccgtcttcctacacgattaaggcatatcggggtcaggcaaataattttctcaatatgcagtcagtctgtgaatagcttcagggtcagccccagaagatgattctcagacttaaggccacgatataaagtatcgaatcctatgcagtcgaactcaagataccctggacggtttgtcatctcaagatgacaaaaacaagcaacggctctttcagcatattcacttacactgttccttggtttcaatctccccacaaggcgcacgcggggtgcgccttttcgcgatcgagggagatcaatatgccgaaaatcaggcattcccatggaaaccatccgcagaagcctccgcgaagcaagtggggaaccgtgctggcccgttatgacagaaccggcatgctaatcgcatggcaggttcgatatccgaatccattagaacccggcaaacgcgtccaacgccagttcaagccggatcaggagctcgaagcccgtagatggctggaagccgaaaagtatcttgtcagcctccatcgtaacggcatcgccgaatgggttcatccaacggaacgaagccgacgaaaagccgtcgaggaaaagagccggacacaacgcaatatgttgttccgtgactatgtgatgcgatgggccgaggaataccggctgcccgacggcaatggtatcgccggtggcacgcgtcgcaatctttacctggacattggccattttttgccaagtcttggggacctgccactcaacgacatcactccgtccatcatcaaggcttggtatgatgcgcctcacccggaaggtcggtgggcgttccggcgctcatgcatgcggctgaaggcggtactcgaatcagccacccgaggcggattggacggttcggagccattgctgtccttcaatcccttcatattccatattccgtcagcgccacagcccgctcgtatcaacgtgccgccggtgactccccatgaattgatcctgctggcggatgccatgcccgattacaccagactgtccgtattcctctcgactttagtgggtggtctgcgatgtggtgaactctgtgggcttcaggtgcaagacatcgatctgaacaggcagatacttcacgtccggcactccgtgaatcgcggtgacgctgacagaggggatctccaattcggtaagacgaaaacggaatccagtatcaggaacgtacacatcccggatacgctgattcctcttattcgacagcacctttctgattactgcgatctgacccgaccggattcgtctgtgttcgtgcccaagcgtgcaagaatcatgtcccagacaacgctggacggccagttcgccaaggcccgattgaaagcagggcgccctgatctgacgttccaggcattacgagccagtcatgcaacattactcatgattcagggtggaacgttgcgggaagtcatgaatcaattgggacacgtcagcgagaaggtggctatccggtactatcagctcaccgtcgcctcgcatcagagccaagtggttgacaagctcgctgaatcatttataagcgatatggctagtactcgaagtcgtgaatcctagaccgcattgatgcactgtcgcgatgcgtgatacatcttcgtataggaaatgccgtgagggatctgaattggtccttcacggcatatcggtatctgacagatcgaagtctcacaatcgcagcatcagatggattggaagcgcaggtagtccgttaactcccgcaccgtatcttgcagccgacggagtccggagccttggctgaccgtgctccattgcgccgcatacgcctccatccagatttccagcgcttcggcaagacgcgccgtatcgtcatgctgagatgcggcactcaactgcaaggagtcgacgactccggcatcggagcaagtcggagaccgacctgattcagaagtcgctgtccctcgatggctatgcggagtgccgcggcgttcgctgtggcctgtagtcctgtggcggcgacgatcgtggcgatttgtcgggcgcagacccgaagaagatggcccgaggtctcgtcgagcgtgatgtggtgctttagatagcggagcagcatcagtcgggattctgcaagtgacggtatctggctttcgtcctggagggtgcggatcgcatcgtccggccgttcgttttctggtagcagtcccggaatggtttgcaggatctcggtgctgactccgccttgtccgtcatcgagctccaaccaggtgatcagctggttccattggaagcaggccgaatgacttgcgtgagtggggatatcaagcagctctccgctggcgtcgtggtattcgagtcgggagatgcggtggagcatctcggtttcatccgggatgtgttcggggttccatgtctcctgcgtgccgatgattatgccgggaatggccatgtgcaggtcgttgacgtggtcaaggtcgccccagtcggtgaccagcatgccttgcgcatggtatgcgcgccgtagcgggccatgtgggtgatgttgttcctgacgtcatcgatgcgcggcaggagtgcgtttccagcatcatacggtcggatagatgatctgcttggcccggcaacgggcagattttcccgtcgtcaacccgcgggccgaaatgccagtcgagcagagtaacggtttcgggaagcctgtcgagaatatccggtttttttttttgggggggggcgtcccgcatcatcggctgtttacccgagctttcgaggtggcggcacaggcaggtgacgtagccggcgtacatggtgacgccgatgcggtcgatgaatccgaacggctcgttggcggttatttattacaggtatatgatatatatactaaatacgtttaatccacctaatttcatcgttttcgtgatttgaagccttgaaaacggaatgggatgcccctattcttagcaataaatcgacgcttgctccagtttttctcaatttgtcaatatattctcgaatttgatagttgttaacattaacatcaaactcatttaaggcaacaagggcggggggataatgtttacccttaatattttctaagggagataaatgtcgtaaaatctgcacatcacgtttgttatccggattcccaaattccaacatatccattctccaacgtgggttttttacatctttgatagccgtcagtggcgagatgaacggagcagatatataaataccagcaaagctcaatggattctcatttagagcggaggcgacaacaaatccgcccgcgcttgctcccatcccaataactttgcattttgttctatgtactaatcggttaattccatttgcaacgtctaaataatcatgaatcgaattaattttattgattcccataccagcttgatgccatttctctcccttctcccctccgcctctgacatgagcataagcaaaatatattccattatcaattaaggattgaatcagagggctatagttgtaattaaacttgattccatatgatccataaacagctagaactatcttgttttgtggatttctaattggtgaaatgattgttacaggtatctctgtctctccatctctacttaggatgttatattgttgagttacatgatttaagttgcctgatgatgagtagtctatagatgattcttcttttgagaaattgagataatgtattgagggtctgcaagccggacattctatgctgtaaggaacggattgtttgttgacttcaatcggtcggacaaactttaataaactcatatgctttttcatttgtatggtgatatttttccattcctgattatggttaaaaactaatgctttaatatccagaaatcgtatttgtattttttgatcaaatttaacctgaagtacaattttgttttcaagcaaaaaaagatcctcgatttcatcgaccttaatttgctttcgtagccaagtatcagtctttttaatactatcttccccgtttataattatcaaaaaccaattattgaatttgtcaacaaagtatccaaagaaaaactcacgagattcaattgttttatgcatgattttatggactgatcctattccattgcatgcatcaataactttttcagctgcgttgtttgatgcgagtcttatgattgtaacctgagaaccatgatatacaagtaaatattttctgtcgtccgtcgcgtgaacagtaggccaagccgtgctgtcaaatgaggcaacacaacggttttctttaatcgaagtaagtgactgtttgcgtatttccgaaatcgccccagatgattcatctgtttttgcatagtatatgcatgaattatcagatgaaattatacttccctttcctatgtaattgagtttaatgaaatcaatacctgtccgcatatttatgaccctcagatttgagtagggatattttcgatcttgcactattattgccgcatattttgatttgttatctatttcaattgactgcagagacttataatcattcttattgattttaaagcatttagtccatttaaacgctatgttggaatcacgggaaggaaaaatatcgctttcggacgctttctttcctgaacgacaacaccagacatcatttccgtcatttaaccaaaagtataaatatcccttgattcgtcctattgctttaaacatttcaagcgctcctattggtgtaaatgaggggggtgaccctaacgagtcaccccctcatttttaacctttatgaatcagcagaagaaaccgctggtgctgctcgggcgaccgaagcagaacgagtagctgtagccactgtcatgcaccgcgtcgtcattcacttcctcgatcgactgcatgtcgatgattttattcattgttgttcctttctactattttgttccgcggaccttccgcagaacaaatcttttgcatttgggagcgggaataaatcccaaagattatgggtaaggacatttaatgctgttagtatccctgctgatccggttgaataatcgcttgagaggcgcaagtatgaatctcccgggaattgtagcgtattttcccaagacaaactatagtcgtttaattcatctaaaagtctattatttgtttgtgttgtttgcggtgaccatgttgaggcaaaatggtttgcaactaatatcccagcaatcccattgtttagtccggaaaaagcatattgagatgatgaacatgccgcaatgagtgagtcccattctttatggaaaagagaatcatcatgtagtgcaattcgtgcaatggaaattgccactattaggccggcagaaccatctgcaaggtaaggaagagacctattgtgcttatccttaattcctcgcattccatttggctcaataacggtattgtctaaatctctgcatatgcaattaagcgcacgccgaatataagctgggttatgttcgatgtcaatacgacttagagctaaccaaaacagtgcgataccactccatccatgcaggaggccaccttgttttatgcttgcgatttgattggattccatccattgcgctatacgatgtccaagtgcaatagcctcatggaaatacctcttatcgtctgtagccattccgtatgatatcagggctaatccttgaccggctagtccgccattaaggtcaagatttcgtgtctctttccaatgttcatatgtgctaaataatagttcgtgagcagtttctaattctcccaactcaaaagcgactaatcctatgccggatagccctgtatataatccaaagtccgattgattgctttgcgcgaaaccgtggatcatgtctttcatccattggacgtcatccgaattgataattgagttggccctatgcaggctcattaggattcccgccgcgccggagcttacgttacttgcaccccaaatggagccccgtgttacatcaccaggatatagttttcctggcaatttatgacgggtatgaaaaatgccattaataatttcagttttaactaatgacaaggaatcagggtgtgataacagattaaaggaaaaacgtggtgtaaactgtgtaagatgtgcatctggagttaatggaacatctgaaactccagatgcacatgggcaacgtgattcaacatcctttaacagatttatatattccatgccaaattttttcgaaatattattcttaactctgatccaatgatctgggctaagcatgcaaatcgaggtatttgcatagcatagacatgcgagtacccttgaaacagcaaaccaatctgcttcttgagcggagcaacccaatgggggatggaatcccatagcattatgtgctgatatttccttggagtccaaggtgcgtccatcctcaaaatctataaagtgtatagacattgttttaggattaatcattatgtttcctaaatgaatatccccgtgaacatagcctgtgcgatgaataatttttacagcattgataatcgatgttgcgattgtattgatatcacttctatattgcatcaactgattagtatgatcattttcacattgatagggatagttttccgacaaccaatggttcagtgtgatttcattaagccattccatttcaatgtagccatgttcccaagcgttaaaccttcgatatggttttggtgcaatgccggtatttttaagaagattgagcatcttccattctatggatagtctctcaatggcatcgcgttggcgtgcgtctagaccggcatatggtctcgcttcctttaaaagggcaatctcattctttttattggttgcacgatataccccaccggaattcgagaaatgtacagctttaatctcatagttatctaaatcggtgggaatatttttcatatattcattcagagatatttctacacactttggcttgtcgattccctctgctggatgtataaaatgtggaagcctcttatcggcgaccagtattccagattggtctgggatcatagaaatataatcgttattttcatcctcgcgacgcaggtcaatgaatcctccgtatcgaaagaagattggactttgcttgtatctaatgtcactaagaatataagggcctttttcatctttgatgaggggatataaatcaccgactattttttcaagttcatcatttgttgatggatatatggtgatgaatttcccactacctgaacgatttgctgccttcccgttgcagttgagaaaatctctatgtgaactttgaaatttgaatgttgtattatatttacagcaaatttgtattacttctgcaagaatcttttctgcgttctcttttgttgcgcttaaatgaatcttccatccgttgactcgcatttttccattcggagagcttacatacgtccacggttctcttcttgttacataccaagtatcgggaataagagattccgcaatccaatggtcacgcttcatggatggaagcatagaagcgtgatctacaaaaaatggagattgtttcgtaattgattcgaggtaatcttcttcaccaatcatatttttccttttttcttgtatgctttaataatttttcattgttgtatccttacttattgatttcaatgtgtttggagcggattgtcagctgaagatgacacatatcttcgtgttcttaccattgacattgcttgctgtgatgcgtgggacttgagccagctgacggcgatttgcgtgcggtcatgcagttgcaaggtgaagaggattcgactgatggttcgtcgtatcgtcgcgggctccagtaccagtttgcgggcgatttcctcgttggtcatgccttccgcgatcagtgtgcatatctcgcgttggcgcggcggcagggctgcgaacgaatcccgcagcttctgttgttcgcggcctgctgtgggtctgggcatgccgtgttcgagaatctgccgggtgatgcgtggcgtgaccacggcgtctccgttcgccaccgcatgaatcgcatccttgacggctgcagcactggcgtctttgagcaggaatccgctggctcccgcatccagtccaccgtatgcgtagtcgtcctcgtcgtacgtggtgaggatcagcacgtgaatggcgggccatcggcgggtgatttcacgggtggcggtgatgccgtccatcacgggcatgcgcacgtccatgagcaccacgtccggcagcgggcctcctgccgattccagtcgctcgatttcagcgatagcctgtcggccatcgcccgcctgagcgacgatcgcgatgtcactcgccttgccaagcatgagtttgtagccgagcctcgcgtattgcaggtcatcgaccagcatgatgttcgtcatcccacgtcacgcctttctcttgtcggacggacgtcagcatcgcggtcacccgccagacaccggtttccgccctgtccggcccgtagcagaggaacccttcggttcgggcgatggcgtccgcgattcgcgccagaccggtgccgatggcaccttcggaaggcttggggaggttcgttgatccgtcgttggtgatggtcgcgatcaggctcccatccgccgcgtgatcccatgtgacgttcagatgcgcgaggccgggcgcatggcgcaccgcgttggtgacggcctcacgggtcacccggaagcacagatccgcctggtcggggtcctcgctgcgtcggccggtctcggtgaatgtggcgatcacgccggaagcccgtacgtgtgcgagcaccggtcggatgtcatcccacatgtatcgctgcgccgactcttcgatcgcggtgtcattcatctcgtgcgactgcgtaccgcctgtggtcggcggaataccgggcaggttcgcatcggtggcggtcaaggcccgcagggcgtgccgggtgtcctgcaggccgcttttggcgatgtcgcggatcgcgtcgatggcctgtgcgacctctggatccacatcttgtccttccacctgttcggccagtccttgggccaatgcgatgatgctggtcagatcgtggccgacgctgtcgtgcatctcgccgacgatgctgccgcgccgaacggccgcatcccgctgttgggcgagcaagtccgcgcgcagacgctcgtcgcgttcgcgttggagcgccagggaggataggcgccggttgcggaccgcataacccagcacgccgatgaccactatcggaagcatggcgggcagtatgtcaagccagatcgaccatccggcctgccgccagccgtctccggcgaacgcctgactgcccagcaccatgcaggaggcaagtccgaagcacaggatccgcaaatcactggagacggtcatgatcaacgcccaataggcaatcatcggcatgatcggagcccattcacccacgccggcgagatccagcagcaacgccagagcaagctctccgcccatcacccattcgggtctcacgtaccgccatgccagcgcgacgccgccggcaaaaacggcggccagcatcagcataaacacgcttggcgtgtgcgtggcccaatacgagtgatacgacgggacggcatcgcgcctggtgacccatagcatgcgcagcatgaacagcgtggccacgaccggcaatccatagaccggcaggccgcccggtttcctcaatcccagcggagcatcgcccgtatcccatatcctcgactcacaatcagacatactcgcatgcatatccgcttggtgcttattctcctgccgcacgagcgatgacgaccgtcggcgatgtgcgaatgccacgttgcgcggtgagccacgaaccaagcatcgccatggcggcaagcaagagcacgaccacgagccacaggagccacggcatgccgaataccagcacgtcaaacgacaaccagatgccgatggagaacgagacggatacgagcagactgggaacgaacgcgatcagggacgaggtgacgacaatcataagcccatccaaggcggcgatggcgttgagctggccttgggttccaccgctgacggctactagcgcgaggtcaagctcccgtccacgctgggcgatcagatagcccgagcacaccgccgccagcaccaggaccagcgatgtgccgatcaatgccaggatacgggcgaaaccgggcacctccaccgtcggcgtccccgcgggaagcagccgcgtccacgcggtgatggtcgaggtgagcgactcatatgacatgagcagcgtcaatccggcggccaagggaatgatggtggacgaggacgcgcacaccctggcccgagcctgctggcatgcgatgcgccacgccggccagggaagacgcaccaccgccgtccacatgcgcaccgtcgccgacagcacggccggaccggcaaggcagacggacacggtgaacagcagcatcgcgatcatgttgccgtacgccagcggcgacatggacgaaaacgtgacctgcaccgacatccgcgccatcgatgtcttccgcacgttcagcagaccgaccgccagcgagaccaacgccccggcgaacatgatccaggcaagaacaagacggggaacaccgaccgttttcggagggttcgccgcctcgcgcaacgcctcgaccggcgatatgccgccgaccacgcgcaccgtcaacagcgagccgaccaaggccatcgcgaatccgaagacgataccgcaactccacgcccgcagcatgcccgtcacatcctgcggcagaaacggcaacccgttcgcctccaactgccgggtcgcgaacggatagagcccccgtgccagcgccggcgagacgataagcgagacgagcgtggcggcgacatccaacagcagcacctgcgcgcagacgcgcgacgtcaactgtccgggcgtggcaccctgcaatgcgatcaaggcgagggcgcggcggcgctgacggatggccgaggagaccaccaaaagcaccatgagcatgcccacgacgatcatcggcaccagaggagggccgctcagctccatcgagaacatcaccgccctgccatgcaaccccggaaccgccatggccatcctcgcgttcgacaacatgaccatcaccatgcccgacacgcactgcaccactgccagcagcagcaataccgcgccccacacgacaggcgcatccctgaaatcacgcaacaggccacgcatcaaatcgcctcccgcccatcaagaccggacgaatcggaaccgacctcggccaacacaccgtcacgcatccgcgcgacgcgatcgcagcggaccgcgacctcgggactgtgcgtgaccatgaccaccgcatgaccaggacgatccgcgaacgcgcgcagctcatcgaccacacgcccgccggactcggtgtccaacgcgccggtcggctcgtcggcgaacacgatctcgggatcggcgacgagcacacgggccaacgccacacgctgctgctccccgcccgacagcaacgtcacgttttgcctgcgcaacccgagaatccccagacggtcaagcagcccggccgcgcgatcccacggatatttcgcaccgcgcagcgtgaacggaagcctgaggttgtcctccacgctcatcgaaggcaccagattatacgactggaacacaaaccccagatgatcacgccggaaccgcgccgactgggcacggctcatacgggtcacctcctgtcccagcacccgtacagagccatcggagacggactccaaccccgccagacaatacatgagcgtggacttgcctgaaccagacggtcccacgatccccgtcatctgaccccaaccggctgtgaaatccacatgcctcagcaccggcaccgtctcacccctacgcagctcgaaactcttcgacagccccgcggccgcgaccggagccgacgccattgcatcgctccccgttcccctcaaatgtcgaaccattatccaccttcctcacctgcgtattggacttcgatacccccactatccatcgaagagacaatgagcagcaagaagacgtgcgaaaatgtcatctagagatgacaccctcaataggggaaaataatgccaaagatgatggcacctatagagaatgtctctttttattgtttttaaggacggcgcaagctgctgtttttggcaagcatgtagtacaagggaacggttttgagaaggtggtcgtgtttcccttctccaatgacatggccattactcaggacatatatcatttcggcattgcgcacggtagtgagttggtgggtgacgataatgaaagtgcggtcttcggcttgttccagtagttgggtaacaagctgttcgttatcagcgtccaggtttgcggtggcttcgtcgagtaggatgatttttgccgtggaaagaagagcacgagctatggcgagtctttggcgttctccgcctgatagcatgattccgttttctcctacctgcatatcaagacctttgtcagatcggtctagtagatgggagaggttcacggactctagtacttgtcggcattcatcgtcgctgcgataggttgatccgagaagtagattctcgcgtaggctaccggacagtgctggtgaatcctgttctacgtatgcaatatggctgcgtaaatcgtctcgatcacaagttgttatgtcgttaccgagtacattgatgtttccgctggagggaacatagaaacgttcgataagttgtaggatggtgcttttccctgcgcccgagggcccgactagtgctgtaacgcttccctgggatatggagaggttcaggtcgcgcaaaattggtttggagccatatgagaagtagacgtgttggaattccactgccggaggacatgggctgctgtgtaccagcggcatatgttcattgattgttgtgacgacggtgtcatggtccttttcttcgggaatatccaatatttcccgtatacggttcatcgcggccattgaattgccaatttgtgagcctgcgtaaataatctggctgagcggtgagatgctgatgaacagcaacatgatgaactgggtaagtttttcgacggatagcagccctgtggttacgcgccataatcccagaccgaacacgatgatagccgcgagctgcagggctatcgtggccagtggattgatgaccgactggattctggcgatcttgagtccggacaggcggacacggttgattaaggcggcaatgaccttattctcgttctcgaagccgtttgaagcgcgtatggtgcggataccggcgagatcacgattgagtatggaagtaaggtcgccgagcgtgtattggctgtcatagcttgctcgttcaatgaatttagcggacagcagcatgagtgtgaatacggtgagaagcagggtgattgctgtgccgaataggattgggtcaagcattgccataaacacagcggaaccgatgacggtgatgaagcctgatgcaagggctgatgtgcactgcatgaatgcattacgcagttgtgaggtgtcgttgctgacacggctgagcaggtcgccggagtcgcgttgatcgtattcgcgtatgggcaggcgtagcaggtgtttgcttagtgtgagacgagcatcccttacgatatcctctcctgtactctgcagttggtagttctgtagggctgatatagctcctgaggcgatgacgagtaacagcattccggcaatgacgggccactggggaacctggaatacaccgttctggaagaagttggtcatgtacttaggcaggagcagcgtcatagaggctcctatggttccaaggcataggatgagtgccagccgtcctcggtattttcggaggggagaaatcagattgtacatggaggcaggtttcatgtacatggtgtcgtcctggtcgttgacggtcattgcgtatctttccgttcggaactggttctggtgatggtgtaccgtctgacggcatcaggttcgccgatgggtgtgccgttggcttcgacccaggcgtgtgcgcggaagggacgatcggtgaacccggtgcaccatgtgacggatcggcgagatatgcggcatgccgccgctgtggagagcgaccgaagcagacaaccctgctggcttcggcatctgcggcttaccgcgcatacggcattgcggtaacgttccgccatgctggtgtcggccggcggatatcgttcggaccac

SEQ ID NO: 2598 - DNA, 94026 bp, Unknown
  R222_15m  MAG No. k141_11794
ctatcgcaacagtcgttcgttgaggatgacaggagcgtgttcgattgacggctgcaacgcatcgagctggtcggacagcttcgactcgtcgaccaccggcagttcgagcagggatcgtgcggccgcgtgcaggtagtcgttcaacgcctcgatgcggcccggctccagcgggtaagccgggtcgttctccaaggtgacgtccaacgttttgcgcaacatctcatgctgcgcgctgcccatgatggccgcgcactggtcgcggaacgtcatacgagaatttgccggctgacgttcggacagtacctgcggaatccacgcgccgccctcccagtcggcgcgcatgtcgttcttgaacagcgacatgttatggtcgaacaacggcgccggacccagaatccggccggtgcggttgtcgcgcaggaacccgtggttgttggcgtgacggtcctgattgacgatgagcgcgtcgaacactagcatcgtgcgcatcgcctcgaacgattcctcggacacggcgcgtgcggcggcgaggatctccgggaacgacgccagctgcgtcgccgcatagaacgacacgaacgacacgtcctttgagttcatcgaaccgcacaccgacgcgagcttgcccttccaacgggcgatgcggtagtcgaccgcattcacaccgagcctgcgcgccagctgcgaggcgagatactcggaatacggttccaaaccggcgttcgcataccattcggaacccgccttccacagttccagcccacgttccgtatgccgccacgccttcgggaactggccgtccgtcgtccactcgctcgacaggccgatcgcatgcttctcgctcgacgtataccccgtgtaggccacgatggcgagcgtctcgtccaacggattgtcatacaggttgatgtccgcgaacttgaggttctcaccgtcgcgttccgcccagaacgaatcgttgaccgacagccccttgcacaggtcgatgatgcccagcgtatccgcaatgttcaaccccgcctgcgcgagaacctgcgtggcgaactcacgattcttcggaatcgtgcgccgctccagccacgtcgtcagcttcgcattatccggctccggagccaacggaaacggcagcaacgcgcgcttcgactcatcgaaccagcggacatgcgcctcgatcttgcccgccagcaggccctcgccatacgacgcatcgaaccggagcagcggatcatcatagagccgcagcacgtaactcgtcatatccggcccctccaatcacaagcccgctccaaagtcatatcgggcgattcacatatgaagaacaactgtctacagtatagacaagggccttggaacgcgggggcttcactctgaagtcaagtatttgatacaatttggtgcaaaaagatagtaaatagcaataaggagtggctatgagcatgcagattgccacgcgagttgatgacgagcaggctacgttgtttaaggagacgacccgacagctgggtaccaccccggccgatgccctgcgtatgttcatcagcgcgttcaatgattaccgtgggttcccctatgaggtgcgtttgccacgaaatgacgtggagccgtttgcgtccgagcgggacgctactgagtatgccagtcgtctcgccttgaggatgtccgatgaaacgaggtgagatttggacgttgcaggccgatggctacgccagcaagccacggccggttgtcatcgtgcagagcgatgccgtcgatcggttcgattccgtcatcacttgtctgctgacctcatacgattcctccgacatcgacacgcgggtccgattggaaccaagtccggagaacggcctgaacaaagtgagttacgtgatgacggacaagatcgtcaccgtcgaccgcaaactgctgggataccaagtcggcgtggttgatgatgcagccatggcgaatatcggccgtcagctcatgcgggttctaggtttgctgtgacgtttgggatggctggcgggcgtgcgtctacttgtgacatcgtttatgcacccttgaggccgtatgatgatggcgtcgaattcaagctctccccaacgtctaagaaatggcttccttcatattacggtcatacgaccaacaccatatgaaggaagccatcatgaatggtctaacggcaatcagcttctcatacgtgattgccagtcattcaccgaatcagccgcggttgtcgaacatctgcagcagcatcttgctgggttcgacggcatagacggtgtgcggcagacgggcgctcaggtagacgatgccgccggccgtaagctcgacttcacggccttcgccgccgacgcgcagcttgccttccagcacctggatgatcacgggcatggccgcggtgtgctcgctcagtgcctggtccttgtcgaagccgaacagcacggcgcgcaggccgtcctcgcgcagcaccgtacgggagacagtggcctcctcctgaatatcgatcaacgaggccaagtcttcgatgaatccaagatgcggctcggtcgaaatggcgtggccttcggcgtcgtgggcgtcgtgcttgcaggcgcagtgcttggcctcacccgcttcagcggccgcgacttcgccatgcttgcagtggcactccttcttcgcgcccggctccacggccgcgccctcggcgtgctcgtgcttgcaggcgcggcggtgttcgccgttggcggcagccgcctcggctgccgcggcggcttccctacgctgcttgcacttgcaatgctgctcgtcgcgccctgccttgcatacggtctgctgctcgttctcatcggccatgatgttctcctattcgtcgcgcgtacctcacatacgcgtcatcgcttttacttgtttcccattatccggccatcgttgggccggcacaccgctgttacgcttcgggcttgcgcacctcatccttgacggattcgtccaggttgtccggctgcaggccgagttcgtgaatcgagtaggtgccgccggcgcgcagtagtcggaaggcctcgccgataatcgcctgcttgccacgctcggtctgcatggtaagcatggcttcgccgatcaccacgtcggcgctgttggattccagaccggtgtcggcggcgtcgcgctgcacgcagcttgccggaatcgtggccttctcactggtgagtttggagatgatgtccacgacctgctggtcgcggtccacgccacggtagctcttggggtcgcggtcggactgcggcaggggcagctcgcggttggcggcgggtttggtggcagtggactgaaatgcctgagaaggctgcggcgtagtggtcatatgtcgtgatgctatagtccacagcccgcccgcacaagggtttttcgctagaaatcagccgaatgtgagaatgctcacccgagtaggcgcctgagcatgcggctcagggacgattcaggggatgctcagggttcccgtcaccgattccccacatatcgcccgcgttcgcctaatagaatggaatccagcattcgattcggtatccggcgcaatgccggcaaacgtgaggaacttacgatgagggtcatcggcaatattctgtggatcattctgggcggactggcaatcgccatcagctggacactgatcggactgtttctgtgcatcaccattatcggtattccactaggagttcaggcgttcaaaatggcgggccttaccttgacgccgttcggcaaaaccgtgcaatacggtggcggcgttggctccacgctggccaatatcctctgggtggtgctggtcggctggtggatggcactcggctatctgggtgcaggcgtgctcaactgcatcaccatcatcggcattccgttcggcatccagtcgttcaaaatggccaagcttgcgctctggccgttcggcgcacagatctacagtctgtaacaattgtttctgcagtaggtccggtgcagcgcattatcatcgtgcgttgcaccggactttttatatacaacgggcatttcacacaccgcgtgatttgacggattcggacgtaagactttatggtgcgcgaaccatgatcaacacatcgcattcagcagcaacggcgtgaacgaacacgccatctgatcagtacacctctcattgacgcatagctgaatcattgccggtgatatcgagcgactcattcgcaccatgcctcataaacgcacctgtacgagcatgtgttcttggcatcgtcgcaacgcaatgcaccgcggcaaaacccattgcataccatcacatattcagaaagaacaacagatcatgaagtatttcactactgacacgcatttcgggcactaccatatgtcactcacacgcagtcatgcgcacaactatatttttgtatcatccatgattttatagttgtttattgactcatttccttctctatcttatactttctacaatcaaggatgctctttgggaagtgagtctctctcatggatatgaagtatagaagtttggcaaggctgttccatgccgacaggtcagtcgattccttcaataaccatgcggcactcgcacggcagcggcttgaggcagattccacattcaggaccggggtcatcacgccattgggcgagctgttctccgccacgccacgcgagacgaccctgctcatggaaaatatacttctcgccgaaaggcgcatatcacggctatggaatctgattcccggcgtcatgcgctgggactacatacggcattccatcagtgaggaactgttcgccaccaacgagatggaaggcgtgcgcagcacccgcaaggaaacccaggacgccgtggacgcggccgacaaggcaaggagggacggcgacgactccaaggcgcggttcagcgaatttgccaagctgtacctgaacctcacggacaaggactccgcgttgccggcaggcatcgccgacatccgcgacatctatgacaaggtcgtgctcgacgaaatcgatgagagcgatcagccggacggcgacctgttccggaaaggcgatgtggaaatacaggggccgcacggcctcgcgatccataacggagtcaaaggcgaaggcaacatcggcgcactcctcaccgatatgatccatctcgcgacctccgacgagattccccggctgcagtcggccatcatgtcgcacttcctgttcgagtatgttcacccgttctacgacggcaacggcaggaccggccggtatctcctggccctgtacctgaaccatgacctgactatgcccaccgtgctatccctgtcccgcaccatcgcggagaacaagaacgcctactacaaaacattcatggaggcggaggacaagctgaactgcggcgaactcacgctcttcgtgaacaccatcctcggattcatccaacaagcccaggatgagctgattgacgaactcagtatcaaggtcgatcagctcgacaaaggtcggatactctgtacacagcttgaaaagaggcatggcctatcgcgcaatgccgtctcggtgctctatggcgtgattcaggaagagctgttcgactcgtccaaatccatgtcgttggacgaagtggcccatcacatcggactgtccaaacagagcgcaaggaaatacgtggaagagctcttggccgcggggctggtcgtacagaccggaaaacgtccgctgaaaatacaggtggcgaaatcattgaggaatgttctcgtcacaggagtcgacgagaacgcggaagcctaaatgaagaaaggtggacgcaaacatctcaacgaggcccatactacgtggaaaggcccgggcagccaacactgctcggacctctctttcatcgctttcctcagtcgccttcagcgataacttccctcgccgaggggaagccacggaaaaaactttctttctgaacatcatcactacgacgacggcatacatcatccattgcattgggaataagccgtcaccgaatacagaatctaatgagctcggatcactcattcacgagcaccagaattcgtttcatgaattaccacgtttgtgtctttgaaaggcatgcggccgaatccaattcgaatcgcaactcgggaatatacaggcggcggcaccgatgcctctcacatcaccgggaaacgatgacgacaccgggaaaaccatcagcccacactgcggaaaaacactgccgaacccgcccaacaaatattgaagcagtacacaccacgtgcaggccaacatcctcgaactgaccggcaggcggccccgcctggaggccggcagacggctgcgcgcgattgccgccgccctggcacgcgtcaaggaccgggactccgccacggcgtggctcgtctcctacagccggtgggagcaggactttgcctcgttcctcgacgagaagagcgaatacgccgacggcagcgtgaacggcatgcaccaaaggctcgtcaaggcgcggcgcatgatcccaggcgcatccgggagggccagccgttcgcgttcctcgacgaggggctcgcggccaacgcgatgaccgacgaacgactcagcgccggacacacattttggcctataacccttaattttctaatcaggagcagggagaacaggaattcgcctatgaaatactggatgcacgcagacagtccgctgtcagtgtctttgcattttgaagcatctcctccggtgtccctgtaaataccacttctcccccgttcttccctccatcggggccgatgtcaataatccagtccgcctgcttcatcacgtccaggttatgctcaatcactaccagcgtatttccgctggatacaatcccatcaaacagcttcaacagattatctacatcggacctgtgaaggcctgtggtcggctcatccatgacaatgatgctactgctcttccccaggttctttgccagcttaatccgctgccgctctcccccggacagggtgctaaggggctgccccagcgtcagataggataatcccacctgctgcattacgctcaggcgtttcctgatcctggtatcctcaaataattccagtgcctgggaagcggtaagccccagcagttggacaatattcctccccttgtaggtacaggcaagggcctccctgttataccgcacaccgccgcatgcctcgcattctgtaacaatcgggtccataaaggcaagttccgtaacgagaacacctttgccgccgcagattgggcaggctccggcggaattaaaactgaacaggctttccggctgattgttctcccgtgccagaagttttcgtatctcatcaaagaagcccaggtaggaagctggtgtagagcggctggtagctgtaatcggcccctggtccaccatcaccacttcattctcatacgctctcgcaaatacctgggaaatgagggtactctttcccgaaccagccacaccagtcaccaccgtcatgacccccagagggatatccacatccacatgctttaggttatgaaggcaggcatcccttaccggcaggctgcctgtggctttacgtggcgtctgttttatggggaacaacttttgcatggattttcccgtcagggtatctgccctaagtagttccggatagcttccctcaaacacgatttcaccgccgttttgtcctgccgcaggccccacgtcaatgacatggtctgcgatggagattacgtctttatcgtgttccaccacaaggactgtatttcctttatcccgaagcttcttgagaagatgattcatacggtagacatcccgtggatgcatcccggcactgggttcgtcaaagatataggtcatcccggtcagactgcttcccatataccggaccagcttcagcctctgggcctccccgccggacagggagggtgtttcccggttcagatgcagataagggagtccaatctcgatcatccggtccaatccctccaggatggtatgaaccagcagacccactgtctggtccgtgatctgtgtcaggacttcccgcaggagagtcagctccatctcgcacatgtctgcaatagaatacccgtttattctacagttcaaagccgcctcattcagccttcttccatgacagtcactacattctatttccgtgatcagctttttgacttctctttggtgtgtctgcttttgctgctgatatcccggtttaagagggccttcgtatacttatggtacagtccagttactttcgggttctccggctctcccttaccatcacgggcaccatagacaagaaggttgtattcttcttttgtgtaatcccggatgggtttatcaaggtcgaacagccctgactcagcatactgcttccaataccaggatcccggacggtacagggaatccttcacacagccctggttccaggatttattccggtccaggactgcttccatatccacttttgtaacttttccgagaccggaacaggtcttgcacatcccgttggggtcattaaaagagaaataggacgcagttcccacaaagggctgcccaatcctggaaaacaacagccgcaggctggcatacagtccgctgatggtccctactgtggagcgtgcatttccccctaaggaggactggtccaccacaacggacggtgtcagattgtcaatgcgctccactgccggtctggggtatttgggaagcctggaccgtacaaatgccgggtaggttaagttcatctgccgctgggattccgctgcaatcgtgtcaaagacaatactggatttcccggacccggacaccccggtaaatactgtgattttttccttcgggattctgaatgtgacgtgtttcaagttattctgggtaagcccatacaccataatgtctgccatatgatcacactccttttctctttttcctgctgtcatatccaaccaaacctgctgcaatcagagccgtaaggatgtctgcggtgggacctgcgtacagaatcccgtccattccccagatacccgagaaaatatggatgagcggtaccatcagcagaagtggccggaggatggaaagcagcatcgctttcactgcctgtccggctgccagataatactgggctgacaccacctgaaatccagtaaacgccagtccgaacagggaaatgcgcatacacttgataccaaatgccatagatgccggctcattcgtcccaaaaatctgcagaatctccgccgggaataactcacagataagccagccaatcacagaaaccaccgtagctgcgccaaccgcctttttataggtttctttgacccggtgttcgaaaccagcgcctttgttaaatccgatgatgggctgcatcccaagtgcaatccccacacagatagaaaccactacagaactgatccgaagcacaatcccaagactgctaagtgccgcttcgctgccaacgcctgccatttcacagctcaccaccgctttgttcagttcaatctgcagaattgttaccgccacctgaatcatgcaggatggaagcccaaacgcaaatatctgaccgcagatgggtaatgtagggcagatatttttttcttcttaaccggatatgccctttctttaaaaagtaaaccaacagtatgaccgcggacatgatctgcgaggttacggtagcgattgctgcacctttcactccccagttaaaaacaaatatatagattggatccaaaaccaggttgattaccgctccgaccaggaagcatcccatagccaggatggggctgccacacgctctggccatactggacagggcaatagctgccatactaaagggtgcaccaagtaaaatgatgggggcataatccagcacataggacaatgagccctgcgcccccttcgtagccccaaaagctagtgccagcggtttcaggaaagtaaggcatataacggtaaaaagaatacctatggcaacagacagagtgaataccgttccaagggttttttcggcttctgcttcttttcctgcccctaagttcatggacgtatagacactgccgccaatccccagcagggtggcgatggataaaagaatcgtgacgaaaggaagagtaaccgtggttgcagcaatgccaagatatcccaccccacgcccaatgaatatctggtctacgatgttgtaaagtgcatccaccagcatggataagacagatgggattgcaaattttatgagcagcctgccgagaggttcggctgcaagagggtttcccctcactgttttaatagtcttgtccatctctttttctcctttggtttttcatcatttacgctggattagcgtatcaaaggagcgcaaaccattcatgatactttttgcggttttttcatccgaaggcctgacggcaaaccatgcctcctgaatcggcgtctccatgcccccgccttctatagggtatacctcgatatccggcagctccgcataaaaaggcctgatgatggcagaacttctaaatgcagataccggaacatattatcggaagtcacatggcagcatggatctgctgttatcatgcaccaggtggcttcagatatccgaaactcttccattcctgggggcattgcttggtttaaatagaactgatacaatgtgggtatgaaaactgtgaacatctgagaggcaatatgaagaatttatcggaattacctaacataggaaacgctgtagctaatcaattaaaacaagttggtattttagatgaagacgatttgaaatccataggagcagaacaagcatggctgaaaatacagcaaattgataaaacagcgtgtatcaataaactctacgcattagagggtgcaatcttaggcataaaaaaaactttgttgccaaacgaaagaaaagaagcattaagagaattttataacagatataaaaagtaatagtaaaaacggatggagatgcctgtttgaaacgatatccccctttagaaagggccattacctatatcgaagcacatctaaatgaatatatcggtctgaatgaagtatcaagagaaaccggctactcctactactacatgacccgcctgttttcttctgttttaggtgaatccgtgggacactatatcaaccgtcggaggctttacaatgcgtccgaaaaactgattcattccgaccagaaggtcattgatattgcacttgactgtggttatgaatcgtcagaggcgttcagcagggcctttaaagctgtttttggatacagtcctgtagcttaccggaaagccggacttgatctggtgataaaagcaaaaaaagaactggcgccggaagatgtgtgccatattgccaatcatatttcacacgctcccaagatcatcctgctaggtgagacagaagtagctgggcttcgggggactacttccctgtccgacaatcagatgcccggactgtgggaacagttccatggtcttaacaaagatttttttaccacatctgcgggatatggcatctgtgaaacgcagaagacggcttatacaaaagacggcgacgcgttatattccgtcatgatcggcggtccggtgaaggattttgattgcctgccgctggaactggcaaaaaagacgctgcgtgcaggaagatacgctgttttcacccaccggggcacacttggaaacttatataaaacatatcagtatatcttcggaacatggttgcagaccactagggaagaactggatgacagggaagattttgaagtttatgagcatgaaattctatcctttgatgatccagataatgaagttaaaatttttattcctatcaaatgacaggacaccattttgcgcacgggcgctgacggtgttttacatatcaccgggtatttagggtgtgtttacactatctaggttttgtgtgataattatcgtatgtgtacgccagatatcacacaaaacctagataatgtaaacacaccctagaattcccagattttcagcactaccaaacggtcacttcttagacgttggggagaatttgaactccacaatatctccgtcggccatgacgtagtcgcggccttcctgacgaagcttgccttcctccttgatcttggccatggagccgtcggcggccacgaaatcgtcgtaggagacgatgtcagccttgatgaagcccttttcgaagtcggtgtgaatcacgccggcggcctgcggggcggtccagcccttgtggatctgccaagcgcgcacttccttgacgcctgcggtcaggaaggtctgcaagccgaggatgtcgaagccgacgcgggccaactggtcaaggccggattcgcttaagcccgcgtcctcgagcatttcgcgggcatccgcctcgtcgagctcggtcaagtccgcctcgaactgagcgttgaggaacacggccggagccggggccacggatgcggcgagctttgcctgcaggtccttgttggccagctcgttgtcgtccacgttgaacacgtagatgaacggcttggcggtcatcagatgcaggtcgtagacggaatccttgtcgaagcggccttcgcgtgcggccttgtcgagcgtctcgccggcttcaaggatggtctttgcctgcttgacagcgtccatgtaggccggctcgatcttcttgcccctcagatccttctccagcttgggcagcgcgttttcgatggtctgcaggtcggcgaggatcagctcggtgttgatggtgtcgatgtcgtcggccggatccaccttgccgttgacgtggacgatgtcgtcgtcctcgaaggcgcgcacaacctcgcaaatcgcgtccgcctcgcggatgttggccaggaacttgttgcccaggccttcgccctcggaggcgcccttgacgatgccggcgatgtccacgaaggtcaccgtggcgggcacgaccttttcggtgtggaccagcttggccagtaccggcagacgcttgtccggcaacggtacgatgccagtgttcggttcgatggtggcgaacgggtagttttcagccagcacgttgttgcgggtcagtgcgttgaacatggtggacttgccgacgttgggcagtccgacgattccgatagtaagagacatgattccaagtctagggagaagctggacaccttgaacctgcatgtggtgaaccggccatatgcaaaagcctccgagcatacggttcgaaggctttgactgtgatatgcgaatatacgcaaactctgattggcagtcagccgacgatggcgtctacggcgtcgatgaccgagccgcggaaaccgtccttttcgagctgggcgacgcccttgatggtggtgccgccgggcgagcacacggcgtccttcatggcaccgggatgggtttcggtggccatgtagagcgcgccgacaccttcgaccatcttggcggcaagccggtaggccgtggctcgctgcagaccgtactgcacgccggcgtcgcccaaggcctcgatgtacatgtcagtgaaggcgggcgcgcagccggccaccaccatggcgatgttcatatgcgcggtgtccacgcgctcgatgaggctgatcggcccgaacaggctttcgaaggtttcggtttcgtcgtcggtcagtgtgttgacggattcggtgacaagcacgcccttgcccacggccatcggagtgttcggaatggtgcactggatatggatgtccgaagagtcgacggattcgccgtcttcggtggtgaacaggtcctggtacttcttgagattccagccggcggcgatggagacgacgatcttgcccggcttggcaagttcgtcggccagcggcttgacgacggcggcgatctggtagggcttgatggcgatgatgaccacgtcggcggccgtcaccacttccagcgcattgtgcaacggacgcacgccaagttcggcggtggtcttctcaagcttgtcgtagtgggcggcgcaggcgaccatctggccgccggcgaccacgcccgcgtcaacgaagccttgggcgatggcctgggccatgttgccatatccgataaaaccgatggtgaggttctgagtcatacgttttcctttcgtgcatgtatacagagctccctcatcagagggagcttgcttccttgagtcagaacagttcttcgaggtcgccccggttgagggcttcgtcatagagatgcttgaagacgagcgagccgtgcagaccgtcatgctcgaattcgttggtggtccagtagtggctgttgcccacgcggctcaaggtgtcgagctgcaggccggaatcgacgtacatgtcgtcgaagtagacggcggcctgcagcggcacctcattgcgggccagctgaccttcgtcatagatcacgccgaagtgcgtgtcttccatgagcaggtccatggccggcttgaacgggcgcaatgcggcctcctgttcgaacatccacgggaacatggcctcgccagtgaagttgagcgggcgttcatcagcaccgaattcgggcttgccatcgcgcacgcgctgggcggcccaacgaatgggctcgtcaagctcgccgttggcgtagatgaattcctgcagcggccagtacagtgggcgcgacgacgtggcgttcatcactttggtcaaaaattcgtcagacaacggcgagtcggcagaagcggaaccatcgccatcaaggaaggcgtcgtcaagaatccaatggacacgctcgaagctcggcttcatgccaaagtcggatcccaagcactggaagcgttcgacggtgagcgggtcgccgttcggcatcagcgggaagccgtgggcggccatgccggcgatcacgccaagtcgatgctccacatcggtaccagccatcggattcagtacggaatcggtgagtttgccaacgaattcggcgacttccgcagtagtcggcagcttgtcggcgatggcggccacgcgctccttgtcctgtgggtagcgctcgtagaactgagtcgtcttgcgcaccatgcgcgggaaggtatgctcgtacacttcagcggcgtcggccggcacgtgcgggatgccgccggtggtgaagctggcgattacgccggccgggaacagggacagtgtggtcagggtcaggaagccgccgtagctttggcccatcgtcacccacttgcggccaccgaattcggtcaggcgcagatgttcgaagtcacgcacgatggaatcggcaaggaacttcttcaggtagtcggcttgggctcgtgcgccggccgcggcatcatcgtcgtgcgcggcggcgatgcgggccatggcgtgcgtgtccacgcgcgaggagcggccggtgccgcgctggtcgggcaggatcacccggaagtgcctgatggcctcctcgatccatccgtcggaggtcgggctgttgaggcgcgggccggcaccgccgggaccgccttgcaggaaaatcagcaggggcaggtcgtcatgcacgtgttcgggcgcggtgaccacgcgatagaacagtttgatggtttcgccgtcgaacgcttggcctggctcatggccggtccagtcgagcggaacatcgatggaatggtcctctatggccagtccgggcacgtagtatttgctcagcattgtcatggttcaagactctagtccataaatcctcctgaagagtgataccggttcgtcgccggacacgctagccttgcgcgttatggagattatggcgcgcgtgagggcatggtgcgcacgggagtcgacccgcacactgctatgggacacgttgctcgccgcagcgctgatcgccggctgcgtgccgttcatcggcgtcaccagccctgattcgacgggcggcatattgtttcccgcaactcaggcgtcgatgacgctgtggtcgctgccggtcttcgtgccgctgatgctgcgcaggtattgcccggagccggcggcctggctgttcgtggcgctgaccatcacgcatcttgtgttcggcccggcgatcatgtatttcgatttctacgccctgatcatggtgtattcggtgattctgtacggcaatccccgacattcctggcggttcatcgtcacggcgttcgtcatgggactggtcgcggcgatggtctggtcggtgtctttcaacgtgggtccgctgttcgacggaccttcctccggttcgcgcgtcatccgcgacggctggctgtccgatgccatcacgatgcccacatgcccggcggtcaccggcgtcgtgggggcaagcggcgccgtcaactgcggggccaagatgctcgctgacttcggcatggaggcggcgttcatcgaatcgagcgtgctgagcgtcatcatcatggccttgtggcagcgagcgcgcaacgccacgctggcggccatgcgcgagcgcaacgcttccattgtggcgaaagaggccgaggagacgcgcatcgcggcgctggccgaacgcgcacgcatcgcccgtgatatgcatgatgtggtggcacatacgctctccacgattattgtgcagtcggatggcggccggtatgcgggtgcgcatgatctggccatcgccaagcacacgatgggtacgattcgccatgaagcggaacgcgcgcagcatgatatgcagcgtctgttcaatgtgttcggtgcgagtggcagtaccggatatgccgacatcgattcgctgtttgacggtcatctggtggtgtcccggcatatgaccggcaaagcgcaacctgaccggctgtccgccgacgcggaaaccgccgtgttccgtcttgtgcaggaagcgctgaccaatacgcgcaaacatgcgggcgagggtgctaaagccaccatcgatgaaatctggtcaaacgatgtgctgtcgattaccgtatccgataacggccgtggcgcgacgtctgcagcagacggtcataagcccggatacggattggttggtatgcacgaacgcattgagtcgttgggtggcagcgtgcaggccggcccagggccgaatggtggctttattgtggcggctacgattccgctctcccctgccgccccacagtctggcaccgatacggaggatccggtgctaaccgttatctcgcgtatacgaggattgatggatcgggcgcgccccaaagtactcgaccaaggagatacgcatgagtcgaactgggtgggtcgatttgcgcagtggaccgagcgtcactatcttctgatggacgttatcgccactatcgtgctgattgcgctatttgattccgccacgtatggcgatttgcaaatgatcggcaatgccccgtattcgccgaaccgcgtgccgactataacgctgacgattattatgctctcgcctttggcgttccgtcgccgcttcccagagggcagcgcgctggcgatggcggtgctgtctgctgtgcaactgttgttcttgccatcgattttgaccatcaatatgtttgcgatggtatccgtgtattcggcggtattgtatggacgagagtccgcttggcgctgggtgagcgtggcgctggcagccgattcgtggcttgcgggcatcaaggtgatggctgggtggaatggatacagtcagctgttccatctgtttttgcccgatggtagttccatgctctcaaaatggaggctggttttgtccggcttgctgccgggcgcgggaatcatgttggtcggttttgcctgcattgcgatggctcgatggagccgttcgcgtggcgcaaacgctctggtgctgttgcgacgcgaggaggcgctgcgagccgagcaggagcggcaaaaggtgctggcggccaacttggagcgcaaccgtattagtgcggcgatgcaaaccgaagtactgaccacgctggaatcggtgattgcgcaggctgacgagggactggtgatgctcaacgccgaacctgcgcctgatagtatgcagattgaagcggcttttgccgcgattggtgctcgggggcgcgccgcattggctcatatgcgtcagctgttgagagtgttgcgtgaaaccgggttcagcgacgaggcccatgagggtgtgcagccggatatgcagttgcgaccggcggcttcgttggatagtcagatgcaacacgcgggaacgttaccccggtgagagacttgcccaataagaactcagggaacaatcagggtgtttatggagcggcgctccgataggaaacggatacagtggagagcatgaacgagagcagaagcattcgcgtgattattgcggacgaccaggagctggtacgtgccggttttgccatggtcattggttcgcaaccggatatggaggtggtcgggcaggcgtccgacggcgcccaagccgtggcgttggcggaatccctgcatcccgacgtggtgctgatggatgtgcgcatgcccggcatggatggcattgaggccacgagccgtattacctcactctccgccgcgccggacaacgcggccgattcggccagcccggccgccgacgcgaccgtctcggccgaatcggctgacgaccggccgacgcgcgtaatcattctgacgacgttcgatttggacgagtatgtgatggcagccatcaatgccggcgcctcgggcttcctgctcaaggacaccgaaccggaaacgttgctcaattcgattcgtactgtattccaaggcaatgcgattatcgcgccttccgccaccaagcgactcatcgaaaagatgatgcaggacggttacgcgcagcatggttcgctgaccggcgatgtcgcgcgctccggtgccgtgtacggttccgccgtcggcgtctctggcggtgcggccggcaacggtgccggctcgatgaccggcatcccctcccctgccggggccgcttccgacggttccaatacgtcacgcccagcatacaccgatcccgaactggatctgcttaccgaccgtgaacgcgaggtgctggtggagatcgcccatggtctgagcaatcaggagatcgcggacaagctctttatctcccttcccaccgtcaaaacccacgtggcgcatatcctcgccaaaatcaacgcccgtgaccgcgtacaggctgtagtcttcgcgtacgataacgggctggtgtaacaaataagctccctctgatgagggagcttattgctctacgcttcggccaaggcttcaactggtggcgttttgacggcccggcgggcgggtgccacgctggccagcagagcggcgagcgcggcgacgccgagcaccacaccgttggtggcccattcgaacgggaacacggtgtcgccgtacaaactaaacaccatgtaggatccgagccagccgaacagggtacccaataccactcccaccacgccggagacgagcgaaagcagcaacgcctccaccgccagcgagcgccgcagttggccgcgcgtcatgccgatggcacgcaaggtggcggattcgcgtgtgcgttcgatcaccgacagactcagcgtgttcgctacgccgaccaaggcgatgagcacagccaccgcaatcaaaccgaccaacaatgccatcatgccgttgatcatggtctcccattgcgtacgttcggccaccggaccggtcacggtaacgccagcactggcggagaacacattctgcacgttggtgaatacgtcgttcagcgcaacacccgcgccctcggcgtcaatacgcataagcatgatatgcccgtcggccttgattccaccgttggtgaagtggctggcgtccacgaaggcgaccgcggcgtagttggaggcaatgcggcgatagtccaccttccgcggtttgagcgtcagcgtctgtgtgccgccggattgtccattgccgttttcggcgctgccgttcgcatcattaccggacggaccattggcggcatcggcttgtgcttcggccgctccagccgtgaacgtaacgctcttgtccagcggaatatccttgcctgtagcggcggaatacttgggcatcagtacggaatcgccatcaatggtcacaccggacaaatcggagcgcaccaccttgcgcagcgcgtcgacgccatccacgcccacgaccagcacactcaggctcttgccgtcggcatccttcatggtcatcatgcgggtcggcgcgtagatactgctctgaacgcccttgactttggctgcctcgccggcctgtttgccagtcatatcggcgccagcggcaatcatgtcgacgctgtagcgcgtggtcagcgcctcgttcatggtttgcttggcgctggcggcaccggtggcgatggtggagaccagcgtcacgccgataagcagtgcggcaccggtggcggccacgcggcgcgggttcttctgaatgttcgcatgtgccactttggcggacggaccggccagtgcaaccagcgcgcccacgccgcgcatgagcaccggtagccagaacgtggcggaaagcaccagtccaaggaagatcaatgcacatccgatgatggcggcgagcagcaccagcgaatactgcttgtcggccattgaatcacgtccggcgattttctcggacatctgccatacagagaatgcgcacagtgccacgccgcccgcaatcagcagcatggaaatcacggcgcggaccacaccggcccgtcgcgtgtcggtcagttcgatgggtcgcaacgcttccagcggggtgacggcggtagcggaacgcgcggagcctagcgaggcaatcaccgtcataatgatgccgaatgccataggcaccgtgaacaccggaccggatagtaccagtcgcatggtcatgccagtggctttcatcaggcccgactggcatagtgcggccatgagtccgatgcccaggcccactcccagtgcggaggcgatcagtcccagcacaccggcttcaaacagcacggagacatacagctggcttttgttcgcgccgatggtgcgcagcagggcgagtgtgcggcggcgctgtgccacgagcacttggaaggtgttggcgatgacgagtgccgcgaccagcatggcgagcatgccgaagctcagcaggaagatggtggtgatgctggtttcgcccgagctcatgcttttgacggattcctcgacgagcgcggcacgggattgcacgctgaaatgcttagggagcagtgtgctgacctgttttacggtggatgccgcggccgtgtcgctggcatcgtcgatgtcgagatagacgaggtagacaggcaggttgccgaaatcgttgctgccggccattgcggtgatgacgttgtcggaaagcacggaagcgccaccgtagtaggcgtaggcaccgttcgggtcgtcggtgaggccgaccacgcgcacggtcatgccggagtcggcggccgtgtcggtgccgtcggatggggcggacgcgccggacgcggcatcggaatcaccgtcgtgcgagctcgtgccatcggcgttctgggccgactcatcaccagcgtcaccggtattaccggccgaatcgccggtcttgcccgcatactgcgccgcctgcgagttgacggtcacacggtcccctaccttgacgccgagctggtcggctacggacttggtcagggcgatctcgttgctgtccgccggctggtctccttgcgtgatggtgaccggcagcagcgtgcgctttgtggcggtggtgatgacgtagctgctggcatgcttgttgccacgggttacggtcacggaacccgcgtagccggcacgtgcgtccttgacgcctttggtggcgcggatgcggtcaagctggaagtcgttaaccgtgcgcgtgtagatgtagtcctggtccttatcggtcaggtccttgccgctatccgggctgatcacgtagttcgcgccgccgagctgggcggtattctgggcggcaagcgcatcgttcatcgcgttgccgaacaggaaggtagcggcgatgaacgcagtgccgatcaggatggcgatgcctgccggaatcagcatcctggcgcttttcttcataagtttcagagtgatggaaaacatgggggtatcctgtctctcgctttccggctcagcgagtgtgctgtgcggcggcgcgggcatggcgtatggtgccggttctcccggctgggggcaatggagcgtcggtgatgggcaggttgggcacatcctctacgccggcaagacgggcgagcgtgtcggcgcgtgtgctggtgacggcagtgcgcgtggcgcgttcgcgttcggccataagcagctcgttcatcgtttcggcagtaggattcgattcatcggccacgatctgtccgtcggcgaatacgatggcacggtcggcgtaggaggcggccaccgcatcgtgcgtgaccatgacgatggtttggccaagctcgttgaccgaacgcttcaggaagccgagcacttcggcgctggaaacggagtcgaggttgccggtcggctcgtcagcgaacaccagcttcggcttggtaatcagcgcgcgggcgatggccacgcgctgctgctggccaccggacagttcattcggacgatggttgagccgttgcttgagtcccaaggtttctacgagcaggtcgaaccaggcgtggtcgggcttgtctccggcgagagtcagtggcatgaggatgttctgttcggcggtgaacatgggcaacaggttgaagctttggaagatgaagccgatcttgtggcgacgtagcaaggtgagctgcttgtcgtccatgcgggtcaggtctgccccgccgaaaagaatatgcccggatgtggcggagtcgaggccggcgagcgtgtgcataagcgtggatttgccggagccggacgggcccatgatggcggtgaatttgccgcgttcgaaactcacgttcacgccacgcagggcgtgaaccatattgctgccggtgccgtagttcttgaccaagtcgacggcctgaatagcgatgccgcgcgatgcggacgggttctgcacgttcataatgcctctccatatttggccggaccttatgcccggatgacgattccaacttatgaagaaataacggcgcgccccatcgtgcgccagactgaattgggctaggggccacgcgccggccctcatccttgaggattatgtcgtctcaggtctcacactattcatgcctctgcgcaaacagtgtgaggcatacagacgcaagaaagcccgcactgcatgacgtcagtgcgagctttctactccttgggtcaagcgatcaggcggaaggcaccccatgcggctcgatgattcgcgatgcaccccattagcatcgcgccccttctcatcgggccgtcaaccctcctgtcgacctcacttggccaagccggaagcgcgaagggcttcgaagccgcccttcaggtcatcgaggatatcctcgatgttctcggtgccgatggacaggcggatggtgccctggtgaatgccctggtcctcgagctcttccaaggtctcctgggagtgcgtggtggaagccgggtggatgacgagggactttgcgtcggccacattggcaagcagagagaacaggtgcagattgtcgatgaagacgcgagccgcatcctttccgcccttgatatcgaaggtgaagatggagcctgctccgttcgggaagtacttctcgtacaggtcgtgatccggacggcccgggatggacgggtgggagacggactcgacttccggcacggtctgcaggtactcgacgaccttcagcgcgttctggacgtggcgctcgacacgcagggacagggtttcggtgccctgcagcagcaggaaggcggcgaatggagacagggtggcgccggtgtcgcgcagcaggatggcgcggacgcgggtcacgaaggcggtgccgccgagagcctcgtagaagttcaggccgtggtaggaggggtccggctcggtcagggtcgggaacttgcccggcacctcggcccagttgaacttgccgccttcgacgatcacaccgccgagggtggtgccgtggccgccgatgaacttggtggcggactcgaccaccacgtcggcgccgtgctccagcgggcggaacaggtacggagtggcgaaggtgttgtccacgatcaccggcaggtgatgcttgtgggcgatttcggagatggcctcgaagtccggcaggtcggcgttcgggttgccgaaggtctcgaagtagacgagcttggtgttctcctggatggcgtcctcgaactcctgcgggttctcggcggaaacgaaggtggtggtgatgccgtcgcgcggcagggtgtggcgcagcaggttgaatgtaccgccgtagatgttcttggcggcgacgatatgatcgccggactgggtgatgttgcgcacggcgtattcgacggcggcggcgccggaagcgacggccagaccggcggtaccaccttcaagggcggcgatgcggtcctcgaagacaccctgggtggtgttggtcagacggccgtagatgttgcccgggtcagcgagaccgaagcgagcctcggcgtggtcgaagttgtggaagacgtagctggtggtggcgtagatcgggactgcacgggagtcggtggccgggtcggcctgctcctggcccacatgcagctgcagggtttcaaaacggtacttcttgttgttctcggccatgggtctttctccttggttgtgctaggtcgcgaggatttttccttgccacccgcctgccgtgttcgggcggttggcgaggtgttggttatgaagttacgacgcttgggccgcgcggcgcaagccgaacgttatcgggcttgcctataagggcttataaagccttgggatcattgacgtgagagactgtcagaagtcacgaaaaagtcgttgaaattatcgcgacacgccgggccgcacgcatgcgctttcacggtcgactgcggtcacggtgatatcgctaccatgcctttcgcgcatggctcaagtgtccgtgatgattgcttgttccacccgtcaccaagacggtttgcccgctcggtgatgacgtctgttccttttttccgccgcccggttacatggtttacatgacgaacgactacagtcaaacatcgccaatgaattattccgccaacatggtgaaggggttcgaacagacatgaccgatgtaacactgtatgaccgtgatccgaactatattccgcgcgtggccgccgtgcacgacatgtgcggctacggcaagtgctcgctgaccgccgcgattccgattctctcggccgccggctgcgatgtgtgcccggtgccgaccgccctgttctcggcgcacacgcgctatgcagtgttcacgttccacgacaccacggatattctctccggttacttggatgcctggcagaaggaagacgtggaactggatggcgtgtattcaggcttcctcggctcccccgatcaggtggcgatcattcagcgtctctaccgtgaatatccgaatgcgctgcgtctggttgacccggtgatgggagacgccggcgaaatgtaccccacgtatacaccggagctgtgcgaggcaatgggcgctctggccgatggtgccgacgtgttgatgccgaacctcaccgaagcgagtattctcaccaagcgtgactatcctggccagaatattgatgaggccacggttaacgagctgcttggtgctctgctgaagttgggtgccaagaacgtggtgttgaagggcatcgaccatggcgatggcaaaatcgtcaactatgtggccagcgcttccaccggtgttgccggcaagatcgagctggctcatgaaaagctgccatacatgattcatggcacaggtgacgccttcgcatctgccctgtgcggcgcggtgatggccggccgcggcctggccgagtcggccgaaatcgccggcgagttcgtgcgccacgccatggtcagcacccgtaaccagccgcatttcgaggatcgtggcgtcagcttcgaactgaaccttggcgaactcaccgatttggtgaagtgaccgcaccttggctcccctctccgctcactgggtctgacgtattcagcgaacaactcggcgggttgtctgtcgtcacaggtaagtcggctggggagccttggtaaaccttctgaactaatggtggataaccgggttttcatccacacgttatccacaacacgccaaaccgcgtcatagtatccacatttgccggttgcgcttgtgctcttacataagtaacccgcacagtggaatcatgaacgctttaccacctacccagccgacgacgaagtccggcatcgacgccggccttgcctttcaccagcccatgctggcttcacctgatccgcaggcaacgctgccttcggaacggattgcggccacgatgggcgaccgcaatctgacgcccaaacagttcggtgcgctcggcgagcagtatgccgccgcgtggctggaggaacacggttggacgaccttgagccgcaattggcatacccgttacggcgaattggacatcgtactgctcaatcccgagtacacggtggtgttcgtcgaagtgaaatcacgccggtccatgcattacggatatccgcaagaggccatcacgccggcgaaacagcacaatctcaggaaagccgcctgcgattggctgcttgaccggcgtaatcgtgtgccgcatacggcagtccgtttcgatgtcgtcaccatcgtgcttcgggtgggcagaccgctcgtgcatcacatcgaaaacgccttctgaattcgcccccccccaaaaaaacagccacgttgcgaaacacattgtgaaaggagtagacatggctatcggcagcactctctcagtcggactgatcggccttaaggccttcatcgtccaagtgcaggctttcatcagccctggcttgccatacttcagcatcatcggattgccggatgcatcgttgtccgaagcccgcgagcgcgtgaaatcggcgtgtcaagccactggattcggttggccgcaaacccgcgtgaccgtgaacatgagccctgcggccatgcccaaacgtggttcgtcgcatgatctggccatcgcggccagcgtcctatgcgcggcgggtgccatagggcatgattgcttggaagataccattgtgctcggcgaagtgaatcttgacggctcggtgctgccgattcatgggctgctcccgatcatgctgcatgccgaggaacgtggcgtgcgcaaaatgattgttccccatcgcaatcttgacgaggcttcgatggtggatggactggatgtagtgggtgtgaggcatgtgggtgagctcatcgaactgatgggcggcgatgccacctatacgattactgatacaccggttgccgacgagaccaccatggatcaatcgcccacaagccatcccaacgattgtggcgatatgaacgaggttctgggtcaggaacatgccaaatgggcgctgcaagtggcggcggcaggcggacataatctcatcatgaccggcccgccaggcagcggcaaaaccatgctggcctcacgtatgcccggtatcatgtgcccgttgaacgaggcggaacaactggaggtggcgtcgatacggtcgctgtgcggcatactgcctcagtacggcatcaccgacatgccgccgttcgaggcaccgcaccacaccgccagcacggcggccttggtgggtggtggcaacggcatcgccgttcccggcgcgatcacgcgcgcgcatcgaggcattctgttcctggacgaggcaccggaattcagcgcacgcgccctgcagacgttgcgcgaaccattggaatccgggtatgtggcgctttcccgttcaaaaggcagcacctattacccggcctcattccaactcatcatggcggccaacccctgcccgtgcggatactattacggcaccggcgaacgttgcgcttgccgggaaaaagaccgtatacgttatttctcgcgattgtccggaccgatattggatcgtgtggatattcagatggcggtgccaccggtctcgcgcattgccgtgcaaagcgagccaatcggcgagtccagtgccggaatacaagctcgtgtgattcgcgcccgtcaagtggccaaggaccggttcagacagtacggatgggtgtgcaacgcgcaagcttcgggaaaatggctgcacgccaatacgtcgctgaaagcgatggaattggtcaatcgggccctgtccaatcatcaactcacattgcgcggggccgatcgcgccatgcgtctgtcttggacgctcgccgatctggccggccgcgtgtcccccaccgagcaggacgtccatcagggcatcgaaatgagaacgaggatgacatgagtaacgctactgatatccgacaatctggcggcaccgcaggcagtgtggatcacaccgatacgggcctcgctgtttcgcgcaccattcccatgcctcccacggatacgttgtaccgcgccgcgctcacgttctgtcttgatggggcggatgtgatgatgtacgccacgctcaaaggcgcggaaagcgccgaatccctctggcacgcgttggcgcaatcccatccaagccagccatctggaatctgcggcccggcgctgtcacgcattgaccgcatgttcgtggatggcctcacccgatggggccgcaaggcgtcggcgaacgcgatgcgctccttccgcaatgcactggccggctggcataaccgcatgatggacctgccctcgcaagacatcatccaactggccgactggttcactatggatggcacgcaatggattatcggccccggccatccatgttggccctcgcagttggccgacctgtccattcgctccgattgggcgccaccgctgtgtttgtggatcaaaggcgatccacgcgcattgaccagttgcgccaaaccggtcggcatcgtcggttcacgggacgtgaccgaatacggccggtatgtggcacacaccgtagccgaacaggcagtcgttgccgggcatctggtcgtgtccggaggcgcaatgggcacggatgcggcggcacattggggagcgttgaatgcgctgcacggcagaatgcccgccaatgtgggcagaaccgttgccgtattcgccggcgggctcaaccatatcggaccgatgcgtaaccgcacgctgttcgaacgtatcgaggcgcagggtggtgcactgatcagtgaactgtgcccagggacgattcccgaagcccgtcgttttctactccgcaaccgcattatcgcggccatgtcttccacattgattgtgacgcaagcccggttgcgttccggagcgctcaacaccgcgggatgggcatgcgaattgctgcgcgaagtgtatgcggttcccggtgacatcaatcagccttgcaacgccgggtgcaataagatgatcggcgaccaccgggcgatgattctgtgtgccgccacatccactgaggatatatgccatgaacggcataagcccgttatggcggcatgcccaggcataccgaaatccacaggtcaggactcgtccgaaaacgaggaggccatggaagtgccggcaacgactccgttatcgccagcatcctcggaatcatcggcgtcacaggagtcgtcacaagattcaggtcattcgaaacgtcttaggaccaagcacactcagcctacgctcgttcaatccaaggatgggccggcgagcgcaactgccgaggccggtgccaacaagagcaagggtgaagagccgccctcgtcgcatcagatgccggatcttcgtgtcaagccgaagctcgatcccgagaaggaagcccaacaacgtatcattatcgccaagctgccggaaatggaacgcacattagtggcattgattcgtgaatgccgtaaacgacatctcatcgtcaccccggacgcactattgcgtgtggcgcgagagacggtacccgacgagattcccaatatcggcaccatacttgagctactcggcgcattggagctgaagggagtgatcgagcgggatgccggcatactcaagctgagcagccgtgtcggctaatcggctttcatgacacggctcgaagactgttcggcgggtgtgcgagaatcgaacccatgagtccgaaacgtttggaagatatgtatgatgcggtgatcgtcggcgccggagcggccggcctgtcggcggcgttgggactgctgcgctcccccaaaatcaccgagctcaaggaacaaggcgtggacccgaagatcctcgtggtctccaaactgcagccgctgcgttcgcacaccggttcggccgagggcggcatcgccgcgagcctgggcaatgtggagtccgatgactggcactggcattactacgacaccatcaagggcggcgactggctcgtcgaccaggacgcggccaaactgctcgccgaatacgcgccgcagaccgtgatcaacctggagcgtcagggcgtggccttctcccgtaccgatgacgggcatatcgcccagcgccggttcggcggccacacgcgcgagttcggcggtgccccggtcaagcgcgccgcctatgcggccgaccgcatcggccaccagattctgcacaccttgtggcagcagtgcgtggccgccggcgtcgagttcgccgaggaatggtatgtgaccgacctggtgctcgccgacgacggcaagcaggcggccggcatcgtggcatttgacacgcattcgggcaagattcaggccatccacgcgcgcaacgtacttcttgccaccggtggcgcgggccgactgttccataccacatcgaattcctgggacctgaccggcgacggcatggcattggccttggccgccggcctgcagctggaggacatcgaatttgtgcagttccaccccaccgggctcgcgcacaccggcatcctgctgtccgaggcggcccgcgccgagggcggcatcctgaggaacgccgacggtgagccgtttatggaacgctacgccccggagcatagggatctggccgcgcgagacgtggtctcccgctccatcatggcggagatcgacgccggccgcggcgtcgccgacccgaaggacccggatggtccgaaggactgcgtctggctggacatgaccggcatcgaccccgaacgtatgaaggaagtgctaccgcaggtggtcgaaaccatcgagcagtacgcgaacctcgatccggccaaggacctggtgcctatcaagcccactgcgcattacacgatgggcggcatccccatcaccaccaatggcgaggtgtaccgttgggccgacggtgccgtgcaggtagtcgatggactgttctccgctggcgaatgctcttgtgtctccgtacatggtgcgaatcgtctgggcggcaattctctgctcgacgcctgcctgttcggtacacgtgctggtcagacgatggccgcacgcatcgtcgagaacccggttgactcccccatggccgatgattcgaccgatgacatgctgaccgatgccgccgatcaggctgccgattcccgcaaggcagagcttgacgaactgctcgccggaccgatggacgattcagacgatggcgggcccaccgccaatccttatcagctcatggcccaactcggatcagtgatggagcaggctctggccgtacgttgcaccgctcagaccatcgatacggcgttgactcagatcaacaacgacatcacaccggttgccgataccttgcgggcccatgacaagaccgccgctttcaatcaggaggtcaccgccatctgggaagtccgtcatctaatcgaactggccgaggccatgctgcacgcttccgaatcccgtcaggaatcccgcggatccatgcaacgacttgatttccccgaacgcgacgatgagcatttccttgctcactcgatggtcgccgatgatggtccggcaagtttcaagccggtgcacatcaccgactatccacccaagaagcgcgagtactgatccgctggtggtaataccaagccgcctagggcttgtggcacaataggttggctgatattggacttgacatcccactgtttcatggaggcagaacatggctgaggcgagcaacacgacggttaccctgcaagtgcatcgtttcacgccgcgacccgagcgcgccgaacgtgcacgcggcggcagcccgttcgccaagaaaagctccccattcggcggcggctcggattcggcggcacgccgtcgtccgcgcggcaagcagtgggtgcaggaatacacgattcccgcgcgcccctcggacaccgtgctcgactgcctgctgaccatcaaacgcaccgtcgacccgacgctggccttccgctattcgtgcggtcacggcatgtgcggttcggacgccgtggccatcaacggcacccccaccctgctgtgcacggccaccatccgcgattgggccaagcagcccggcgccatccccgaagtcgatgacgaagggttccggcacaccggcaccgagtccgaagaatccgacgattccgcggaaaacgacgcaaacgcggcagccgaccaggactcggccgcaaacggctcgctgggagtcatcgaactggcatccctgcccggcttcccgccgcagcgcgacctcatcgccgacatcgacccgatgctcaaccaaataaggaagctcaccccatatcttcaggcggacggcgtgctcgccaccaccgccgaaggcaaggtggacgtgttcgaatacctgcagaaccccgaacaactcgccaaatacgagctgctgagcaactgcatcgcctgcggcgtgtgcgaaggtgcctgcccggtgtacgccggcggcgacgctttcatcggcccggcctcgctgatttgggcctcccgtttcgtcaacgattcgcgcgacaccaaggccatggagcgtatggacgccatcgacaccgccgacggcgtggccgcctgccagtccgtgcgcgcctgctcccgccactgcccgcgcggcatcgatgtgggcgaggagatgtggcagatcgtggccaaggtccgcgagcgctaagccgcgccacgaccagctacggcaatcgctgcaacacgtagtcgatacatccaccgggtgcccgcacgagagaagacataaaggaacgaattatggacagaacgcagtacaccaacctcgccaaggcatgggaattcaccgaggaacacgcgcgcgaacgtgaatccaatgcgttgaccgacgcccgtacggccgccgacaagtccggccagttgcagggttcggccgcgcaggcccgtctgctgggcatgctggtgcgcatcaccggcgccgcttcggtcatcgccgtaggcaccggctcgctggtggagaccttgcagctcgcccatgcgctggataacaagggcctgctgactgcggtcgattccaccgctcagggcatcgcgctgattcgcaaggcgttcgccgaactgcaggatgagaccgacaccacgttgcgtgcggtgaacgccccggccagcgtgtttctgccgcgcctcaacgccaatgattacgatctgatcgtggtggcgggcgacgccgagaactatgccgccacgttcgcccaggcctcccgtctgctgcgcgcgcacggcgtgatcgtgttcaccgatgtgctggcgttggaggacggtcagggcggcatgattaatccggccgaccgcagcgacaaggccatcgccatgcgtgagctgctcaccaccgtcgaagatgacgaaggtttcgagtccacgcttacccctgacggcacaggcctgctcatcgcctacaaaaagtaactctgcccttggctcccctcggagaggggagccactctatctcgcttacctcacaattgcactgacggccacctccacggcttcgtcggcgtcatcggtcacggtgaccagtttcgggtcgattgccgaaatcatgccgtgctcggccaccggaccgttgagccagtcaaagagcccctgccagtattccttgccgtagagcaccaccggaatattcgccaccttgtgggtctggaccaaggtcagcagctcgaacatctcatccagtgtgccgaagccgcccgggcacacgatcacgccggaggaatacttgacgaacatggttttccgcacaaagaagtaccggaagctcatgccgaggttcacccactggttcaacccctgctcgtgcggcaattcgatgccgagtcccacggatttgccgccagccagtgccgctcccctattcgcggcttccatgatgccgggaccaccgccggtgatgacggcgatgttgcgcttggctatctggctacccatgcgccgggccgccttgtagatcgattcggtgcgctgggtgcgtgcggagccgaaaatagagaccgcaggtccgagctcggcgagcgccccgaaaccgtccacgaattccgattggatgcgcagcacacgccatgggtccatgtgcagccagtcggtgtcctggtcgggtttcagcagattggcggtggtattgtccgagggaatcatctggccgcgtagaatcaccgggccgcgatgataggtgtcgcccagcggcgagacgtcctccaagtcgaccgggttcaccggcgttgcggcagcctcggttgccgtctcggcctccaacgttgccgcatcattcgcggctgtggcttccaatggttccatatcgtccacgactgtggacttggatgcggcctcggctagattctttgcttcagcggcctttttgccgtcgttcttcttggatttcttctgcttctttgccatccaatatcctcctgtacggtgctatcgactcttcgcattctagcgcctgaagctctgcatacgttttccgcgaaatcatccttgacttcgtgaagaacgtacggtgagtgacactcagcgtacggttttcacgaaataaggcctcatctcgtgaagaacgtacggtgagcgcgcctcagcgtacgttcttcacgaaacaaggccaacaatggagtagggatcgtccaagccatcagtggcggaagtcaatctccacactggcggtgccgtcggcgagggtgccggggtgttccgtgggcgtggtggactttgtggtgcgaccggtctgaccagcgccatcgccatcaatcgattcgtcatcctccgcatcggccgctgctgcggctgcggccttctcgaatctcttggactgacggctcagcagcacaccggaaatcgcagcggcgatcagggaggccaccagcacgccgaagcgcgcctcagcggaaagttccgcattcttgtacgccagcgaggcgatgaggaaggacacagtgaagccaatgccgcaggcgacggcagcgggaatcatgtcgcgcacgcgcagccccttggccatcttgagcccgcccacatgcgtggccagccatgcggtggtgatgatgcccaaaggtttgccgaccaccaaagccacaatcagtgcgataaccaacggcgaagccagcaacagcgggctcaccgactcgaagtgcacgccggtggcgaacagggcgaagatgggcagggccagcagtgcggagaatggctgaagcttgttggcatagcgttcggcacgcggtgaaagttcgccgtgcatttcacgggagggagtcagcaggccaaccagcacgccggccagtgtgggatgcacgcctgcctcgaacatcatgatccaagcgaggacgccgacgatgccgaccgcaatccacggcacttttttcagtcgtacgaggtatgcccagatggcggcgcacacgatgatgccgatgaaccaataccaggcgttgatcgaggagaagaatacggcgatcagaataatggccagcaagtcatcgacggtggcaagcgtcatcaggaacgcgcggatcgaaccgggcagggccttggcaaacagggcgagcacggccagtgagaacgcgatatccgtggcggtgggtactgcccagccgtgcgacatctccgagaacgggatgctgctgccggtggtggtcagaatcagcgtgccgggttcaccaggcccgatctgagagaacaatgccgtgacggccaggaacaggatgggcggggcgatcatgccgcccaccgcgcacagcatcggcacggcggccgccttcggattggcgagcgagccggtggtgagttcctgcttcagttcgaggcccacggtcaggaagaagatggtaagcagaccatcctgggcccaatggccaatcggcaggtcgagattggtgtaggggatgaacagatgcgtttccgcgacggtctcgaacgcatgcgcggtggcgggcaggttcgcgagcaccaggccggtgagcgcgaagccgagcatgatgagtccggaaatacggtctgaagcggcgattcgcctgatggtggaccagagtcccttcttcgcaccggcggtcgtggccatcgcgtctccttactgtactctcttggatgaaccgtatgtaatagtacggaatatctcaggacgttccgctccgggctgagtcgcgaagggcaaccttaccccacccctgtgtggccgactcaaacgggccaatacaattggaaaagcctcggaagcatttcgctttcgaggcttactgtgcgccagacaggattcgaacctgcgacctgctgatccgtagtcagctgctctaatccgctgggctactggcgcataccactgttgtccccgtggttcgggagtgcgccagacaggattcgaacctgcgacctgctgatccgtagtcagctgctctaatccgctgggctactggcgcatgttgtcttttcagacaactcgatatataatacacgccgttcagatgaatgcaactcggcgtgttgcggcgagtcgcaccatcctaatcgccaccgcaacggcgtatttactggcctcacgccgcatgtgtacggactcggtcaagcaaaaccgactacgcaactttgaggcgtccctgcggcacatccacggcttcgcgcaagagtttgggcgtactggaaccctctacggacgccttgtccacaatcacctgcttcacatcatccaaactcggcaactggaacatcgtgtcctgcaacgtacgttcgataatcgaacgcaacccgcgtgcgccggtcccctgcttgatggcgatatcagcaatcgcccgaatggcctgttcggtgaactgcaggtcgacgccgtcgacggcgaacagcttacggtactgcttgatcagcgcgttggctggctgggtgagaatcgccgtcagatcgtctacggtaagttccttcagcacactggcgaccggcaaacgtccgatgaactcaggcaacagcccgaactcggccagatcatcggcattgacctgttcgagcaattcctcgtctttcatgtcggcgtcgtgccaattcgcgccgaagccggtctctcgacggcccaatcgcttgcgaacaatatccgtcagtcccacgaacgcaccgccgcagatgaataggatgccgcgtgtgtccatctgcgcagtgtcctgctccttatgcttgcgcgtgccctccaacggcacggaggcgatggtgccttccaaaatcttcagcaacgcctgctgaacgccctcaccggacacgtcacgggtgatggaggtgttctcacctgatttgcgcgcgatcttatcgatttcgtcaatgtagatgatgccgtgctgggctcggcttacgtcgccatccgcggcttggagaagacgttggagcacggtttccacatcgtcgcctacatagccggcctcggtcagggtggtggcgtcggtgatgacgaatggcacgttcattacgcgggccaacgcctgtgcaagataggttttgcccacaccggtggggccgagcaacagaatgtttgatttggcgacctcaacgtcagccaaagggtcactgttgcggcgggtagcacgcgtctgggcgggagcggattgcttggcttgtttgccggtctggccaccgtgcccgttattcccgtcaagctgctcagcggactcctgaagctccatattgacgcgtttgtaatgattgtatacggccacggacaatgcgcgcttggcgttctcctgaccgatgacgtagcggttgagataatcgaagatctgagcgggcttgggcaggctcagcgaattgacctcggcatctttgacacgctcctcggagatgatgtccacgcacagggcgatgcattcatcgcagatggaggcgttgggaccggccaccagttttctgacctgacgttcggttttgccgcagaacgtgcaacggggtacgtcctcgttgtagctcaccacacgtcccatgattctcctttgccgaccgcgccgcaccgtcgaaccgccacgctgcgcattatcattgtcatccttgaaatacaatacccccggtcgttgccgaccgagggtattgcaatgttcggaagttttactggcggtgttccagcacctcgtccacgatgccgtattccttggcttcaggagcggtcaggaaagtgtccacttcgatgtcgcggcgaatcttctcgacatcctggccggtgtgcttggcgagggtctcctccagccattcgcgcatacgcagcatttccttggcctgaatctcgatctccgtggccttgccgaatccttggtcgatggccggctggtggatgagcacacgggcgttcggcagcatcaggcgcttgcccttggtgccggaggccagcagaatggcggcggcggaggcggcctggccgagacacacggtctgcacgtcgggcttgatgtactgcatggtgtcgtagatggcggtcatggccgtcatcgaaccgccgggtgagttgatgtacatcatcacgtcacggttcggatcctgggattcaaggaccagcagctgggccatcacgtcgtcggcggaggcgtcgtccacctgcacgccgaggaagatgatgcgatcctcgaacaggcgggagtaggcgtcctgggtcttcatgccatacggggtcttctccacgaactgcggcatgatgtaacggttggtcggcgcgggctgggctgcgcgggcggcggccggcatgaaaccggctacgccatgacggccggccaagcggtcggcacgggcggcgaactttgcttcttcacttgccatgagtctcactccccctgctggttgttgccgatggtgtccggcgtggtcacgagcttgtccacgaagccatagtcgagggcttcctgggcggtgaaccagtggtcgtattcgttgtcgcggtagatctcctcgagggtgtggccggtctgctcagcggtcagctcgctcatggttttcttcatgtccatgatgagctcggcgttgatgcgcacgtcagtggcggtgccgccgatgccgccggaaggctggtgcatgagcacacgggcgtgcgaggtcaggtaacgcttgcccttggtgccggagctcagcaggaactggcccatggaagcgcacatgcccaggcccacggtcgccacgtcaggctcgatgagctgcatggtgtcgtagatggccatgcctgcggtgatggagccgcccggcgagttgatgtacagccagatgtccttcttcgggtcctcggcggccagcatcagcagctgagcgcagatgcggttggccatatcgtccttgacctcttcacccatccagatgatgcggtctttgagcagacggttgaaaatcgggtcgacggggccggccgggacgtcatcgcccgccatgaccggcaaggtcgcaaaggtattgctcaccttgattctccttctaattactcgaacattgttcagactaccgccttgaagcgactgaaggcggcttttcgcgtgctttttggcgggtagcgtagggatttcgggttattccaaggtgtcgaggacgtcgtcaatgaggaggcgggtctgggaggcggcatcgtcgcccagacgcgggaagcgacgggcggcattggcggggctggcaccggcggctcgcgccacgttggacttgctggcaccatgggccacggctttttccgcgagccgatcgaccagtgaatcggcgacttggcgcatctgttcggccacccataattgggccatatccgcaggcaagtcgtagtcttcggccacatcgctggcggcctcctgaatggcggcccacaacaccatgaatggctttcgatagtagtcaatctgctcagtgagcggctcagcggcaagcgattcaagtgccgcacggacttcggtgttttctgacatagctttctttacctcggctcccctcagtctcactgtgttcgacagctcccctcagagaggggagccagaatatatgcatctacttacttacgactcagcaaccactttgatatcaacgacgacgtggccacggccatgccgactggcacgaagaaggtaatcggcgcttcggtcagctccatcaccaagcacatggccataagcggtgcctgctgtgaggccgaaagcaacgaagccgcaccgatcaaggcacacgcggttaccgaatcagtcggaaacatcagtatccatacgaggccgagcatcgcacccagcgtggaacctaatgcgatgccgggctgcagcacaccgcccgatgcaccggagcgaatggtcatcagcgtcaccagcgccttggcgacaaaggtgagtgccaacacacccagcaacatccagatattggactgggacagcgggaaaccggcgttcatcacggatccagaagagccgctcccaccctgaagcatggcccaaaacgaggccattccagagcccgctcccccgccagaggccgaatcggatacattaccgccgcccgtcagcaagttccatggagaggcggccgctgaagatgccgactgcatggcaccagcagtgccggcggtttcaggaatgaacgtgctgaatccaagttgcgctgcggcacggccgttgcccatcacctgcggcacaacaatcgccaccaaaccggtgatgagaccagccagcggcatctgccacagaatggccttgccggtcggcttgtgtgcttccgcccattgcgaaccttttcggaacaatgcgccgcccactccacatgccgcaccgcagatcagagcgaacagcattaacgttggcgtggattccggttgcatggcggtgatgtcgtagaacaggcaatgccctttgatcgcaaccgccacgaatgcggcaatggcagacacgcccagtccaaacgcaaccttttcgatcgtcacatccaccaacaggatttcgacggcgaagaacatgccggccagcggcgcgtcatagacgcctcctagaccggcaccggcagccactgccaccaccatgcgccggtcgataccatcaacgccctcgatatggaacaggtcgcaaaaacgttgcgcgatcatggcgccgagttcgcgtggggcgacttctcggccgatcgaggcaccggagccgacgatgaaaatctgcaacaccacatgcacaatggtttgccagaaaggcattcgctttcccgccacggccttcttgactgagggcaccacagtcgttttgtgtcgtagcagataccagataatgcccgcgatgccgagtcccacggtcaccgatatcacacggcgtgcagcgggcacgccgaatggaccagacaattctgggccttcgatgtagccgagcagcacatgttcaacgccgtagagcaacagggtcagcagacctgctcccacaccgatgagcacgccgagcacaatggtcgccgcagcgagccaaccaaggcgtttgatagtaaccgttggctgcatgtcaacctccgcacgctatgcaacgagtatgccttgggaactcccctcagtctcgctacgcccgacagctccccccaaaggggagccaaagaaatagtccttttaccagaataggaagagcccggaaccgtgaaacacgattccgggctcaaacaatcacgctaacgcgatgaggctatgctcactcagcgtccttggcgtcatccttggcggacagttcgtcggccacggcggcagcagcggaagcggcctcgacggactcggactcttcgtcctcagcggcctcgcccaggaagccggagaggtccacaacctcgccatcagcggtgaacttgacggcgcgcatgccggcgagcagacccttggaacggccgacttcctgcacagcggagccaagctggccattcttgatgatggcctggatgaagttgttcgggtccatgccgtactgctgggcgatggaagcgaggaagttgaacacgtcggactgggacacctgaacgtccagcttctcggccagggcgtcgagcaccatctgatcgcgcagatccttctccacggtctcctcggcctgagccttctgctccttggtggccttctccgggtccggggtcatgcccttgagctgctcttcgaccatgttggccttgacacccttcggcaccgggatctcgagaccttcctgcagcttggcgatgaaggcatcgcgagcctcggtggcctgacgaccttcggcgtcctgagcggcagccttgcggatgtcagccttgagctcgtccagagtgtcgaactcggaagcttcggaagcgaactcatcgttcagctccggcagttcctcagccttgacggagttgaccttgaccttcacggtggccttctggccctcgtgctcgccggcttccagcgtgccttcgaaggtggtctcctcgccggcggacaggccgtcaagagcctcgtccagaccgtcgagcatggtgttggagccgagctcgtagctcacgccttcctgggagtcgacggtctcgccgtcaatctcagcagtcaggtcgatgttggcgaagtcgcccttggcggccgggcggtccacgccgaccaaggtgccgaagcgctgacgcagggtctcgaggcgcttgtcgacgtcctcatccttgacttccggcttggagatggcgatctcaagaccgtcgatttccggcagttcgatgtcaggacgacgctcgacggtggcggtgaacttcagcttggtctcgtcgttggcggactgcggaacatcctgcacgtcgaactccggctgagccatcggacgaatcttcttctcatccagggccttggagtacagctccgggaccgcgtcgttcacggcctcaccggcgacggcggcgaaaccgatgcgctggtcgatgatcttgccgggaacgtggcccttacggaagccgggaacgttcacctgcttggcgatttccttacgggccgcatccagatacgggttgagctcttccggttcaacagtgacggtgagcttcaccttggtgggctcgaggttacgaacgctgatcttcacgctaatgactcctcaaaagtcgttatttcttacagttctgccgtaaggcaacctctacatgataacgccacttacggacggtgcaatgagtttcacctgccagtttcttgcgccctgctcgatcaggaacgtctcgacgtccacttccaccgggtcttccacccagcacaggttgcgtaggatctgtggcttgatgatcatctcggccggcgtgcgggtgtcttcggcgatgcggttgatcacacgccgtacccgctgcagacggtcataacgctccggatggcgctgttgccacagtcgcatggatcggggcgcgttcaccacaccgttttcgtcctgttcgggggcgggcatggtaggccattgggtgggcttcagggccatggcgcggtcgatggcctgcttccagaccttcggcttgaccgtacgctgaatcggcgcgtaccgctcgaacattttgtcctgctcggtgccggtatgaatgcgcacacgctcgttcagggatcggagtgcgcggaattgggcggcattgtgcggcttgttggtcgcggcctcgatgattgacgaatcggtcaataacaggctgggagcgatgtcgtatcgccgggcgagccggtcgcgctcctcccatagggatttggcgatggccaagcccctcggatcacgactcagctgggtgatgcgcgagatacgcagccaaggaatcggatgaggtttgcgcggggcaaggcccgcaaccaaagcgtgagaaaactcttcagcggcccactcgtccttgcctgcggctttcaggtcacgacgcatcaaggtttcgagttcgataagcacctccacgtcgagcgccgcatagttgcgccagtcgcgcggcagcggacggtaggaccaatcggcggcggaatgctctttggccagcgtgatgccgaggtagtgttcggtgacggcggccagaccgaagcggtgcaggccgagcaatcgcgccgctatttccgtgtcgaacaaggccttgggtttgagtccgatttcggcgaatccgggcaagtccatcagagaatcatgcagaatccatgtagcatcgcccacggcgtcattgaattcattccagtcagctccggcccgtgtcagggcgacgggatcaagcaaggcgatgcccgcaccttcacgtttgaactgaatcagccaatcctcatgtccatagcggaatccggacgcccgttcggcgtcggcggccagcgagcccgtcgcctcggccagcgcatcgcaggcacgatgatagccatccagcgacgaagtgacatcgggcactcccccgcgaggctctttcagcagtcggggttcggtgtcacggacgtcactcaactggcgtcatcctcctcaaaacggatggtggatctgatgaatgcggcccacgagcggatttgtgcgccggcgtccatagtaccgtccggtccggtcccgtcaagcggggtccatgagacgcgaatctcacacccggcgctggtggagccggccatcgaaccaaaagccgtgttttgggtcacggtgactgtgccggataccgaatccggctcgatgccgtcgaaatagtcgcacatgtcatcccagtacatgccgggggtcagagaatcgttttcggcggtttccagcggcagccgcgcgaacgccacgcaacgccagttggaatcccggtcaatgcgcagctcatgagcataaagcatcatgatccagcctgtggcgattcgtgattcggcatcgttgccaagaccggcggaaaaggcatcgccgagggcacgctctcccgcttcgaattccacgccgataccataatcggccaaggtggaaggcacgggaatctcccgatagcgcacgtcatggatgcgcttcatggtgctgacggattcgacagctgcccatacttcatccggcacaccctgagggcgtacggggcgtccgtcgttggacgctcccataggaaatgcgtagatgtcggccatatctctagggtatgggcgaacgggccgaatcgtggtatttacgcgcggttcggccctgcaatttaaaacacggtgaagccgtggtccttgaactggttggccacccgcgaacgggtggcggcgttgggtcccttctggttctccagcgggtatgggatgcgcagttcgtgccacttcgggcggccaagctggtggaatcccagcacgtcgatgtgttcgacggcatcaccgaaggactcgcagatcttcgccacgttttcgacgttctcttcggagtcggtcaggcccggcacgagcacaaatcgtacccagatcttcttgccggccttggccagtcgctggccaaaatcgatggtgggctgcaaggtgccgccggtgaccttgtgataggtctcctcgtcgccggatttgacgtcgagcagacacaggtcgatgtcctcgagcatctcgtcggtgtagctcgtgttgaggaagccggacgtatcgaggcaggtgtgcacgcccatctccttggcggcatggaacacacgcgaaacgaaggcgggctgcatcatggattcgccgccggagaaggtgataccgccatgcgtggccttgaacaggtccttgtaacgatcgaccttcttgatcatggcgtcaaggtagacgggcttgccgtcgcgcatcttccaagtgtccgggttctggcagtactggcagcgcagcgggcagccggacatgaatacggtcatgcgggtgcccggtccatccacggaggtgttgatgtcccaagagtggacgaagccgatatcgccggatttcagggcggaaaggcggtcacgtcggtcgagtccgattggggattcaaagccggaaaggccgcccatcaaagtctgcgaggcataggtcttcgattccttgagcatatgcctggtcgtggtgcggaacgtgggtgttgcgggcatagttgtcctcctgttccaaatgatgcgaaagtctgtggaaaataaggaaggggtggagccgtgccccaccccttcagttagtcattgccgcggttcgcggggttggtcatcagtcgacgacggcgccttggtggaaggtacgggagatgacgtcgagctgctgctccttggtgagcttgacgaagttcaccgcgtagccggagacacgcacggtcaggtgcgggtacttttcggggtgctcgacggcgtcctccatggtctcgcggcgcagaacgttgatgttcgcgtggtagaggccgtggccgttgcccgcgtccaggatgccgaccaggttgccgatgcgctcggcttcatcgcggcccaggccatcgggggtgatggtattggtcagcgagatgccgtcgagggcgtcgttgtagtcgatcttgccgacggagaacatggacggcagcatgccgtgcgagtccatgccgttctccgggttggcacccggggcgtacggggtgcccttcttgtggcgggacgggaaggaaccggtgttcttgccgtactccacgttggaggtgatggtcaggatggactgggtcgggacggcgccacggtagacgggcaggcgcttgacctggcccatcacggtggagacgacccacttggcgatgtcgtcggcgcggtcgtcgtcgttgccgtagaccgggaactcgccttcggtgcgatagccgacgaccagatcgtcgtcggcgccctcgacgtactcgtactcgtggccttcgaggttcttggcttccttgttggtgatcgggtacaccttggcgtacttgatggcggccagggagtcggcggcgatcgacagaccggacatgccgcaaccgagggtgcggtacacctccttgtcgtgtagggccatctcgatggactcgtaggcgtacttatcgtgcatgtagtggatgatgttcagcgcttcgacgtaggtttcggacagccactcgagcgccttctcgtagttgttcttgaccttctcgtagtccaaggtgccgtcggcctccggggcgatcgggtcgatgacgcccttgtcgatgacctgcatgccggtcatctcatcgcggccgccgttgatggcgtacagcagggccttggcggagttcacgcgagcggcgaagaactgcatctgcttgcccacgcgcatcggggagacgcagcatgcgatggcggcgtcgtcgccccagtgggaacggatttccttgtcggactcgtactggatggccgaggtgtcgatggagatcttggcgcagaagcgcttgtagccttccggcagcttcggatcccagaagatggtgatgttcggctcagggccaggtccgaggtgctcaagggtcagggtgttgagcagacggaaggaggtcttggtgaccatcggacggccatcgtcgccgaagccggcgtcggaccaggtcgcccagtacgggtcgccggagaagatgttgtcgtagtccttggtgcgcaggaagcggacgatacgcagcttcatgacgatgttgtcgatgagctcctgggcgtcggtctcggtgatcttgccggcctcgaggtcgcgctcgatgaagcagtcgaggaaggcggagttacggccgaaggacatggcggcgccgtcctgggacttgatggaggccaggtagcccatgtaggtccactgcacggcttcctgggcggtctgagcagggcgggacaggtccaggccgtactcgttgccgaggttgatgagctgcttcagagccttgatctgctcgtcgtgctcctcgcggaagcggatccagtgctcgatctccggctcggtgaagtcgttgcggtacgggatggagtccttgtcgcgcttcttgaaggcgatcagcttgttgacaccgtacagggcaacacgacggtagtcgccgatgatgcggccacggccgtaggcatccggcagaccggtgaggatcttgttgtggcgggcgaccttgatgttcttggtgtagacgccgaacacgccgtcattgtgggtcttgcggtacttggtgaagatcttcttgatctccggatccggctccttgccggcttccttgatggcctgctcgaccatacgccagccgccgttcggcatcatggcgcgcttgcagggcacgtcggtctgcaagccgacgatcacgttgtcgacttccggggagtcgatgtagccggccgggaaggcatcgatgccagccggggtgtgggtgtccacgtcgtagacgcgctgcttgcgctccacggccaggtagttgtcgtcgaggtacttccacaggtgcttggtcttctcggtggcaggagccaggaatgtctcgtcgccctcgtacggggtgtagttcttctggatgaagtcgcggacgtcaatatccttctgccagttgccctcggtgaagccggcccatgccttggcgtcgagctcctcttgggagacagctgcattttctactgcggtcatgtcactccttaaatggggttgtaggtttcgcatcttcacggaacccttggttcaacagtgtagttggcacttgcttgggaaaagccgaaattgggagtgagctatctcacattgttttttgtgaacgctaccattccaatggtttctaggtattgatggggctattgcacgtctccagatatgggaaaccgctcatactgtgatgttcgtatgagcggcttggtgagcggttcggtcttgagattgacagcagaaccgtatccgtctgttttggccgtcagtcttcatcgttcgcttgcgcggatttcacaccgtagttcttccagcgccagttctcctcctcccatctggcgttgcggtccaccacgatgtcccaggcgtgttcggcatcttccttggtcttgtacggacccatgcgctgttcaatcggtgagaccatgcccagctcggcctgcttcttgacggtgttgaaataccactgcttcttgttatcgtctatcattggtacctcctcaacggtattacttgctcccgctggcgggagcaatatatgtttattccctgaacgcgttggtgacgggcagtcggcggtcgcggccgaacgcgagggccgtgaccttcggtcccaacgggtattggcggcgcttccattcggcgcggtccaccaatcgcatcacagtgtccacggtgtcctggtcgaagccgtcggccaacaggtcggcgcggccgtgcgcgtgctcgatgtatgcagcgagcaccttgtcgagcagcgcgtattcgggcagggagtcggagtccttctgcccggggcgcaactcggccgagggagccttctcgatggatgagaccggaatcatcacgccgtccttcaacgggatgccggcgttgccgtcctcgttgcccacgatcttgagcccgccgataccgacgcctgcggccgcggccttgttacgccaacggctgatctcccagacacgggtcttgagcaggtccttgatgggtgcgtagccgccgaccgcatcgccgtagatggttgagtagccgcaggcgagctctgacttgttgccggtggccacggcgagcaggccgcgagaattggaactggccatcacgatcacaccgcggatgcgggcctgcaggttctcggcggagacgccatcaaggtcaagttgctgttggtaggcgttgaacaatggctcaataggctggacctcgtaatgggcaccgatgttggaggccaggtcagcggcgtcgtctttggaaccatcggaggagtacatggagggcatggagatgccccagacgttctcgccgccgcatgcgtcggccgccatggcggctaccagtgcggagtcgatgcctcctgagaggcccagcgtcacgccggtgaagtggttcttggccatgtagtccttgaggccgagcacgcaggcagtgtatacctcttcgtccgggtcgagttccggaacgatctcggccttgacctgatgttcggcggtggaatcgaagtcccagaacgtcaggttttccatgaacatcgggccgcgttcgataagcgtgccgtcggcatcgaccacgaagctgccaccgtcgaagaccaggtcgtcctgaccgccgacctgattcaggtagatgaccggggcgttgacttcggcggcacgacgctgggcgagctcgaaacgggtgttggtcttgccttcctcatacggcgagccgttgatggtgagcagcaggtcgatgttcttggtggccaggtcggccaccgggccaccatcctgccagatgtcctcgcagatggccacgccgatggtggcaccatccacgtcgagggtcacggaacggtcgccggcggagaagatacggaattcgtcgaacacgccgtagttgggcaggaagtgcttgtcgtagccggcccagaccacgccctgatgcaataccaccagtcggttgcgcggcttggaggtcttacgatcagtgcccacggtgccaaccaccacgaacagattgccgaggccgtcgtcgttgagctgggcggcgagttcgttggccttgtcccatgcggcttggcggaaggtgcggcgcagggccagatcttcgatggggtatccggtgagggtcatttccgggaaaacaaccacttgggcattccctgcggcggctttacgggagtagtcgagcactttggcggcgttggcatcgagcgcgccgacgcaggtgtcgatctgggcgagtgcgaagcgaagctgtgtcatagcttcttagtgtagccgcgtatggcgtcggattgcctgttcttccggcttggcgtcattcattaggtcgtttttgcgttcattaggtcactgcaatgcgatatcagtcgttgcaatggcgcgattccaacaaccagtatcgccgttcaccgacctaatggacgatgaatcgacctaatgaacgaatgccactcccctcagtcagcttcgctgatagctcgtcctgcacttatggacgggcgaggcccgcgcatatctggttcggctgtcgcctcaccttcggctgcagacagcccattgggctgtctgcctaacgcctcagcctccagaggggagccaaaaaaggatttacctcagctcgttgagcacgcgcagggcggcgttgacgtagaagttgacgaaggtgggaatggattcgtcgagacccacgaaatgcgggctatgccagtcggcgcaaccttcctggccgtttgacccgacgaacgcgaacaccggcaacgtcaccttggcgaattcgcagaagtcctcccccgccatcgactgacgtatcggttcgagctgcgcgtagtcgttgacatccgccgccacggccttggcaagacctggatcggagaccagcgggtcttggaaatcatcccagaccacatcggcgctgataccgtatgcctcggcggtgtgttccaccacttccttgaatcggcggccgaccagattgccatccgacttgtggaaatagcgcacagtcccttggaatccggcttcggcgggcaccacgttccacacatggccgccgtgcacttcggtaacggacagcaccagcgggtggaagggcgtgacgttgcggctcacgatggtctgcaggctcagaataatactggcgagcgcttcgatgggcccggtgcccttgtacgggtagccggcgtgggtgccttgggcgtggagggtcacgcggaatttcacgcagccggccatcatcggctcgacgccgatggccagctggccggacgcatagttggggttgttgtgcgtgccgataatggcttcgacgtcatccacgagtccggcgtcgatcatggcgcgagcgccttggccggtctcctcactcggctggaacagaatcttgattgagccggcgaacttgtcacggtgctcggcgagccagaaggcggcaccgagcagaccggtcatgtgcaggtcgtggccgcagccgtgcatcacgccttcattgacggagctgaactccagtccggagtcttccacgatgggcaggccgtcgatgtcggcgcgcagcccgatacgcggcccgggaccggcctcgccctgaatgagccccacaacaccagtctccagcgggttgtgcaggatctcgatgccgtgcgccttgagctggtcggtcagatagatgctggtgtcgaattcacggaaactacgctccggatgggcgtgcaggtagtggcggatggtgatgagttcgtggtcgatgtcgatatgttcactcatggttcccgattctagtagcgcgaagaatatattgcggccctcgcttcatattgacgagggccgcgatctatggggtcagtatgccttgttattgctggcgtttgagcagtcgtttggcgatggcgttggcgatgccctgcaccacctggaccagtacgatcatgatgatcacggccgtccaggtgacgatctggtcgaacttctggtagccgtaggcgatggcgaagttaccgagaccgccaccgccgatgtagccggccatggcagacatgtcaagcacgccgatgaacaggaaggcgtaggccaggatcagcggtgccagggcttcggggatgagtacggtgcggatgatggtgagcttgccggcacccatcgaacgcgcggcctcgattactcccgggtcgaccggcacgagattctgttcgaccagacgagaagtggcgaaggtgcacatgaccaccatcgggaagatggcggccacggtgccgatggacgtgccgaccacgacgatggtgagcggctgcatggctgccaggaaaatgatgaacggaatcgggcgcacgatgttgacgatgatgtcaaggatgcggtagacgaccgcgttctcgaacaggttgccggggcgggtgccatagagcaccacgccgaggatcaggccgaggaatccgccgatgacaagggtgacgagcaccatggtcagggtctggccgatggattcgaacaatagtgggcgcagcacgttccagtcgctacgcgagttggcgaggatgatcatgcgttgtctccttcatgtgcggcggcggatacagcgggcgcggtggcagtatcggccgccagtgggtcatgggcgcggtcttcggcgtaggaggcatgtccggcaactgcgtcggcgtaagccacgggctttgcggcggtgccgaagtcaatgacgtcgctattggcggcgagctcgcgcaggaattcgtccacgtgccagccgggcccgttgaattcgtaggtgatggcaccgatggcggtccccttgaccgtgtcgatgccgccgtagagcaggctggattcgacgccgtatttggcgatgagttcggagatgttctgtccggatgccttgagttcgtggccatggctgccggaaacgtccttttggcggatgagcacggtgacgatgcggcccgaccattcgtggtgcaatcgctcgacccggtcttcctcgggcaggccggacagggcggtggcgatgaatcgcttggtcaccggctgctggggcgcggcgaacacgtcgtatacgtcgccggattcgaccacgcgtccggcgctcattacggccacgcggccggcaatctgctggaccacgttcatctgatgggtgataagcacaatggtgatgccgaattcctcgttcacacgcttgagcaaggccagcacttcggtggtggtttccgggtcgagcgcgctggtggcttcgtcggcgagcagaatctccggattagtggccagtgcgcgggcgatgccgacgcgctgcttctggccgccggacagctgcgaggggtatttgtttgcgtgctcactaaggcccacgaattcgagaagttcgttgacgcgacgatcctgatagtccttgcgccagtgatcgagttgcagcgggtaggcaatgttctgcgccacggttttggtggagaacaggttgaactgctggaaaatcatgccgattttctggcggatgggccgcagcttggtctcactcaaagaggtgatatcggtgccgagcacggtcacggtgccggaggtgggtcgttcgagcgcgttgataagccggaccagtgtggatttgcctgcaccggaatagccgatgatgccgaagatgtcgccgcgatcgatggtcaggctgacgtcatccacggctcgtgcgatgttcgcgccgcgtccgcgtgttttgaattccttcacgacatggtcgaaggtgatgatggggtcgctcatagtgctccctgatgctggttgttgatgtccggtcacggaagcggagcgaatcccgattgttggctcgggtactcgctccgcttggtggcaatggctatggacaggttagtcgtgcactcgtatcagccacggctcactgctgggctttggcgtccttctcaatgtcggacaggaagccttgcagcgcgctggcgctgaacttgtcggcgaacaccgcggtaccgccggagttctcctgcagggcgtcgagcacatccttctgctggtagatggaaacgagcttcttgtaggtctcgttgttcacgtccgccttgcgggccacccacacgttgatgtaggggcgagcttcttcggattcggcgtcatcctggtagatggcgtccttcgggttgagaccggcgtcggccacgtagtcgttgttgatcacaccagcggcgatggtcgggtccttcagggtggtggccacctgttcggccttgagcggggtgaccttgaccttgctcttggcttcgtcgatgtcggccggagtggagaaggcggtccagtcgcccttgagcgtcacgagaccggcggccttgagcacgccgatagcgcgggcctggttggtttcgtcgttcggaatggtgacggtgtcgccctgcttcaggtccttgatgtccttgaccttggtggagtacacgccgagcgggtagatggcggtgccgccgatgggctgcaggtccttcttgttgctcacgttgtagttggccaagtagagcaggtgctggaattcgttgaggtccagctcgccggagtcaagggccgggttttcggaggtgtagtcctggaagtcgacgatgtcgacgtagatgccggccttctcggcgtcctgcttgaacttgacccattcggggttggtagcgccgaccacgccgatcttgaccgggttgcccttgctgcccttggcggacgactcgttggcaccggcaaacgcgcggtagccgaagaacgcggccacggcgataatcgccacgaccacgatggtgatgatgacgttgcggacggtgtggttcacacgcaccggctcgttattgttaggagcgaccggagttgccgactgggttgctgctgtcattggatttcctctctccaaaattgatgtcgggtaacaccataacgcgcttgaaccgcgaaagtgacggaaaatggccgattgccgtataggtgtcttttatggcgcgcatgcaatggccgggattcgtgcgtttgataacccgctataggcgtgccgaacacgccggaaagcacgtcgagaggggctttgacaatggaagctatgactaccgatactgccaatgccgatatccgagccgtattcttcgatatcgatggcacgctcaccagtttcacgacccatacggtgccggattccacaatcgaggcgattcaccggctgcaggccgcaggcgtcaaggtgctgatttgcacgggccgcgcgccttcacagatgcacgtggtgctggataccatgccggtgacgttcgatggcgtggtggcgttcaatgggcagtattgctttgatgacaccggcttctttgcctcgcaggccttggatactgctgatattgaggtgattctcgactggctggaccgtcaccccgatgtggtgtgcaatttcggcgagaaggattacgtgtacttcaaccagtccaatgatctgcttcgcgccacgtggagcaaactgggcaaaaccgcaccgacccggtattttgaggacccgcgcacccgcgcgctggatcatgagactttccagatcagtccctttgtcggacccgagttggaggccgaactggtgggactgtgcagcaatgtgcgcggggtgcgttggcatccggatttcacggatctgattccggccgatggcggcaagccgcgcggcatccagcggttcatggcgcattacggcatcacgcgcgggcagaccatggccttcggcgatggcggcaatgacacggatatgctcgcctacgccggcatcggggtcgcgatgggcaatgcgaccgccgagccaaaggccgccgccgattacatcaccgacgacgtggaccacgacggtgtgcgcaatgccctactgcatttcggggtgctacgcgattattgatgccgtagcgcctcgaccgggtcgagctttgccgcgcgtctagctggatagtagccgaaaatcacgccgacagcgatgcagatgcccactgccagtccgatggactgcacggaaactgctggcgcgatactcatgccaccggcgatgccggacaccaatccagcggcgcccaacgacagcaagtagccgatcaacgtgccgataagacctccaagcactgtgattgcaatggattcggcgaggaactgcgcggttacgtcacgccgagtggcacccaatgcccggcgcaggccaatttcgcggatgcgttcggtaacgttggtgagcatcatgttcataatgccgatgccgcccaccagcaacgagaccccggccaccgaacccgccagcacctggaatgcgctcatgaagctggaaagctggtcgatggaggattgggcgcttacgaccgacagattctggtcgatctgttcggttgggatacgcatgatgcgagcgacaacggtcttcgtctgttccgtgagctggtcgatatcaaccccgtccttggccagtccgtagatctgcatgtatcccatgttcgaggacgcaaaccgcagcgccacagtggtggcaggcatatagatattcacgctgtcgccgcccatgccgcccatcaatccagacgactcgaccacacccacaacggttgcttcattgccgtcaagcgtgacggttctgccgatggcgtcaatgtccgcgctgccgaacagcttctgcacgccctgcccgtcgagaatcaccaccattgcaccactcgttgcttcactcgatgtgaaggcccgtccacgaccaatcgtcactccggatacatcgaagaaatgctcgtcgacaccggtgatgctcgccgacaccttgtcggtggtaccgggcgcggcgattgacgaggcggcaccatagttcgtcggcgagaagtactcgtagtcggtcagttcctcgcgcatcgcagtgatctgttcgtcgtcaagggtgccgacgtccgtgtaaatcgaaatcgtgcgcgccgcgttcatacccagttcgccgaccagagagtctcgaatgccaccgatcagtgaggtcatggtaatcaccgcggcaatgccgatgacgatgccgagaatggtcagtgcgcttttgcctttgttcgccctcagtgcggagccggtttccgccagcagatcccgtgttctcatcggtacatcccttcacacagtacgccgtcacgcatgtgcaggcatcggtcggcgcgttcggccacttcggggctgtgggtgatgagcacgatggttttgccttgctgcttgagctgttcgaacgtgtgcatcaccgcatcgccggttttggagtccaggttgccggtcggctcgtcgccgagaatcagcggcgggtcctgtaccaacgctctggcgatggccacgcgctgcatctgaccaccggagagttcattggttttgcggtcgaacagttccggactcaacgccactgattggagtgctttgatggcacgcccttcccgttcacgcaccgggcagtcggaataggccaggggcagcatcacgttgcgcagcacgctggtgcgcggcagcagattgaaggattggaacacgaagccgatgagccacccgcgcagttcggagcgttcgtcatcactcagattctgcacgtccatgccgcacaggcggtaggtgccggatgatgggcggtcgagcaggcccagcgtgttcatcagcgtggatttgccggaaccggatggtcccatgatggcgaggaactcgccttggcgcacgttcatggtgatgcctttgagcacatgggtgtaggtgtcgcctgtctcgaagatgcggttgatgttttcaacctcgatgacgttggctgtggcggtgggcacggcaatggtctcattacgccgtttgccgcgatttgcccggctcgcgtcggaacgaaacgggaacatatcagcgtgccctttcgtccgaagccgcggtttgcgaggtggaagaagcagcatcgccagtattgtcggcagccgaagcgccatcaagcatgatgacatcgcccttgctcacattgccttccacaacggctttggtgttgttcttggctttgaccgtgactcgcacccgcttgaactcatgggtttcggcgttggtctcgagcatgaccgcactgctctccttaccctcatccacgatggcggcgagcggcaccatcaaagcgttgtcaatgctctgcatggtgattttcacactggccgtcatgcccggcttcagtttcggatcaggggcgggaatgatgagacgcacggcgtatcccacgccgccgttgccactctgcccgcctgccgaggaatcagccaactgcgacgtggtgctggcgatggtatccaccttggcatcgagcgtcagtcccggcaccgcggagaacgtgactttggcgctctggtccttggccactttagtgatatccagctcattgatgttgacattgaccttcatctgactcaggtcggcgatctgacacaatggtttaccgtctgcgccggcggaagtggatgagccatcggaggaagctccgatggcggcaccgggcaccgcgctcatggtcagcaccgtgcccgagaccggagcagtgaccgtacgcttgttggcttgggcgaccgcctcgtcataggtggcttgtgcttgctgaacggcgacctgcgcgctctccacgccgctttgtgcagcgggcagctgtccggccgcatcatcggcagcggcttggccttcctcaccatcctgattacgtgcctgacctatggtcgcattgatttggttcacctgctgctgggcggcattaaggtttgagttcgctgctcgcagagccagatcggcctgattcacgtcgctatcgagcttgtcgttgttgatggtaaacagtacgtcgccggcgttgacggttgcgccttcctgcaccttgacttcgccgatggtgccgtcgatctgcggggcgacgacggtggagttgatgggttctatggaaccggtggagctgacttggtcgacgaaatggccacgttccaccgttgccgtggataccggagacacgcccccatctgacggggtaataatcgcgtgcaccaccataaagccgataatcagtaccgccacgacggcgacggcgatgatgcgatgcaccacgcgctttttcttgcgcgtctcacgttcgcgcattaatcggttgaattcggcgacttccgcgttctccgcctcgccttgggcaagggcgtcgacacttgattccacggtgtcggtagcgtccaacggttgtatgattgcggtctgctgctgatccttctgcatgtgctctcccccatggctggctccgagcctcgtgcccggatactggttccaagcctatggaggaatggcgtggtttccatcatgcgcaggattgaattgatggggagttgtcatccttaaggattagttggggtggggaatttatgggctgttttcagtcttggctctcgccttcgcttccgcttttctctcccccagtcatgcttcgcatgacagcctcctcgtcagagggggcttatgaataagcaaagggctcgggacgaatcccgagccctttggcgttagcgaactaacaacaccgtggaggtgttatcactcgttgtcgccagcggtagcggcggtagcggtgacggcacccttcttgtcggtgttcacgccggagtacacccagtcggtgtagtccgggtggtcgtagcccttgtcgacggcgaactggaaggcctcatcacggaacttctcgagctcgtcgatcttgtcggcgtacttgtcggcgtcgatcatgcgcagggcctcagcggtcagctcgtagcggtcgatgcggttgacacgaaccatgtcgtacggggtggtggtggagccctcctcctcgtagccgtggacgttgaagttgtcgtggttcggacggtcgtagatcaggccgcgcacgtcgtgagcgtaggagtggtacgcgaacagcaccggcttgtcggcggtgaagatgtcggcgaactcctcgtcggtcagagcctcgtcgttctccttggcggactgcagggagagcaggtcggcaacgttcacaaccttgaacttgacgcccagttccttcagcttgtcggaagcagccatgatctcctgagtcggaacatcgccggcggcggcaagcacgacctcggcctcatcgttattcttggcggtggaagcccaatcccaagcggcggcacccttctcgagctcggcacgagcctcgtccagggtcagccaggtggcagcaggctgcttgccggcgatgatggcgttgatcttgttggtggacttgtagcacttctcggcgatggccagcagcatgttcgcatcggtggcgaagtagatgccgatgacgtggtcattgtggaagcacttgttcagcaggacggaggtgacacccgggtcctggtgggagaagccgttgtggtcctgacgccaaacgtgggaggagaccagcaggttcatggaggcgatcggcttgcgccacggaatctcgcggacggtagcctcaagccacttggcgtgctggttcagcatggagtcgatcacgtggacgaaggactcgtaggagctccagatgccgtgacgaccggtcagcaggtaggcctcgaggaagccttccatctggtgctcggacagctgctcaacgacctggccggagacgtgcatgtgctcgtcgacctcgtcggagatgtagccggcatcccactgcttgttggtgacttcgtaggaagcctgcagacggttggaagcggtctcatccggtccgaagatgcggaagtcgcgcgggttgttcttgatgatgtcgcgagtgtaggcacccagggtacgggtggcctcgagctggccccagccgtggccgtactcagccacttccttgacctcgtagtcctcgaggttcggcagcttcaggtcgtcgcgaatcacaccaccgttggcgttcgggttggcaccgatacgcagctcacccttcggcatgaaggcaaggacgtcgtccttgacagcgccgttggcgtcgaacagctcttccggcttgtaggactcgagccagttcttgaggacctcgaagtgggcctcggtgtcgcgggcggaagccagcggcacctggtgagcgcgccaagagccctcggtcttcttgccgtcgatgtacttcgggcaggtccaacccttcggggtgcggaagatcagcatcgggtagaacggacggtgcacgttgtcggtctgagcggcggccttgatgtcgcagatctcgtcccagatggtctcccacagctcggcgaagcggcggtggatggacatgtggtcctcatcatcgaagccagcgacgaactcgtagggctcgtaacccatgccgtggaagaactcgtggagctcttcgtcggagatgcgggacaggatggtcgggttggcgatcttgtagccgttgaggtgcagaatcggcagcacgataccgtcggtgcgcgggttcacgagcttgttggactgccaaccggtagccagcgggccggtctcggcctcgccgtcgccgacgatggccgggacgaacaggctcgggttgtccatgatggcaccgtaagcgtgggacagagcgtaacccagctcaccaccctcgtggatggagcccggggtctccggagcgaagtgggacggaataccgcccgggtaagagaactgacggaagaacttctgcagaccagcttcgtccttggtgatcttcgggaaggtctcagtgtaggtgccgtccaggtaggactgggaggtaccggccgggccaccgtggcccgggcccatgatgatcacggtgttctggccgtggtcagcaatgaaacggttgatgtggccgatgaggaagttcaggccaggggtagtgccccagtggcccaccagacggtgcttcacatcttcgcgggtgaagggctccttcatcagcgggttggaacgcagataaatctggccgatggaaaggtagttggcaacgcgccagtacttgtcaacgccttcgagggcttcctcggaaaccggagcgttgagcttcttccaaggggtgccaataacaggactcgtcatgtgtactcctgtactcctgcacgtgatcgtgcgattgattatttctgttcggtcacggttcctgacccttgcggtgccaaggttttccgttcccaatcaatcgtcatggtacgaggacaacgcgacttttgaacgatttcttgcgggtgtgttcgaaattgttgcggaaatttcagtatttgtgcggttcacctgaccgtttgtcaacattagttttttcaacatactttttcagaacggcggaagcatgcggaaatctagcatctgactagaacagcgcacgttcgatttcccatgttcgaaatcggcgtgttgtccgactacaggcatgtagtttgttcgatttgcgcacatagtccctgcgtgtcggccttgtcgccttgaccagtgataatcaggggtgttcagcccacgtaaaattccaatgaacgttaggggaatatcaatggcaaacggtcctgtgcttgtcgtcgacttcggcgcccagtacgcccagctcatcgcccgccgcgtgcgcgaggcaggcgtgtactccgagctggtccctcattccatgccggtcgacgagatcctggccaaggatccgaaggcgattattctgtccggcggcccggcctccgtgttcgagcccggcgcgccgaccatagataccaaggtattcgaatccggtgttccggtgcttggtatctgctacggcttccaggtcatggcctatgagctcggcggcaaggtggataaggccgctctcggcgaatacggcaagacctcagccaccatcgacgacgccgacggcatcctcgccgactcccccgccgagcagaccacgtggatgagccacggtgtggcggtcgaacaggccccggccggcttcgaagtgctggcccacaccgaaggcgcgcccgtggccgccatggcggacgaatcccgcaagctctacggtgtgcagtggcacccggaagtcaagcactccccgcttggccagaagcttatcgaaaacttcctgcaccgttgcgccgcactgcccaacgactgggacgcctcctcgattatcgaggatcaagtcaagaagatccgcgagaaggtcggcgacgccgaggtgatctgcggcctgtccggcggcgtggactccgccgtggccgccgctctggtgcacaaggccatcggtgaccagctcacctgcgtgttcgtggaccacggcctgctgcgcaagggcgaggtcgagcaggtcaagcacgacttcgttgccgccaccggcatcaagctcatcaccgtggacgcggccgacgacttccttgaggccctgaagggagtctccgagccggagcgcaagcgcaagatcatcggtgagaagttcatccgcacgttcgagaaggcccagcgccaagtgcttgaagaggccggcgcgcgcggcaaggaagtcaagttcctcgtgcagggcaccctctaccccgacgtcgtcgaatccggtggcggcgacggtgccgccaacatcaagtcccaccacaacgtcggcggcctgcccaaggacatcaagttccagctcatcgaaccgctgcgcaccctgttcaaggatgaggtgcgcgccatcggcaccgagctcggtctgcccgacgaaatcgtctggcgtcagcctttcccgggcccgggtctgggcatccgcatcatcggcgagatcaccaaggagcgcctcgacctgctgcgcgaggccgacgccatcgcccgcgaggagctctccaaggccggtctcgaccgtgacatctggcagtgcccggtcgtgctgctcgccgacgttcactcggtgggcgtccaaggcgacgagcgcacctacggctcccccatcgtgctgcgtccggtgagctcggaggacgccatgaccgccgactggtctcgcgtgccctacgatgtgctcgccacgatctccacgcgcatcaccaacgagtgccgccagatcaaccgcgtcgttctcgactgcacgtccaagccgccggcaacgatcgagtgggagtgagccgatagggcttacctgcgctttcgagtgccgctgtgccgctgagtttcgtttcgtatgcgactcgcggcaaagccgccagcgacggcgatgaatacatacggcaatcgagccttcgttcccacgttgggacggaggctttttctttgccgttttactccctttcacctgcgattccgccatttactccccgtgtttcaaaacagcaaagtacggggcggtattcggaggaacgggagtaaggagtcatcccaagtgagtggacgcgcagtttttgtccccgagggcggaacggggtatggggctacggacgttttcttggagttaatcacgcagtcaatccatggctcagccggtattgtaccgggctcatccaaccgagcgattgcttgatgcgatcgtggttgtgccagtggatgtattcgtcgatcaacgcgagcacctccccacgggtgtgttcctcccgccgctcggggtggacggactcgaccttcgtcccgccgaggaaaccctccgcggccgcgtcgtccagcgaacggcccttcgcgcccgtcgatccggtcggcccgaaccgctccatgggttccagccatcccggccgcctatggcgacggccgcggtcggaatgcgccggaggacgcgcgtcctcgggcaacgtggcggtcgatcaccggcgagggatgcgccttgccgtccgccgtcttggtctcggtgatgtccgtcagccgcttctcgttgggacgttcggcggtgaagtcccggagcgatcaggttcccacgagagcgggagtcgtctcgccctcgtgggaaccgtacctgcgacgtccggaacatgcgccgcgagcccgtccccggccatgatccgtctgatcgccttctccgagacgccggttccgggcgcggccttgatcctgcggtacccgtaacggcccttggacgcggcggacgcggcggccacctctgcgctgggcccggcgcctccgcgtcaccgtcatcgccggggagtcgtcacgccgcggcttcgacgatgccacgccgtcctgcgcggcgttcctgttcctgggcggtgccgtcctcgcgatacgccattggcccaatgggccacggcgcccacgctcacgccgagctgccgggcggcttgcttctgcagcatgccgcccgataccggttcgatcgccttcggacgagcagacgttaccggctgtttgtgcccaggtgacaggacaataaaagaattcattatcccgttcgcagcgtctccgtcgcgtatgagcacgcctagcacgggttttatgatctatcgagtgctaaactgtcacggactgaacatcacgagcggttacttatctgcaacgatattcttgccgtttttctagcccttaggagccttatggcacgcaaaagcaccaagaagcaagaggtcgagcttacgctcgagcaagtgttgtggaactgccgcgtcgcgcttcgcggcgtcggcagcatggagaagaaccgcgacgctgtcatcagcctcgtattcctgaagtttgccggcgacaagttcaacaatcgccgcaaggagctcgtcgagcagtacggcgacatcccggcgttccttgagaagccttctttctacaacgcggtcaacgtgttctatttgcccgaacccgcacggtggacctaccttgtcgaccacgcaggcgacaacgcgatcgccaccattgtcgacaacgccatgagcgaggcggagaaggcgaacccctcgcctcgctcaggggcgctttgccgctgggcctgttcgccactctcggcgcaaccaagagctccattaagtcgctcatagacgagatcgccaagatcagcgagagacgctaccacgaggaagaccttatcggacgcgtgtatgagtacttcttgcagacgttcgccgtcggcagctcgaaggaggatggcgagttctacacgcccgcctgcgtcgttcagcttatcgccgagctcatcgagccctacgaggggatcgtctacgacccgtgctgcggctctggcggcatgttcgtgcagtctcacaaattcgttgaacgccaccacggcaacagcagcgcgatctcggtggtcgggcaggagtcgaaccccgacacgtggcgcttatgcaagatgaaccttgccatccgcggcatatcgaacaaccttggcgaggaagccgtctcgaccttcgagaaagaccagcataaggacaagaaggtcgactacatcatggccaacccgcccttcaaccttaagaactggcgcggcaccgatgagcttcttaacgatccgcgctggaaaggctatcccataccgcccgcgtccaacgcgaactacgcatggatcctgcatatgctctcgaagctcgatatgagccacggcgttgcgggctttctgcttgccaacggcgccctcaacgccgacggcgacgagggcgctatacgccagaaaatcctcgagaacgataaggtcgaggccatcatcgtattgccccgcgacatgttctacaccaccgatatctcggtgacgctttggattctgaacatgaacaagggagccagcgaaaaggccggccacaagctgcgcgaccgccgcggcgaggtgctattcatggatctgcgcacgtggaatgagaatatcgagaaatacacgtacgacaagaacaagaacaagaagaagaccgtgctcacgcctgagcagatcggtcgcgttaaagacatcttcgagagctggcgttgcgttgacggcggctacgaggacgtgcccgagctgtgcaaatccgtgcacatcaagggcgacgattccgatcagatcaccatcgagagtcgcgggtatgcgcttacgccgagcaagtacattgagttcatcgaccatgatttgggcatcgactacgagaaggagatgggccgcatccaggccgagattaaggagcttttggctaccgagaagaaatctcaggccatgcttgaagctgcgttcgaaggtattggctatggaattgactaaagctagcctgtggcattatctagagcttgttgaacgtcccaatagcgaagccgtttatggcattgatgatgttcgcggcgtcaataaccaaaagctcatgatacggacgaaggcagacgtctcttctcgggactttgcaaaatttcaaatagtgatgcctggagaatttttctttaaccatcggacttcacgcaacgggtcaaagttcagcatcacgtacaactatgacgatgtcccccatatcgttaccgaggactatgttgtatttcgagtggccaataaaggcgagctttgtcctggctggctttatctgtacgtttgtcgtgccgagtacgatcgttacgttattcaaaactcatggggcagttcgacagagtttttcaactgggaagatttttgcgaagccgaaattctgttgccgccgattgaggtgcagcggaagtacgtcgccatctatgaggcgatgttggctaaccaacgggcttatgaacagggactcgacgatctcaaactgacgtgcgacgcgcttcttgatcgctgcaagaaatcgaagacgtgggagcctgtcggaaagcatctccgtgaggttgatgtccgcaatgctagcggtaagtgcgatgtagcttacggtgtcaacatcaagaaggagtttatgctctccagggcaagcagtgacgacttacttaaatacaagctggtcaaaccaggtcagattgcatgcaatctgcttcatgtcggaagagatgcctcttatccgattgcggtgaacgaaacggactcctgtattgctgtttcaccagcgtattctgttttcatggcatcgaataccgatatggcagtgtttctaatggcttggttttctcgtgcggaaattggccgtaatggttggtttatttgcgatgacagtattcgaggcagcatggctattgatcgcttcttatcttgcgaaattcccatccccgacggtaaaacaattaaagctatcgctgaattaaggacagcgtattgggcgaggacacgaatcaacgtctacctcaaggcccagctcaaggacatatgccccatacttatccggggctcaatcgaggaggcgtcgaggtaattatggagcgcctattctctgaacgttatggagagctgttccaggatgagccaaattggtttggcggagatgacggcagcagcgttccctatagcgctaaagtcctagtcgcacgcgtcatggaggacttccgtgagccgattagttttcagccgaatcgctacgatagctacaccgttgatacagacgctcttgaccttgcgataaacgagctcaacgagcatgtcgattatcgggtcgtcgacttggatatgatgcgcatgggttcgagccttgacgaggtccacgcccttgcaaacgtttacacaccgcacctcttcgacctcgtagagctccaatacgaggagctttccgacgacgccgaaaacggcaagggcggcttccgcggtgagatcaacaaggtgtttcgcgagaatgatatcccctggtttctcgttgacgggcgactggtcaagatcgatcccaggcagtttgagcaggacctgaagctcaaggctctcagcgagatgagggagctcaaggatgcggaccccctctaccggagagcttacgatgagctgaggaaggctatagatttcctgggacgcggcgactatgcggaagccgtgatcaatgccgagaagagctacgagagcgtcctcaaggtcatctgcggaccgaagtccgagacagaggcagccaacagccttattaagcgtttgctcgaggctgacaatctgtctctcccggagagccttaagcccgaggccttccagggcagcgttctcatgtcgcttcccatcatccgcaacaaggcggcggcgcacggctccgggacgacggggcgcgagattagtgccccgatggccaaccttgccgtcaatctggcatgcgccctcgacacatacctcatccaggaaatgaccgacaaagagtaggcaagtatggaagcggcagaccttaaattcgaaaacggaaagttcaccgaggacgagcttgaacaggcgatcatcgagctgttccagcagcaggacgccaacggcgtgcgctggagctatgccaacggcgagcagctgcaccgccgcttcgacgagccgctcatggaagaccgtttgaagtcgagccttcgacgccgctatgccgatatcgacctgaccgagggcgagctccagacgctcgtgggcgagctcaagcgcattccctcggccccgctctacgacgggtgccggcgagcgttctggctcatcaacgaggggtacacccttctccgcgaggacgcaaacaagcctgccgttcacatcgagtacatcgacttcgacgacatctcgaacaacgatttcctcatcgtgaaccaatacacggtcgaggacgtgcgcacccgtcgtcccgaccttttatgcttcgtaaacggcataccgctcgccatcctcgagtttaaaaccgccatcgaggaggatacgaccatccacgatgcgtggaagcaaatcgccatccgttacgcgcgcgacatcccgagtctgctcaagtactgctgcatagccgctgtcagcgacggcatcaacaacaagatcggcactgtgttcgctccgtactcatatttctatgcctggaacaaggccaatgacgtcgacaaggtgtcgaacggcatcagttccctttacaccatggtcgagggtgccttcgcgcccgaccgtttcctgacaatcgttcgcgacttcgtattcttccccgacgacagcaaaagctccaccgagatagtctgccgctacccgcagtacttcgccgcgacgaggatgctcgacaacatctgtgagcacctgcgccccgaaggcgacggcaagggcggcacgtacttcggcgccaccggctgcggcaagacgtatacgatgcttttcctctcgcgtctgatgatgcttcgacgcagcgaggagctgggcaaccccaccatcgtgctcatcgtcgaccgcgaggatctggacaaccaggcaagcgagctgttcgtgacagcgaagcggttcctgcatgacgagaacgtgcgcagcatcgagacgcgcgacgacttggcggagacgctgcgcgggcgcgaatcgggcggcgtctacatcaccaccatccagaagttcagcgagcggatggggctcctttccgaccgctgcaacatcatctgcatatccgacgaggcgcatcgcacccagacgggcgtgggctccaagctcatggtcaccgaggagggtgccttcacccgctacggcttcgccaaatacctgcgcgacggcttccccaacgcgacctacgtgggctttaccggcacgcctatcgacgagacaatcgccgtgttcggccctgtggtcgaccgttactccatgaaggagtcgagcgacgacggcattaccgtgcgtatcgcctacgagcccagattggcgcgcgtgctcctctccggtgatgaggcgaagaggatccaggagtactacgaccgctgcgccgaggagggctcgaccgaggacgccatcgaggagagccagcgcgccatgagctcgatggaggtgctgctgcgcgaccccgaccgcctgaagaagctcgcggccgacatggtcgagcactacgagcgcctctgcggggagaagccgggcgttgtgcagaaggccatgatcgtctgctctaatcgcgcccatgccttcgacctgctcaacgccatccttgccgtacggccagaatggggcatggcgaagaaggccgaggacgagagcaggatttcgcccgagcaattggaggagctcgaggcgctgccaaagatcaacatcgtggccacgcgcggcaaggacgacccgagggacctcttcgacgcctgcggcaacaaggaatggcgcaagaagctggacaagcagttcaagaacaacgactcgaacttcaaggtcgccgtcgtatgcgacatgtggatcaccggcttcgacgttccctcgcttgccgttatgtatatcgacaagccgctgcagcgccatacgttggtacagaccatcagtcgagtgaaccgcgtgttcgagggcaaagaccaggggcttgtggtcgactacatcggcatcaaagagaacatgatgaaggcgctcaagacctacggcggcgacgattccggagccatcgacgatctgaccgtcgccctcggcatcttccgcaatcacctggccatgatcgacgacctcatggtcaacttcgactcgagcgccttccatgcgggcaagcctctcgaacgcctcgggtgccttaacagggctgccgagtacgtgcagctctcgaaggagttccagacgcgattcatggggctcacgcgcatcctgaaatccgcgtaccagatctgcttcccctcgggagagctatccgaccgcgagaccgcgatgtcccagttctatctcgcgatccgctccatcgtctacaagcagaccaaggatgacgcgcccgacgccgagatgatgaacgaggtcgttgaggagatggtacggcaggcgatcagctgcacgggcgtggagagcgtcctcgacgccgacggccccgaggacctcttcggcgaagaggcggttgccgagctcaacgccatgaagatgcctatcaccagattcaacgccttgatgaagctcgtgaagcgggcgatcaaggattacggacgcaccaacaaggtgaaagcgcggcagttcgatgagcgccttcgcaaggtggtggacgcctacaactcacgcgacgacctcaccttcacgagcaaggtcgtatctgattttgtcgacaacctgagcgaccagctcattgacatccttcgcgatctcaaggaagacaagagctcgtttgagaggatgggtgttacttacgcggagaaggcattctatgacatcttggtgaaggtgcgcgacgaccatggttttgtcttcagcgacgagaagtgtattgcgcttgcaaaagagatttcaaagctcgtaaacgacaaggcgcaatatgctgactggtcgacgcgtgatgacatcaaaagccaactcaacatggatctgaccgtactgctctataagaacggctatccgcccgagtgggatgaagaggtcttcgagaaggtcatggagcaggcagagaactttaaaagaaacgagtagacaggaggcaaaaagcattcacctatcgttccagagtccactcgcaagaacctctgagtcccttatacaataggacagagaagcaggtgctgaatggaaccaaggcatacggatgatgaatcattgcccgaattagtagcagatcttgccgacctcaagcgcgaagggtcctactgggatttcaagcgtgagtggcatggaaacaaggtggacttgcttcacggcataatctgcatggcgaataatcccgaagacacaacggggcttttgattatcggtattgacgaagaaggggacttttagctcacgggcggcgccgagctcttgggcgaacggaggaatacgcaaggcatcgttgatatgctgcgtacaaagcgacgtgtcgatgggggttcccaaagttcgtgtcgcatcgattgagctgggcaacgcttgcgttgacattgtcctaattgaccacgatagcgaatccctgccttattatttgaccgtgattatggagaggggcgcagtatcgttcgtgccggtgccgtctatacgaggaacgctgacagcaataccccaaaaaaagaagacggctaacccgctcgagaccgagcgactctggcgtaggcattttggtttgggcaagacaccgctcgagaggctccttcagctgctctccgagccttccaaatggttcatccccttcccgttttagtgagggatgaggaatacagcggatattgctattgccacgccgactttcccgagttcacttctgttcgcaagcctgcagaaagttggaccggagtcaagtacttcatgttggctagcccgtttttctcgcatccaaactggtggacaggctacttctactatcatcagacaatgattcgcagaatgcctgatgcatattccgaccatctgtggattccagcgccaagcatctccacccttcgcgattcttgccgagcggattcttccgaagccgctcactcctacgcctattacctcaaatactccattgaatgtgtcgcgatgatgtttgagctaaggtgtgtttacactagttgggtttctggctgtgttcttcgggtagacggcgatgaggatgggccgggggttggcgaggagggtctcgtcgagcctgtcgtggcgggtggcggccttgcggtagtgcttcatgcggttgaagacgcgttcgaccatgttccgccccgtgtacgcctccctgtcgcgatcccatggggccgcacggtttccctttgggcggcacgaccggcgtcaggccgaacgactcggccggcggccgggtggaacccccgtacgcgcggtccatgagcgggcgtgcggatttccaccccgatgatccgcgcctcccgcaatgccgtgaacaggcgccccatcgcaccgttcccggaccggcggtcgaaccgccggcagacggtgatccacttgccgtggcgctccggcgggtccctccacggggctcccgcgcggcgcatccacggcagggcgttgacgaacgtgtgattgccgaccgtcacgttgccgcgccggcgcggcaacggatgcgcgacccccatgaaccggtcaagcgtgatgtcgcacctcggcgtacgcatacgacaattaccacgcaaaacctagatagtgtaaacacactctaaatcagggaagggcaccattgataaatagcagacagcccaggcgttaaaacttaaacccagggttctccttgcggatggtaccaatcttcttgtcgctgcggaccttgcgaccatcctcgtggcgcaatgtcccctcgggcaatccgcgcgacttctcaaatgtcttaactgtacaatcgcttctggtttttctgactgtcattgcgttgacctcctgtcaactatgtatcaaccgctaggtcgagagtttaacgtctggtagcagactatatttagacgatgacatgagccgactagagtcagggaatgatctcaatgcgacaacaatcctagttcaaaaccgcccggcagctgctagcacttccctggcagaggagatggccgacaccccgttcccgctcaatcgttacataacctgtttccctgtagccacccggggagagtatgttcacccgacccaagagtgacaaattccaagtgaggagcgacgactctgaactgcggaaatgctgatgtgagcacaacgaatggctatatgacgttcgtcatcgcggaatcacgaaatcgtgggggtaaaactttgagaccattcgtccaggtgccttctgatatcttcccatctaacctgtgtcgaaacaagatgcttcttcagatgaacactatccagcttatagagaataaccatgacgcactgtgcacatctccgcttctcttcatcgctatatcgcccaaagtcattcgtggggttaaactccctttcccgatcttgcaaatggctgccatcgttcagagcaagacgatacattgcatctgcgaggaagggtaactggtcaccgaggcgttcttgtaagtccggatcgcgagacagtccggacattccaatgccgtagttgaaggtactgtacccctcaagcacccttcgtaggatgtttccaattacgtatgactcctgcggatctatattctcggcgcaagcaaaatcgtaggtacgcttcaacagcgcaacatattcgttggcttttttactacgcgtttcgcaaaacatgtccttgagctcgagtaaatcaatttggaattttccgttgctgaatgtgtcatttatgtcatcgaagatgaccttcagttcgtttgccgcacccccatcgtgagtcatgaccgtgatacgactttccgggttcgagcctaatagatgtccagcacgctctctgattagcgagcagactcctatcctgttctccatgtcaaaactggaaattgggtcatcgagaatgagatactgagggtcgtcatcctcgtgatgccgctccctattttttccactctcagagaagaagtagcaaagcgcgagaatgtttctctcgcccgtggatacatcattcggctttaccgcttgccctttagatataatcttgtatttaccatcatccagggaaagctggaatctcctggtatcgaaatagacattcgcgaggtaatcgttaattacatcaactgcgatgtccatgttcttcatcttggcttcctgttcggccctgctacgagctaagcgctgaagactatcttcgtttttctttttcttgtcccgagcttcattatattcctttattgcctccttgtgcttttcaatctctgaggatgcatctgctgcagcaatcttattgttcaaatcacgaagctcgtcatgaatttttgacttctcatctatgtctttatttatcgatccaacttctttattaatggatttaatttcttcattcaacgcttgaatcacttctgacaaaccgagagcctcaatagtctttggagaataaacgcttgactctctctccaccatcaagccattgtatttttctattaggctatttgccttttgctctgcttttagcagttcggtctttagcttagcggatacttgttccgggacatcccgtgggattatttcttccaagtgcgacgccctgagttcctctttgaatttatccacttccttgctaagcactttgtgtacgctatcaacaatggaagcctttaactcagaggagattggtcgttggcacattgggcaaacgtccgcctccgatgaagaaaagacctcggctgactcctcaattagatgctgatgaccacttcgtacaagctcgaggattcgcttctcacgatcgcttaacgtggggtcttctacgcgtttagccagaagctctagaatccgagcttcatcgtataggcttggctcaagcggcagaagctcacgcagatgatttccaccggccgcactggctttttcgtagtccatcaatttttgattgaacttattgtctagacatacgcgcgatttaccaggcactgcattgcatatctcattcaaccgattatcagtgaaattaggcttcttgccgtcgactttctctgctcgcgacttccatccactgttaactgccgcgtcttgaatctttctttttagcgtctcaagagacttctcaccatttctaagctcttcgattttcttcgttagcccttggttctcggcttcaatgctttcaatcttctcgtcaatcttcttgatctcgtctgctacttcgacttgctcgccaagcatggcaaacgcctggaggccatcgtcaccaatacgcgttttcgactcgatgtaatcttcgttgaagacccttattcgtgctcggtcagcatcgtctaaatctaatctctgattacaatcgtagaaataaccagtaccattgccttccgtgatatcgttgatctcacgtgcaatagtcgattttcctgatccattacggccaaagacaatcgatgcgcgatgccgtctcgtattattgctatcgctatcgtgaaacagtcgaacgttggtcccttctgaggtaggtccttccgagaaggctccacgtcgcacttgaacaccgattatgcttgaaatctggctagccatcagaacctccaaaaaactgagatgcggcgagtaggatagcccgcagaacaatgcttcccattataacgtctgcttcttttacctaaacacagaagcactgagcgataaaaaaaaatcgaatcagtttcgtgatgatccatgacctgacgtggcttagccgtagcttagtgcgcccgtagcctccatcaggtatttccctgcctgtcccgtccagcggacgcggcttcttgggccttgttacgaccaagagcactagatgcccgacgagaggaggtaggccatcccacgaaagccgacattctccagatgccacgcgacgcgttcccgactcaccaaggaatatcggataatgatgtcgaaagcctcaagaatgccgaggcggagatacggggtctgctgtctcctcggcatccgaagcaaacgacccgatcgacgacctcatgggcatgatgcgcatcgtgcatcccgaacttcctcattccgaagtgatcacagccgcacttcatccgtctgccggcccagcccttgccataaggggagacgcggtctgccatgaagacggcgtatccaacaggtccgctttccatggcctcgataagcaccttgaattcctcattcgtccggaacggcattgcatcggcgttttcctgcccatgttttccgccttgtggcggggatcctctctcgatccgtagaacttcaccgcaaaacatcttgggcgaacagtgcagctgcgtatatcgttcaaaagcagcgggtggttatggacggaacgctcggcgtggagtcgaaggccatgttccagacgcgcacattctggtcgacgatcgcggatcgcggcagaaagcccatgaccttgccggcggattccgaaacgctatcatgcatgttgctacgctgggagaatgcgcacttgatatagggtcgaaacacactatgatgtggccacgcagaacagaaacaaccatcaggcacggaagagacccggaaaggcgaagaggccatcgtcatgtccagtgaagtcagacaagggaagatgccgccaagacacatcgaggtgcggggcgcgaaggtccataacctgaagaacattgatatcgatatcccactgcacgagatcgtggtgatcgccggggtctccggctcggggaaatcctctctcgcgctcggcgtgctgtatgcggagggatcccgcagatacttggaatccctctccacctacactcgccggaggatgacgcaggcggaacgcgcggatgtggaggatgtccgatatgtgccggcggcgcttgcgcttcggcagcgcccgggggttcccggcatccgcagtacattcggaacgctttccgaactgctcaatggtctgcggctcatgttctcccggcttgcgagtcaccgctgccccaatgggcactactgcccgccatctctttcggtcgcagccatgcaggaaatcacctgcccggcctgcggcgggcaattccacggtcccggagccgaggagctcgccttcaacagtaccggcgcctgcaggacctgcggcggcacgggaatcgtccagaccgtgaacgaggcgacgctggtgccggacgattccaagacgatcgacgagggcgcggtcgtcgtctgggggacgctcatgtggtcgctcatgaaggacatcgtacggacgatgggcgtgcgaaccgatgtgccgttccgcgacctctcgccgagggaaaaggagatcgtctaccacggcgagttgaaaaaacatcacgtccattacgtcaatccgcgcacgctggaaccgtcggaaatggatttcaactattacagcgcggtcaattccgtcaagaactcccttgccaaggtcaaggacgagaagggaatgaagaggctcgagaaatatctcaaggagggcgtttgcccggactgccatgggacaaggctctcggaggccgcccgcacgccgagactgcgggggaatcggtctggaccgggcaacggcaatgacgctttcggaactgatcccctgggtgcagggcgtgccggcatcgcttccaaaagagatgcgccccatggcgcagagcatccgcgaatcgttcatggacgtttccgagcggctgatggatctcggccttggatacctgtcgcttgatcgggcggcttcaacgctttccacaggtgaacgtcagcgggcgcagctcgcaagggcggttcgcaaccggacgaccggcgtgctgtatgttctcgatgagccgtcgatcggcttgcacccccataatctcaaggggctgaccggcgtgatggacgatctgcgggcggatgggaattccgtcatcatcgtcgatcatgacacacgggttttgaagcatgccgactggatgatcgagatggggcaaggagccggagcggacggcgggacggtgattgccgagggcaaggatcgcaaacatcgcgaagaatccacggtccgtcatcgggccgtatctttccgaccggtatgaagcaagaatccgtccggtcacgcaggcggatcgcatgttcgacaagggcgccatacatctggaaacggggatgatccacacggtgcatcctctggacgtgcggataccgatggggaggctgaccgtggtgacgggcgtctccggttccgggaaaaccacgatggtgctcgaaagcctgatcccgtcgttcagggcgaagatcggcgggcagaagcttgcgggacatgtgaggaacatcgaggcggagggcatcgcacaggtcaagctgatcgacgcgacgccgatcggcatcaacgtgcgctcgaccgtggcgacgtacgcgaatgtccacgacgagctcagaaaggcatacgcaaagacacaggacgcgaaggaccgttccctcaaagccggagatttctcatacaatacgggaagactccgctgcccggcctgtgacggaacaggggagatctcgctggacgtccagttcctgcccgatgtgaagattccctgcccggactgccggggttcccggtacggcgcggatgctttcgacatccgcaggaaagcgaaggacggcaatgcatacagtctgccggagctcatgaatatgagcgtggatcaggcgctgaacgccctcgacggactgaagctcccccggcaacgactgcaggtgctgcacgacctgggactcggctatctgaccctcggcgaggaaacgcccggactttccggcggcgaagcacagcggctgaagcttgccagcgagatgggaaaggaccagagcgactcggtgttcgttttcgatgaaccgaccatcggcttgcatccgcaggatgtgaggacgctgctgcttgttttccagacgctgatcaatcacggcgccaccgtggtggtcatcgaacacgaccttgatgtggtggacaacgccgattacatcatcgatatgggaccgggcggcggaaaggaaggcggcagggtcgtcgcctgcgggacgccggacgagatcagacacacagatgaaagcattaccggtcgctatatatagcgtcatatgtaggagcgtggtctctgcctgacggcatcacgcgggagcaggccggtacggccctgacccgcatcgcgagtggtgtgccgcggcggcccggctgcggcacgtcggcatggggcgcgccgccagggcgcggaatacggggaatatgccgcgtacgacaggaatgatatgattcaatcctggatttgcgttacgtttgccacacgcggcggaacgccgtcggagccgcagtcagagagggaagtcccgtgaaacgtttcgtgggtttggacggcatcaaaggattggcgctgctggccatcgtgctctatcactgcatgcagcagcgtctgccgggcggattctacggcgtggacgtgttcttcaccgtctcgggattcctgaccgccacaagcctcatacggtccctgaacacgaccggaacgctcaacctcgtgcgattcatccccaagcgtgcagtacgtctctatccggcgctgtttctgctgattccggtcaccgtctccgtcggctggctgctcgatcacgatatgctggtttccatccgcgaccaagtcatcaccgtgctgctgggctgctacaactggtacgccattgccggaggccaaagctatttcgaccaaatgaacccgcaggtgtttcgccatctgtggttcattggcgtgctcatgcagttctacgtcatcgtgccgttcatcgtctggctgatgtggaagctccgccagacgaaactgccctcactcatcccactgggactcgcggcgttcagcagtatcgccatgtgggtgatgtacgtgcccaagggcgaccccacccgcgtctacttcggcaccgatacccacagcatgggcctgatgctgggtgtggctctcgcctggtgggtcaccgctcctcagttgggccacgctcgtcagggagctgtgccgatgccccgcaccattagatcgagcgcttcggccgccacgtaccgggctccgttacctcagattcctgtaaagcatcgcatctggaatgcgacggcaccggtattggcattcctcagcctgattgccttggtcaccatgacggttatcggcaaacaggatgcattcgccttccgcggcggcatcatattgtccagcctgttgtccgtgctgctgattgccggtaccatctccgacgattcctggatgcaaagcctcatggtgttcaagccattggccgccctcggcaagtattcgtacggcatttacctgtggcactggccgttgtggattctttccagcgcccttgccccgaagatcttcaaggcagcagggccttggcctctcatcatgaccgcgttgctcaccgccattgcggtgatgatttcctggctgatggtggagaaaccggcggcaatgcactcggtgatatccgtcgtggtgccccttcgcacgaacaagaagaatcatgcggcccgggttattgccgttgacgttatcctggcgctgtcgttggtcggctgcgcgcagggcattactcatgcacctgcgaaaaccgccatgcagatccagctggagcaacaggccgcacaactggaacgcatacagaaaaccgaacacgtgctgctgcgccatgccgtgccggcaccgcccaagcccaagcatgagatgcccaccggcgatcagattaccgccataggcgattcggtgatgctggcctcatcacagggcctttcggaagtcttccccggcattcagaccgacgcgagcgtttcccgctccatcatggtcgcccccgaactcatcggcaatgatctgtccgccggcagtctgcggcaatgggtgctgatcggccttggcaccaattcggcaatcacccctgatcagctggaccagattcgtaatatgatcggccccgaccgcgtgctggtactggtcaatgcccacggagaccgtacgtggatcccacctaccaaccaggtgcttgccgactatgcggccgcacatccggacaatgtggtgctggtggattggaatgccacagccaacgcgaacgcgcaggtgctcggctccgacggcatccacccgagcatggatagcgatatctatgcaaaggcggtcaaacaggccatcgaacaatggatcgcaagcggcaggtgaacggcaggcaacgctgagttgtccaaccggtcgtgaagaacggctatgctgaagactgcatcaacgagaccacacgttgggagacatggtgagcgcaatccttgaagggaagcccgataagaatcttattctcgttacgggaaggattcatccgaaattggctgaggatgtcgccgagcagctcggcatcgacgtccttgaaaccaccgcatacgatttcgccaacggcgagatgtacgtgcgctacaccgaatcggtgcgtggcgccgatgtgttcgtgctgcaaagccactacaaacccatcaacaaggcgatcatggagcagctcatcatgatcgacgcattgaagcgcgcctcggcccgttccattactgcggtctgcccgttgctcggctactcccgtcaggacaagaagcaccgcggccgcgagcccatctcctgccgtctggtgttcgacctgctgaagaccgccggtgccgaccgcatcatgtcggtcgatctgcatgccgcgcagtcccaaggcttcttcgacggcccggtcgatcatctggtggccatgccggtgctggtcgactacatccgtgatcgtttccaaggccatctcgacaacgtcgccgtcgtctcccccgacgccggccgcattcgcgtggccgagcagtgggcgcagcgtctcggcggcggtccgctcgctttcgtgcacaagactcgcgacatcacccgcccgaaccaggcggtcgccaaccgtgtggtcggcgacgtcgccggcaaggactgcgtgcttgtcgatgacctgatcgacaccgccggtaccatcgcgggcgcatgccacgtgctgcaggacgcgggagccaagtcggtgaccgtggtcgccacgcatggcgtgctctccggcccggccatcgagcggctcaagaactgcggtgcgcgcgaggtcgtgctgaccgacactgtgccgattcccgaggaaaagcgctgggatggcttgaccgtcctgtcgatcgccccgctgctggccagcgccatccgcgccgtattcgaggacggctcggtcgccgaactgttcgacacctaccccgagcaccacggtcaaggcttcctgttcgcctgatcacgtgcgtgtttgttcaaggaaagcacacgatgcgagacgcgacatggcgtagtctttcggtaaataccgacagtatggtataaatgaacacttgtgggccgaaagcccacgactcccccatggtgtaatggcagcacacgggtctttggaaccctttgtcttggttcgagtccaggtgggggaacggctgacggccgctcgacatccgggcggccgtctactgttttgaggtgtttccaccctcaatagacattccgatcgaagggaatacgtcagttatggcattatccgcagccatcgtcctcgccgccggcgagggtacccgcatgcgttccaacaagccgaaggtgctgcatacttttgcaggcaagaccttcctgaacagggtcatggattcggtgaccgccctgaaccccgacacgctggccgtggtcgtgcacttccaggccgagcgcgtcgccgaagccgcccgctcctatgacgagcaggtcaccatcgtgaaccaggacgacattcccggtaccggtcgcgccgtgcagtgcgcaatggcacagctcaccgaggctggcaaggtcgatggcccggtgctgatcgccgcctccgacatgccgctgctcgacagcgagacgctgcaccgcctggtcgaattccacaccgcctccggcaacggcgccaccgtgctcaccaccatcctcgatgacccgaccggctacggccgcatcatccgcgatcgcgaaggcaacgtgctgcgcatcgtcgagcagaaggacgccaaccgcagcgaactcgccgtgcaggaagtgaacacctcggtctacgtgttcgaggcttccgtgcttaccgaggcaatcgccggactgaagtcgaacaacgcgcagggtgagttctatctgaccgacgcgctggaaaccgccaaggccgctggcaaggtcggcgcgttcgccgctccggatccgctcaccgtcgaaggcgtgaacgaccgcgtgcagctggccgcgctgtccaagacctacaaccgccgcgtctgcgagcgctggatgcgcgacggcgtgaccattcttgacccggaaaccacttggatcgaggacgatgtccagatcggccgcgacgccaccatcctgcccggttccttcctgcaaggccacacggtggtcggcgaggacgccatcgtcggcccgtacaccaccctcattgacgcaaccgtggacgaaggtgccgtggtcgaacgttcccgcgtgcaggaatcgcacatcggcgcacgcacgaacatcggcccgtggacctacctgcgcccgggcaacgagttcggcgaggatgccaaggccggcgcgttcgtcgaaatgaagaaggcgcacatcggcaacggcaccaaggtgccgcacctgagctacgtgggcgacgcccagctcggcgaccacaccaacatcggcggcggcaccatcaccgccaactatgacggtgtgcacaagaatcgcaccaccatcggctctggctgccatgtgggcgccggcaacctgttcgtggccccggtcgaggtcggcgacaacgtgaccaccggtgccggctccgtggtgcgccacgccgtgccgagcgacacgatggtctactccgagaacacgcagcacaacgtcgagggctggaagcccgcctgggagcgctgaaccatgcccgcacttcaggattccatcaacgccgtccgcgtggccgccgaggccgcagaccgtatcaaggccaccgacattgtggccttcgacgtagccgacctgctcggcatcaccgacatcatgatgatcgccggcgcctccaacgagcgtcaggtactggccgtggccgaggaaatcgaaaaggacctgttccttaagtgctccggccgtcagccgcgctctcgcgagggcctgaccgagggccagtgggtgctgcttgactacggtgatttcgtgattcatgtcatgcacgaggaatcgcgcgaattctacgggctcgaacgactctggcgcgactgcccggccatcgatcttgaactcgcacacccggaaacggcggagcatgcggacgctgctgccgtcaccaccgcgtaacgtgcgaatcacataacgctgatattcgctgatactcgctgatactcgtgtgtcgggctgcctgttgccgaacgtcattgacggcaccaggcagccctcccttttccctgtttcctcactggaatcgaaaggatcgtcactatggccaatcatgttcgttccattttccttatccgtcatggacgcacttcctataacgccgctcacaagctccaaggccaggtcgacattccgctggacgccgtgggtgaatggcaggtcaagcagaccgccgcggccttgaaaagcctgtacgtcgatcgtcggccggaaatcaaccaccggttcattgtctgctccgatttgaagcgtgcgcacgccaccgcgcaggctttcgccgacgtattgggtggaatcgagcccgtcgatgatcatcgcgtccgtgaacgcagcttcggcgactgggatggccatgccgtggctgaactggccgaacgctaccctgaggacttccgttcctggatggagtctcggggcggtgaactgaagtatggtgccgaacccaaggaagccgtaggcaaacgcggtgtggaggctcttgaggactggtccacgcgtgccggagacgacacggacctgttcgtgttctcgcacggcgcatggatcgcgcagacattgcagaccctgttgggcatttccgcgatcgatccgaccttctccacggtggtcacattgcgcaatgcgcactgggtgcgcttggtgccgatggacaatcccgatggcactgtgcgctggcgtctgctggactacaatcacggtccggccatcgccgacaccgacgaatgggaacgcgaacgctgatcatgttcccgactcccctgctaatccaataggtccggtgcattcggaaccgttcaagcaataactgaatgactcaatgcctgaataatggcggaaacaagccaaaaagtgtcgccaaatcacacttttgtcatttggcgacacgccggcttttgccagaatcgacatctcgtcgtaatgtatacgaggtccgaacaacgggccaacaattgaaaacggggctatagcgcagctggtagcgcatctccatggcatggagagggtcgggggttcgaatccccctagctccacgacgaagccatcaaatcggatgatatggtggtttctccgctggttcgtggcgggtcttgtgactcccatgaatcggatagcttcactcggggctatagcgcagctggtagcgcatctccatggcatggagagggtcgggggttcgaatccccctagctccacaatcaaggccggtgcttcacacaccggcctttttcgttttctatcctatcgggcgacttttgtgcaacattcccgggaatgcgtcgcaaaacagggactggaatgcatgcagtgcgatactttccccggaaagtatcgccaaggggacgctcttccgattggcgcgacaccggcgtgagagataacagtaatcgccactacaatgaggtgtggtccctatcgtgttgatcatcaaaggagacaaaaacatcgtgaccgtcacccgtgtatatatcgccagccctgaaggcgccaatggccgcaacgtcgtcgcttacggcgtgctcaacgcattgacttccaagtacaagaccatggtgttccgccctgctgtgtccaaccatgacgaattcaccccgatcctgctcgccgcctccaatgcgggactcggcgtggccctgtccaccggcctcgacgtgcataaggtgcgcgccgacaaggacaccgcccgcggagacatcgtcggcgagttcaactacgccatggaggtctcccgcgcgaacgccgccctgatcgtcggcaccgacaaatcccacgtcaacgacccgaccacctacgagttcaacgcggacgtcgccgccgatctgaaggccggggtgttcctggccgtgtgcaccatggaccgatggccgcacgagctcgacgagaccgtcaagctgtccatcgagggcatgcgcgccgcgggcaatacggtgctcggcatcttcgtgaccggctgcgagccgcgccacgccttctccgtcaaggagaccctcgccaaatacggcctgccggtctggactttgccgcaggtgcccttcaccgacgaatccaccaaggatctggcccttgagaccttccgcaagcacgctcccatcgacgaggtgctcgccgcgctcgacgtggacgtcaccgcgccggtcacgccgtacgccttccaattcgacctgctcggcaaggccaagagcaacaagaagaccatcgtgctgcccgaaggcgaggaggaccgcatcatcaaggcggccgactacctgcttgagcgcgagatcgtgaacctcatcatcgtgggcgacaaggacgccatcctggcccgcggcagggaactggggctgaacagtctggggcgcgcccgcttccaggccatggacgacgagaacgtgttgaagcccatggtcgccaagctgtgcgagttgcgtgccaagaagggcatgaccgaggagcaggcccgcaagcaactgaccgacgccagctacttcggcaccatgctggtggtgctcggctatgccgacggactggtttcgggttccgtgcattccaccgccaacaccgtgcgccccgccctgcaggtcatcaagaccaagccgggccagaaactggtctcgggcgcgttcctcatgtgcttcaaggaccatgtggccgtgttcgccgactgcgccatcaacctcaacccggacgccgagcagctttccgagatcgcgctgcagtccgccgagaccgcccgcgccttcggcatcgacccgaaggtcggtatgctctcctactccaccctcggctccggcaagggcccggacgtggacgtggtcgaggaagccaccaagctgctcaaggagaaggctccggatctgccggtggtcggttccatccagttcgacgccgcctggtcccccaccgtggccgccaccaaggccaagggcaacgatgtggccggacacgtcaacgtgttcgtcttcccggacctgtgcgccggcaacatcggctacaaagccgtgcagcgctcctccggcgccttggccatcggcccggtgctgcagggtctcaacaggccggtaaacgacctgtcccgtggtgcgatggtgcaggacatcatcaacaccatcgccctcaccgccatcgaagcgcagtgagcccggcttagctcccgccagcgggagccactgtaatgcttattttgtagcaagcaacgagtaatctaatcaacggtaacccgtgtctcacgggaacattcaatcacaatggaggatgcccacaatggcgaaaaccgtccttgtcatcaattccggctccagctcgatcaagtaccagctggttgatctcgaatccggcgaaggcctcgcttccggcctcgtcgagaagatcggtgagccggtcgacggccactacaagcacgagtacaacggcgaaaagcacgagcttgaagagccgattcacgaccacgagcagggtctgaagcgcgtgctcggcttcttcgaggagtacggcccgaacctgtctgaggctggcattgtcgccgtcggccaccgtgtggtgcagggcggctccatcttcccgaagccggccctcgtgaccaacaagaccatcaaccaggtcaaggatctggctgtgctcgccccgctgcacaacggcccggaggccaagggtgccgaagtcatgcgctccctgctgccggacgttccgcagatcttcgtcttcgattcctccttcttcttccagctgccgaaggccgccagcacctacgcgctgaacaaggaaatcgccgatcagtaccacatccgccgctacggcgcccacggcacctcccacgagtacatctcctccgtggtgccggacgtcatcggcaagccggctgaaggcctgaagcagatcgttctgcacatcggcaacggcgcttccgcttccgctgaagtctccggcaagccggttgagacctccatgggtctgaccccgcttgagggcctgatgatgggtggccgtaccggtgacatcgacccggctgtggtcttccacctgatccgcaacgcccacatgaacgtggacgagctcgatgccctgttcaacaagcgttccggcatgatgggcatgaccggctacggcgatctgcgtgaggttcaccgtctggtgtccgaaggcaacgaggacgccaagctggctctggatgtctacgtgcaccgcatcgtcagctacatcggcaactacacctaccagatgggtggctgcgacgtgatcaccttcaccgctggtgtgggcgagaacgacgacgtggtccgcaagatggtgtgcgacaagctcgctccgttcggtgtcaagctggacgaggagaagaacgccacccgctccaaggaaccgcgcatcatctccactccggactcctccgtgatcatcgccgtgatcccgacgaacgaagaactggccatcgcccgcaagtccgccgcaatcgccgaggctggcaccgatacctacggcaacaccttcgccaagtaagtaaccgccgttaggcatctcactaatctctagttgcaacactatgggggctgattccgattggaatcagcccccattcgtatatggtcaagagaccactacccctgcgtcatactcccctcagtcgcctccggcggacagatcccctcagagaggggatccaggccctataacttggctcccttctctgaggggagctgtccgcgtagcggactgaggggagttccaccagaacacaggaccccttactgcctcagcatgccactccacataccgacgaaatcaggcaaggtcttgcgcgtggtggccacgttgatgacctcgatatcgggaatacgcagccccagcatcgcggcgaacgtggccatacggtgatcagcataggtttccatcacggcaccgtgcaacgtctccgccggcaccggttcgatacgcaatccatcaggcaattcctcagccgctcccccaacacgacgaatctcgttgaccaatgcctccagacgattcgtttcgtggccgcgcaggtgaccaataccaaccatgtctgtcgacttatcagcaaacaccagaatcgccgccaacgagggcgcaatctccccggccgccgtcaaatcgaacgtacccagcccacgcacggtgccgtcaccggtcacctcgcaatagcgcacgccgccgatggtcgggaacgatacttcggcacccatctgctccagatatccgggcaacaggccgcccggctgggtggtggtttcaggccaatgaggcacccggaccgtgccgccggcgatcaatgccgcgccgaggaatggcgccgcgttcgacagatcgggctcaacggtcaccttgctcggcagttgcattgcgcgcggttcaaccgtccatatgcgggcggattcgtcggcctcaaccgcaccgccggcaccggtcacatcggccacggtcatgcgaatgtgcggcaggctcggggtcttctcccccgtgtgcgcgaggtgcagaccgccaggcagtttggaactaatcagcaacaggccggagatgaactgggaagaaccggacgaatcgatgctgacctgcgcctgggcagccggcaaggttgcaggcggcgtaatagtgaacggcagacggccaacctcgccgtggtaatcaaccgttgcacccagctgttccaaaccatcaagcaccggcttcatcggacgtgcataagcctgttcgtcgccatcaaaattcactgggccatctgcaaacagggcaaggccgggcacgaaacgcatcaccgtgccggccagtccgcagaacacattgacgttgccatggaatcggccggatacaggaggagtaaccgttacggtggtgtcggttgcggaatccacgtcgcagcggacaccgagggcttcgagtgcgcccatcataaggtccgtgtcgcgcgaacgcagcaggccaatcagagtaacgggcttgctgccgagggcggcgagaatcaggtagcggttggatagggacttgctgcccggcaccgttaccgtagcgttcaacggctgtggggcgagcggggcaggccagagattcgtgagtcgttcagtcataaggccaaatctatcaaacaaatttttcaccggtcggcagcgatgcgggattcgatctgctgatcaggtgcggaagacggctgctcaaaaccgccttcgatggcctgcgcgtgcaacaactgagcggccgcgcgatcggcctcgatggcggcgatctggcgcgagaacacgatgaaccagccgaggaacgccagaccagccaacgcctccacattggtgagggtgttgtgacccatcatcatattgacccagaatgcagcgcatacgagcgcggtcaggtcggaggccaccatcactgctttggacaggcgtggcgcaagccacggcaggagcacgaacagcagcagcatgacgaacggcaggcctttggcgcatatattgtgcaagagattgtgtggcgtgtaccgaaacacgccgatgccgatgaatgccaggccggccaccatcagcaggaaggacagaatggagatgcgcagcatgaaatgtgggatttcgtagccgcgattcggatctctgttggtgcggtcgtgccagaggcgctgtagccgttcggtggtcaccagttcggagatggcgaagtagctgacgatgatgatgcatgtgccggcaagaatcagcgtggagttgaacatacgggccgcaaacgtggttctgtcgccgagctgcgaaaagttgttgtgataccagtatgggtcgtcggtggtcatgccggcggtgaccacgccggagatgacgaagaacggcaacagactggcaatagttttggcgttcatcatctccgcctgtacaaaggtcatgtaccccaccacgccggcgaaggcggcgcagacgctggagatatagccggagaagatggcattgcccatcatgtcgttggccgcaccgatgagtgcaaaagacgacaggaaaatggtcgaggcatacactaccgaaagggcgacgatttcgaaaatgcgacgaatcggcgcaaaccaaccatgtttgaggttcaatgaacgtgatttgcgcgcatagccaataatgaaggaaatgacgccgcatgccgccacgatgcccgaacataccatgaatcggcgttgcgtcagctgccagatggccggcgcgtattccatgtacaggttcatcgataccgcgccaatgatggcgcaaatcaagaaggagatgagtccggaggtttctgcacgctgatgacgtcccatgccgggcctcccctatctattcgatgccgcgttatctttcaacaacaaacaaaactccccccgaggacaacgctttactagcaagccagcgggatttggctgtcgccattctactgaaaatctgaaacactacaaaaaaaaacgattatgtacgggcttcttagcctttgcgactatcgttaccgccttgccgagtaccgttgttcatgcagaaagaaagcagtattggacacaatcgaatgagcgtggataacgcccgattttttgcgcactttcggattccgggtctgacgtaagagggcatggcccgcgtcctgtgtacgattttcattcgccaaaacaaaaaaccgcgattggaagccaggagacggaaccaagacccttgaaca

SEQ ID NO: 2599 - DNA, 3563 bp, Unknown
  R222_15m  MAG No. k141_12609
cattggcaaagtcataggacgtggtttcgaggatttcggttcccaaacattcggccaccttctcagctagctcggggtaggcgcggcccgtgaccaatacgagtcgtttatccggagtgccttcaagaatcgccgacatgcgttcgcatcctttgtttgagtcgctgtgtgatttacgccttaaccagtgtacaagcaccccgccgcagcgaacgccacggcggggtgcctatttcgtaagagtgttgagattgccgaaattattcggagaactcgacactgaccttattgtctttgatggtgaaggtgccgtacaccgagaaagtgctggaatcgtcttccggttcccagccatcgctgtaacggtactcgtaattcgccgtcacatcaccttcgtcggtgctgaacgagctatccgacaggctcacgctggtgaccttcggataaccgtcaatcgtccacttgaagttgcggtatcggctggaattggaggtgtagtagccgaacgggcagccctgcggttccgcatcggtggaagccgcgcattcatccagcttgctcttcaccgccgtgtcgatttccgacgtcaacttgtccgtaggctgagcgtcaagagtgccgctatcggagctgttggtgctcagagacacggtcttggcggtgtaatagtcggacttcaccacgccaactttgtagacgccggggtacaccttgagccggtagttgccggtttcgtccgcgtcgttgttcacggcgttcttgggcgttacggtcacgccattgacggtgatgctgcccagcgagcttggcgcatataccgaaatggtcttgaccaacggttcggcgacggtccagttcttgaagatcaggaacttgctgccgttggccaccatcttgatggaatcgccggtgacctccttgccttcaagcgtgtacgtcagctgggcgctcacggtgccatcggcattgttggaagtctgcgagatgcgcgcgttggtgatgtgcgtgttctcgcccgaggatgccttgctggtcagcagtgcgcgctggttcgtatccacgtgaggatcggcgatggtgttggccttgtcgtagtcgccggaggagatggcggccacatagctgttcgccacgctcttcgcgctgaacacggcggaagacagcacgccatacacgataccgaacagtacgaggaagccggccacggcaccaacgatgatgaagatcttcttctgctgctcattcatggtggtggaggtcgcgccaggtgcggctaccggtgccgctccgggagtggtgggagccgcggttgcgaatgcggtgcccggagcaccgggggttgcaggagcggctggggcgcctggggcagcgggcgcgggtacgccgacaccggcaacaggaggctggccggcggacgtcggcgtggcgttgacgtgaggctgcgcagcgtttgcgcccgtacccacaccggcgctcggcgtgccccacgtgggccacttgccgaccattgcgccgctggcatagatgtagtcgaccaccggctgaggcgtagcacgcacagtgccgcctacaagcagtgcccgcagtcccggcatggaaaccaccatggtcgggccgaacgtcagcgcaacgacctcaaccaggaatgcccacaggcccatgaccaggaagtaccacatggcaggtccgatggtctgaacttgcgtgacggaggtgcggttgcccatagtacccatcagcagcgtggcaatcgcccagaacaccatgatggcgatcggggctttccagcagtgctgccagcccatgtaggcacggtcgtacaggttgcgtgcggagacgcgcaatgccgtgtagaaggtgaggaccaggaacacggcgaacaggatccaaataggccatacggtaacgctgaggttgatgctgaacaggctgagatcctgcggcagctgaccggactcggtcagtgtaatggcgccgaaggttccccaggtaaagaagaactcgccgatcatcagcagtgtgaccgggaacgtcagtatcaggattccctgacctgaggagaatgccacggcgaacagggccaccaggccgacgatgaagagcaaagccagctggaagctcaagacgctgaccaccgtgcgcgtgtatccgcgaacgcggtgtgcccactgccaagtagctccgaacacattcttggaatcggaagcatattgggccagtgcatagccggccagagcgccgagcgcggagagcaggtaggccataaagaacgtacgcactgtggcgccggtcaccttggccacgatggtggtgccactggcgagtggtgccgccgcgatggccgcaagcagcgtgatgaccacggccggcagcaatccggtgataaagccggagatcaggccggtgaacttgaatcgaatgctcttggaacggcccagcatgaatgcgccgaatgcggtgccgaccagcaatgccaagccggtgagccccagtgggtacgacatcatgttgctggcgtccatgctggaggatgagaggtcgacgatgtcgaaatgaataccgccagacaggcccatgaccaacgataggaacaggtagtggaagaagttcatgccgttgccggtgatgaacatgccgccaacggcttggttcagtgttgaatcggccccgaggctgggtgctgcggtgctcatggaattcattgcgattgcagggaaaatcgaaagcaccaaggcggctgccgtaccgatgccggccgcaatgccgatggtctgcatgttgggggcgccgaacagttccttgaccagtgggctggaagagatgggttgtgccggagcggcgggagccggcgatgggccgggctgccctgggttcggaatggccgtggtcggtgcggtgaatgccggtccgcctgcgggctgggcctgcggctgtgcagcgggctgaggcgtcggctgcacagccgctgcgccgggcaacggaatcgatggtgcgggagccgcgggctgtgcggtcgtgggaacggcgccggtgggttgaccgggcgtgggtgcggcgggcgtcgctgctgctggagctgacgccgcggcaagatggttgccgcaggaaccgcagaattgcgctccttcgcgcacagctgcgccacaattaggacagaacatatagtccccctttcttctgatgcttcttcgagcactatcgtacccgcaaaatcagcgccatgaccatagggcgaggctcgaaatggacaatactgggtgatggcgcgcgggcttggctgcgcgggcttggctgcgcgggcttggccaaaatggtgggcatcgcgaaaccggcaggaatatggccataccctgtcccgccttatatatagactgtccaagttgcccgaagatgcggtgccggtttggtgctgcgtcatgggctaacacgcatacacactcctgccacggaacgtccgtggccgaatagtccgaaggaggtgggtgatgtctgcgcacaagtacgaactgatgttcatcgccgatcctgagctggatgagcgcggtctgaagaagctgaccgag

SEQ ID NO: 2600 - DNA, 34853 bp, Unknown
  R222_15m  MAG No. k141_12728
cgaacatgttcgcggaggggtgcgttgacggtgacgtattggcgacggtgaacatatcggcggcaggagaagataagctgttctcaggggaacatcagcacaacaaaggagttacgcatgcgagatttcattttccataacccggtgaagatctacttcggcaaagggcaggcgcgccatatcgcacaggaggtggagcgtgtcgagggcgccgttctggtggtgtatggcggcggatcgattaaacgcaacggtgcctatgacgatgtgatggctgcgctggcaggaaccgggcgcaaaatcatcgagctgcccggcgttacgccgaacccgcgattggacaaagcgctggaaggcgtacgactggtcaaggagcatggcgtcggcctgattctggccgttggcggtggctcggtaatcgactgcgcgaaatttatttcgttgggttccggcatcggtgacgatgaggatttgtgggatgactacatcgaaaccggcaaaccggcacctgaagggctgattccggttggcgtggtgctcaccaccgcggcaacgggctcggaaatgggagatgcggccgtgctcaccaattgggaacgtaaccgcaagctcggctatacgtcgttcccgctgatgcccaggttctccgtgctggatccaagctacctgatgacattgcccgccgaacagacggtgtatggcttcgaggacatgttctgccacacgtgtgagcagtatttctcctatccggtggacgacaacctttccgacgaaatcgccgagggaatccaacgtcatattctgcgttcgtggcgagcgtgcttgtccgatccgaaagattatgaggctcgctccaatgcaatgtgggattccacgttggctctgaaccgcattatctcgcgcggcaaggaagaggattgggtgacgcacggcatcgagcacgcgctgtccgcatacaccgatatcgctcacggtgctggtctggctgtggtccacccgcattggatggcatacgtgtatttggtcaacgatgaggtgacggctcgctttgcccgctgggcggtcgacgtgtggggtgtgacgcccaccggcaaaaccgatcgcacggtggccgaggaaggcattgatcgctatgtcgatttcctgcgtcgcgtaggtgcgccgctgactctttctgaggccggcgtgcccgacgatcccgcctctctcgacaagtacgccgatcatgctggtgaggccggcggctcattcgtgcagattcaccgtgacgatgcccgagcgattctcgaggcatgcaaggaaccggtgtcgttctgacggttggactaatcccgtgatttgagccgccgcgtgctgtcccgcaccaccaaagacgtagaaagaaccacgcgcttctgaatcttgcgtccttcattggtatcgatgaccatgcgggctgcagtggcggccatgtcttgcaatggctggcggaccgtggtcaacgccgggcccatgtacgcggcggtctgtatatcgtcgaatccgataacggacagatcttcggggatacggattttcagttgacgggccgcctcgtaaacgcccatggcctgtaggtcattgcctgcaaagatggcggtcgggcgactttgttcgtcttcaagtaacgccatggctccttcgtaaccgcctggcgtggtgaaatcgccttcggtgatgagttcgggagaggtggggatattgcgttcggcgagggccgccgaatagccgtcaagccgggcacgtgagcagagcatttcatccggtccggtgatgatgccgatgcgcttgtggccgagttccagcagatgacgggtggcgatgacgccgcccatccagttgtccgcctgtacggagagatcatctaatgccggattgccggaagggtcgaagacgacgaaaggaatgccgtgtgattggaacatgctgcgttccttgtccgtcaagttggagaacaccagaatagcgccaatgggctggcggtcgatgatgccttcaacccaggaagagtcggggtgctgccggtcgccactttccgcaaccatgacattgatgttgtgcggcttggcctccgtgatgatgcccctgagcacctccagcgcccaaatggtctcgaaatcccgaaataccacctcgatggtgcgttgtttgcgggaaggggagacgcggcgaatgtagccgttgtctttcagggctttgtcaatagcctgccgggctgcctccgaaatatccgccttgccgttcagggctttggacacggtggccagtgagtagccagtctgtttggcgatgtctgcaagtttgaccttgttctcgccgttgcttttgcgctgttctgccgacgccatcattgaccgccttcatcagagaatgttggtatcagtatactcgaaactttcgtaaagtcaatttgatgataaagaatggtgtacataagtgaaaaaggttggaatttcaacgattttgatagtaaaaaagccgatataaatttcgtttgaccgtcagactaaggctctctatgataaaggtatcgaaaacgtaaagcgagttttcgataaagttaaagaaggttgatggaataggtgaaacggcgaggtttcactgaaaacatcattaattaccagctgttagatatgtaactggctgatatacctttcgaaactttcgtaaatcgcggatcggtttcatgctggtcaagaacaataaggagacgacaatgaagttcaagtccgtggccgccgcacttctggcggcggtaacctgtgtcagcatggccgcttgcgggagcggcagcgacacgaacgccgatggcaaggtggaaatcaccatgtggcacaactccaccactggcgacggcaaggcatactgggaatccgccgccaaggcgttcgagaaggaaaacccgaacgttaccatcaagatcgaagccattcagaacgaggatatggacggcaagctgcagaccgctctgcaggacccgaattccgcccccgatatctttatggcgcgtggtggccagaagctacgtgatgtggtcgaagctgggcaagccatggacctgaccgacaagatctccgacaccgtcaagaaccagatggccactgctgaagccaccggcaccatcgatggcaagatctacagcgtgcagcagtcagtgcttcccggcggcatctggtattccaaggatctgttcgagaaggccggtattactgaaactccgaagacctgggatgagttcaagaccgtggtgcagaagctgaaggacgccggcatcacgccgattgccgtaggcggtaaggacgcctggccggccgcccactggtggtactggttcgcactgcgcgaatgctctgctgacaccttcgacaaggcccagtccgataaggacttcagcgataagtgctggacccgtaccggtgatgatgtgcaggcgctgctcgacctcgatgccttcaacgatggcttcctgaccactccggcccagcagggcgcaagctcctccgccggcctgctcgccaaccacatggcagctatggaactcatgggcggctgggagcccggcgtgatcaaggacctgactccggacaagaaggacatggccgacctcggctacttcgcattcccgaccatggacggtggcgaaggcgatccaactgccatcatgggtggttccgatggcatggccgtgggcgagtgggcgcctgaagaggctgtggacttcctcaacttcgtctccgagaaggaatggcaggagaagtacgctgaggcgttctccaccatcccggccaacaaggaagcccaggatgtggtgaccaacgaggctctgaagcaggtgctgaccgtctacaacgacgcatcctccgtgtccatgtggctcgacaccgtgttcggtcagaacatcggcaacgcactcaacgaaggcgtggtcaacatgatggccggtcaaggttccgcccaagacatcgtcaagggtgttgaaaccgctgcggccaagggctgattcgctctgacccgaccgtaattcccgggctgcgcgaatgcttgcacagcaacaaccgcggcccaatttgttttcttaggaaggcctcaacaatgtcagtttcagcaggcgcgagggtacagcgccgcacgtcgggcttaagcgacaaggctcgcaaacgtatcgaaatcaccgtcctttcgcttcctgccctgatcatgttcctcggattcgtcatcctgccggtgttcatggccggctactacggattcttcaagtggaagggctatggcaagcccaccgtcaacggccagttcatcggttttgaaaactacaagatcattctgaccgacccgaacttccagcaggcattggggcacacgctattcgtggtcgtcgcttcgctcgtcatccaggggccgctggccatcctcttcgccctgctgctcaaccagagattcaagggccgcgcactgattcgtaccctgattttcgtgccgtacgtcgtttccgaagtcatcgttggcaccggctggggcctcatcctccagaccacaggcgcattgaatgcgctactcaagaaaataggacttggcggggcggactggatctccgatccgaaaatcgccatctggacattgatgttcatcatttcgtggaagtacatcggcttcgccgtcatcctgatgattgccggcatgcagtcgattcccgaagacctctatgaagccgcgaaagtggatggtgctggattctggcgtcagcagtggagcatcaccctgccactgctcggccccaccattcgtatctgggcattcatgtcgattatcggttctctccagctgttcgacttggtctacatcatctggggtcagtacgtgtcgtctaccgcaggaacgtccaccatggcaacctacatggtgcgcgaaggtcgactcgccaacaactatggttacggttccgccgtggccgtggtgattttcatcatctcgctggtcattgccttgacctaccagcggttcgtgcttaaccgagatctcgaaggtgcgctcactgacgagagggatgccaagcgtcgtgccaagcgtgcggcgaaggaagcggccaagcttgccaaggtcaatggcaatgccgcagcagttgcaaatgaggtggtttcacaatgacgaccgcagtctccccgtccgtaggcaagggcaagaacaagacctatgatccgtatacactgagaaaatccgcaaagaccccgtggggcaacccggtcgtctacttcttctcactgctgcttgtggcgctgtgcgttggcccggtgctgtacatcattatcggcggcttccgcaccaattcgcagattacgagggacccggccggctggcccgatccatggaactttgagaattacaagacggtgttcacttcgaacatcttctggtcggaactcgtcaactccctgatcgtctccattggcacaatggtgggcgttgtggtgctggccttgatggtgagcttcgtcattgcccgatacgagttcaaattcaacaaactgctgtactcgctgtttgccgccggcatgatgttccccatcaccgtggccatcaccccgttgtatctgctgctgcgcaatctgcacctgatcaactcgcatctgggcattatcctgccccagatagcattcggcctgccacaggccatcatcatcctggtgccattcctcaagtccattcctaaggaactggaagaagcggcagagctggacggctgttctcgcatcggcttcttcggccgtatggtgctgccgttgagctggcccggcgtggccaccgtcggcatcctgagcttcgtgagcagctggaacgcctacatgctgccgctgttcctgctcaacgattccagcaagtacaccttgccgctcggcgtgcagatgttcagctcccagcattcggtcgataccgctcaggtactggccttcacctcgctgtcgatgatccccgcgctgatctgcttcaccattttccagaagaagatcgttggcggcctgaccggtgctgtcaagggctagtcgcagcaaccataaccgtgccgtggaaaggtacatggctctttgggccgattcctttcaacctcttcctttcctcctttccacggcccctttcttttcaatgaggagaagaccatgaagatctccaatcccgtactccccgggttcgatgcggacccctcgatgattcgcgtaggcgacacctactacatcgccaactccacctttgactggtggccgggagtccgtttgcacgaatcccgcgacatggttcactggaatctgctgcccggacccttaaaccgtgtttcccagctggatatgaagggcaatccctccggtggcggcatctgggcaccggacctgtcttatgcggacggcaaattctggcttatctataccgacgtgaaaatcgtcaacggcgcgttcaaggattgcgcgaactatctggttaccgccgacgacattcgtggtccgtggagcgatccgattcgggtcaatggcgtcggattcgacgccagcctattccatgataccgatggacgcaagtatctggtgcagcaaacctgggacttccgtgaatatcatcatccgttcgacggcatcaccttgactgaattcgatgtcaagaccatgcaattgaagccggaaacagcccgcaccatctggcgcggcaccgatgtgaaattggtcgaaggaccgcacctctacgccatcaatggctggtactacctgttttgtgcggaaggcggcacccaatacgagcatcaggagtccgtggcccgttcgcgtaccttgggtgagctttcattcgaaagcatgccgagcaatccgttcctctccaacttcgatacccccggcacctacctgcaaaaacaggggcatggggcgctcgtggatacgcctagcggcgaatggtattacgcttcgctgtgcggcaggccctggcggcacgagaacgagccggctcatggtgtgcgcggctggtgcacgctcggccgagagacttcgatccagaaggtcgagtgggatggcgacggttggccgtacgtggtcggcggccatgggggagagcgttacgtcgaagccccagccgacgccatcgcaaccgaggcccctacgaatcatagccagcatgacgagttcgaatcaaacaaactcgacctcaactggaacaccctgcgcgtaccattcaccgagaccatgggccgcgtgggcggcggctcgctgaccttgcgtggtcaagggtcgctggcaaacctgtttgaactgtcgctggtaggacgccgttggcaggcgttcgatttcaacgccgaaaccaaggtgacattcgatccaagcaactacatgcagatggccggcctgaccaacttctacaaccacctgtgctggtcatgggcattcatcacctgggacgagaagcgaggacagcgcgtaatcgaagtcgcccagaacgatttcgatacgtacacgtcgttcctcaaagacacagccatcgccattcctgatgacatcgaatccgtatggttgcgaaccaaagtgcgtacgcgtacctacacctacgagtattcgttcgatggcaagacatggcatgagattccggtgacgctggacgccgccgtgctctccgatgatcatgtggcccaacgttatggcggattctttaccggcgcgttcgtcgggttggtggccgtggacctttccggatacggcaaagaagccattttcagccatttcgattacatggaaatatgatgacgccaggcggctttcctgataatcagggaaagtcgcctgactattcggtactggggaatgaaaggcgacacttgtggcaagcgacaatgaacattgcggcgaccgtggccgcgaatgtaccataaccgtctccaacccggtgttgcgtggcatgtacccggacccgtcctggatatgggatacgacgcgcgaggaaatcgtgctggtcaactcctcgtttgaattggtgccggggttgcccattcatacgacccgtgatcttgtgacgtggacgcgcacggcgaatgcggtggatgaggcgatgtctcatcggctgctcattgatggcgtcgaggattccggcggcctgtacgcgccgaccattcgccgtatcggcgggcgatatgtgatcgtatgcaccgtggcccgcgtggatgaggtgaaggcgctcgctgcgggatgctcgcagaaggatattgataactgccgtgacgcccaaggcaatttcgtcatcgaggccgatgagttgaccggaccatggcgcggcccgtactgggtggccggggccgaaggcattgatccggacatctttgaagacggcgatggcacagtgtggtggacgcaaacgcgcccggcattacacccgcagtgggatggtcaaaccgagatctggacgcagcccatcgccccaggcgcgtggacgttgcaagaccataaaaccgtgatttggcgcggctatggcatggatgcggtatgggctgaagggccgcatttgtaccgggtgggcgattacctctacctgatgaccgccgagggcggcaccagcttcgagcacagtgagatgataatgcgcacgcacgcaccgcgcggattcgcggcggcgctcgccggttttgagaagaaccttgccgcgcaagatatctggattgagccggcgcgtgacggtgaacgaagcgtggtgggtcacgataaccggctgtttgaggcttgcaaacgcaatccgatcctcacacaccgtcatttgggagcgggggagccagtccaatgcgttgggcacgccgatctgctgctgcatccgaccgtcggctggctgctcgcgtgtcttggcgtacgcgagactccgggcgaggaacccggagaaacgttcagctactgtggccgggaaacgttcgtggcaccggtcgtatggcagcacaatccggtctcgtggaagctggacggtggggagccgaataagcgtatcgatatcgtcgatcccggttggcctgtcgtggctccggggcttggccggcttcccgagaagttggtcgtggacgttgacgaggatggattgccatgtgcagtgaggggtgtggactctgcgaggtgtgattgcgctgctggtgataatgccgcatgctctgctgagctcatccagctcgacgatacccgcctagtcggcgttcgaggccgtgacgattaccggttcctgcgcgtcgacgggcaggaatatgccgcgttcacccggcccgaatacacgatgatgatgcatcaggattccacccatgttgtcatggtcatggcggaagcggaatccggccaattgacggccgaaatcaccgataggggagataagcggtgcattgcgcttggagcgcttggggccaacgaatggttcggattgcgcttgcatggcaatcgtttggaattccttgccgggcagcctgcacctgacagtattgatgagggaacaatgcctgatattgcactaattgcgcatgcggacgttacttatgctcgtatcatggcagatggtgatgcgcgattcctcagtaccgaatgggccggcggattcgtgggttgtctgatcggcgtaaaacggcggtaatgatctcagtccgctctacaatattgtgcaatcatattgtttgatcgttaaacaaatgcaagggggcaatcgatggcgcacgatctcgaacaactcaagcaagatcacccggatgtggcgaaactgttcgccgatgactggttgcagtaccgtaagtcggagattttgccggaacttacgcgcgaggcgcagtccacgtgcgaccgcatcaatcgcatctactttgaagacaccgccgaagctgagcgactgttccgcaaactcgtgcccgaggccggcgagggcgtggacttccgcccgccaatccggcttgattacgggctaggcctgaaaatcggagaccgtacgttcatcaacatggacctgctgattgtgggcggcggcccgatctccatcggttccgattgcctgattggcccgcgcgtgagcatctatacgccaaaccacgccatcgcccgcaagcctcgactggaaggctggcagcacaacgccgacgtgaccatcggcaacaatgtgtggctgggcggcaatgcagtgatctgccccggcgtcaccatcggagacaactcgattatcggtgcgggcgcagtcgtcacccacgatattcccgccgattccatcgccgtgggcaatccctgccatgtgattgccgaagtcccggatgactggactcctgaagagcgggccgctgccgagggtcggtaggtttgctgctctgaccaactgttacggcgaaaccgggatacaggagagaaaggaacaatgcaatgacgcaatatcatgtttccgcgcaggcggcgaagacgaacggcgccggcagcgcggccgacccgtttctgaccatcggccaagcggcggccatcgcccgagccggcgatgaggtggttgtgcatgccggcacctatcgggaatctgtcgacccccgattcggcggcgagagcgccacgaaccgcatcgtctatcgtgcggccgcgggcgaaccgcgcccggtaatcaccggctccgaacgtatcgacacatggcagcccgaaggcgatggcgtgtggaaagccgtaatcccgaacacattcttcaacggatacaacccgtacgtggaaaccgtattcggcgattggaccgtatacccggacccaaaggtcgaggtacgccacctgggcgatgtgtatctgaatggcaaatccttctacgaagtcgcctcgctggacaaggtgcgcaacccacagcgttgggataccggccgtgacgccgccaccgattccatcgtgcctctgattgatccggatgccaccgtgaacgtgtggtgctgtgcggtcgatgatgaggccacaaccatttgggccaatttccatgaagccgatccgaatgcggaacttaccgaaatcaacgtgcgcgagacctgtttctacccgagccgcccgttcgtcaattacattacggtctccggctttgaaatggcgcaggcggcctgcccctacacgccgccgactgccgatcaggtcgggctggtgggcccgcattggtcccgcgggtgggttatcgaaaacaatcgcattcatgacgcgaaatgttcggcgatctcgctgggcaaggagatttccaccggcgacaacgaatcgacgcgcacccatcgcaagtccgggtaccaataccaaaaagaggccgtctacaaggcgctgcatgccggctgggagaaaggcgtagtcggcgggcacgtggtgcgcggcaacgtaatctacgactgcggccagaatggtgtggttggtcatatgggttgtgccttctcactgattgaaggcaaccacatacaccgcatcggcaccaagcgcgagttcttcggctgggaagtggccgccattaaaatgcacgcagccgttgacacggtggtgcgcggcaaccgggtgcatgattcggtgctgggcatgtggctcgactggcaggcgcagggcaccgtggtggattcgaacgtgttctaccgcaacacgcgagatgtgatgaccgaggtgacccacgggccgattacgtttatgaacaacgtgtttgcctccgagttcagtttcgacgactatgcgcaaggcgcggcgttcgtcaacaatctgttcgccggtcgcattcgtcacaccgccgtcttggaccgatccacgccataccatttcccgcacgtcaccgatgtggccggcgaggcattcgtctacggtggcgatgatcggtacatcaacaacctgttcttggctgtgggcgattccgccaaaccgttgcgtaccgcggatgccgccggtgcggccggtatggcggaagccggaaccgcgttctttgacggctatccgtgctcgcttgcggagtatgaacagctgattgaagaggccggccttggcgatgaggagttgtatcgcagcgtgaagcagccggtattgctggcttcgaacgcctatgtttcgggcgcgaaggccgcttccggcgaagccgaggctgtggtgagtgatgacggctcttcgttggcattgcgcgaaaccgatgatgagctatggatgaccatctcgttgcccgaatcgattcggtcggcgactggaccggtgatctccactgctgatcttggccaaccgcgtattgtcgaggaatatttcgagaatcccgatggttcgccgattgttgtggaccgggatatcaccggtgctgcgcgcggtgcatgctcggcccgaggcccattggcagcgtatgacgatggggaagtgctcatctggtcgaagtgacgggattgcggtttcgactgttgcctctgcctcggcctttgtgtggcactgagtggggctgggctgccagtatttggcaggccgaccccttttcgatttgcattggtaacaaatatgatatatggttaaatcattaaactaagtactgtaagtccatgcatacctacgcaacgtcaatggagatactgctatgcgcgcacatcatgttctgctgctgtcgctctgcctgttggccgcagcctacgccgtactgctattcgtttcaccagccgctgcgccgattggcgtcacgctaaccgctgttggtctggtgctggcctcgacgcgctatgcgtggcgcgccaaattcctggctctattcaacgaagcatgatttgatgaatcttcttcttcttcctctcttctccttttaagcccggacgctcgccgggctttttcttttggccgaggtcgaagtggggagggtgtgctatggccactttcgtgtcgggggtgccgtgctcccaacaatagccggtacatgcattcatgttcacttcagcagattgattgacatatcgggccgaaatgactggtatttttctgccgtccgccagcccgccgcttcggcgtgtcgatgaactttgagaaatttcatcgataagattggtgaaagcgcaaaaaaaggaaaacgctggaaaatacccgttgttaccgctcacatttagttaatcgaatgaatcaacagtgctgtaatccgtgcaatctctgggaaaagagcggtcgtctgattgttaaatcaaaaaactaatggtatatttttatgcaggttcggcaatggttgcctgaccaaaaggaagaggaaacaagttcctatcaatgtcgaaaggaattcccatgaataagtggaccaaggtgctcggtgtggttgctgcaaccgccatgctcatcccgctggccgcctgtggcggtagccgtggcacgaccactgccggtggcaacggcggtagcaccgtcaaggtcggtatttcgatgcctgagcagatgctcgagcgttggaagatcgatggcgagaacctgaagaagcagcttgaaggctacggctacgacgtcaccctgcagtatgcagatggcaagaccgatctgcagacctcccagattcagaacatggccaacaacggcatgaactacgtagtcatcgcctccatcgacggcactgcgaccggagctgctgccgagcaggtcgcctccaacggcggcaaggtcattgcctacgaccgtctgatcatgaacaccgacgccgttgactactacgccaccttctccttggaggatgtcggcaagatgcagggcgagtacatcgagcagaagctcggtctgaaggatggcaagaagggcccgttcaacgtcgaactcatggccggttccccgaccgataacaatgcaggctactacttcaagggcgcttgggacgtgctcggaccgtacttcaagtccggcgtgctgcagtccaagtccggcaaggttccttcctctgctgatgattggcagtccatcggtatcgataactgggatcgtcagaaggcccagaacgagatggagaaccgcatcaactccttctacaacgatggcaccaagcttgacgccgtgctcgcccagaacgacgccgaggcaaccggtacctacaacaccgtagaggccgctggctgggactactacccgatcatcaccggtcaggacgccgagaaggccaacgtgcaggccatcgtgcagggcaagcagtccatgaccgtctacaaggacacccgcgagctggccaaggccaccgccgaaatgatcaaggacatggtcgatggcaaggatccgaaggctcctgacaccttcaacaacggcactaaggatgttccgtcccagctgctgaccccggtcaccgtggacaaggacaacctcaaggaaatcctcgtcgacggcggctacatctccgccaaggatgctggcctgtgatccgcaggatcgctgattcgattcatccaacggcctaacggctaacagataaggggggcgccgcgctgcgtggttgcggtacggcgccttcatcatgcacagggacattactatcggaggaggtaactgtggctacgaacggtgacgtgattcttgagatgcgtcatatcgtgaagcgtttcggcccggtcaccgcgttgaacgatgtgaatatcatggtcaagaggggccagatattctcgatctgcggtgagaacggtgcgggcaagtcgactttgatgaacgtgttgtcgggtgtgtacccgtacggcacgtacgagggcgacatcgtgtacaacggcgagacgtgcaagttcaggacgattcgcgattccgaggagaagggcatcgtgatcatccaccaggagcttgcgctggtgccgtacatgtcgatccaggagaacatcttcctgggcaatcagaagaggaagggcatcgcgatcgatgccgacgagcagcgccgcgtcgcgtacgacgtgatgaggaaggtcggtctggacgagaacccggacaccctgatctcgaacatcggtgtcggcaagcagcagctggtcgagatcgcgaaggctttgaccaagaacgtgaggctgctgatcctggacgagccgaccgccgcgttgaacgacgaggattcgaggaacctgctcgacctgatcgacgggcttcgccgcgagcagggcatcaccgcgatcatcatttcgcacaagctcaacgagatcgcctattccgcggacgcggtgcaggtcatccgcgatggccgcaccatcagccatatcgacatcgacgcggcccacccgctggaccaggatgtgctgatccgcgacatggtgggccgtccgttgaccaaccgctacccggtgcacacctccaggatcggcaaggagatgttccgcatcgaggactggaggatgcgccacccgctcgacgaggcgcgtctggtctccaaggacgtgagcatcaacgtgcgtgccggcgagatcgtcggtctggccggccttatcggcgcgggccgcaccgagaccgcgatgagcgtgttcggccgccagtacggcaccaacgcgtccggcaggatcttcgtggaaggcaaggaagtcaagttcccgaccgtgcgttccgccatcgaccacggtgtggcctacgcgaccgaggaccgcaaggtgtacggcctgaacctcatgaagacgattcgcgagaacacgtccctggccagtctgaaggaactgtcgaacaggctgggcgtggtggacgagacccgtgagaagcggacggccgagaagtaccgcaaggagttccgcaccaaggcgccgaccatcgagatgcctgccggcaacctgtcgggcggcaaccagcagaaggtcgtgctggccaagtggatggccaccgacccgaaggtcctgatcctggacgagccgacccgaggcatcgacgtgggcgcgaagtacgacatctacgagatcatcgaccaattggccgactcgggttccgcggtggtcgtgatcagctccgaactgcccgagctgctgggcatctgcgaccgcatctacacgatgagcaacggcgtgatcaccggcaacttcgacgccaggaagaccagccaggaggagctcatgcgctgcatgacctccgccgtcccgctgcccaaggagcgggccttcgcctgacctccgcgcgaatcgttcccacgtgctttgtttgaaagtttgaaaggataccctccgaaatgtctaccgcaaccgtaacccccgcagccaagaagggcggggacgaacagggcctgaaggccctgctgttgggcaacatgcgttcctacggcatctacctggccctcgtgctggtgatcgtcgtcttccagatcctgacgggcgggcgcctgctgaatccgaacaacgtggtcgccctgttccagcagaacgcgtacgtgctcgtggccgccatcggcatgctgatggtcatcatcgccacccacatcgacctgtccgtgggctccgtggtcgccttcatcggcggcgtgggcgccctggccatgaagcacggggtcccgtggtgggccgcgatcctgctcatgatcgcgatcggcctggccatcggcgcgtggcacggcttctgggtcgcctacgtcggcgtgcccggcttcgtgaccaccctgggcggcatgctcatcttccgaggcctggcgaccgtggtcgccggcgagtccatcccggtggccaacgcctcgttccgcgccatctccaaggactacatccccaccatcttcgtcgggccgttcgccctgaccgccctgatcgtcggtctggccgccatcgtgctcgtggtctggagccaattgtccaagcgcgccagggccgtcaggaacggcctgcccgcccagcccatgagcttcgtcgtcctcaagtgcgtggtcgccgcgctggccatcggctacgtgacctacctgctggccatgtccggcaacgccacccagggcggcatcccgatcgtgctcgtcatcatcggcgtgctcgtgtgcgtctactacttcgtcctcaaccgcatggtcttcggccgcaacgtgtacgccgtgggcggcaaccgcaaggccgccatcctctcgggcatcgacaccaggaaggtcgacttcgagatcttcctgaacatgggcttcctggtctccatcgcctcgatcatcaccctgtcccgcctggcctccgcctccgcgcagaccggcatggagttcgagatggacgccatcgcggcctgcttcatcggcggcacggccgtcaccggcggcatcggcaccatccccggtgccatggtcggcgccctgatcatgggcgtgctcaaccagggcctgtccatcatgggcgtggacgccgcctgggtcaagaccatcaagggcctcgtcgtcatcgccgccgtcgcctacgacctgctctccaagaaaaagaaaggctgagctaaacctggcctccgggcccgcccggtggccacggggatggacctgagttccattcctcctccgaaagggacgctgttgcacgcagcgtcccttttccgtttgtcgcgatggatggatcccggtgtacgttcttcgcgaaatcagccctgacttggggtgtagacaatatgattcggcgatgtgcctcagcggatatgtacggccaatgaaaaacgggataccgatgtcgatatcccgctttcagcgaataggtaaggccagagcttacttcttcttggctttcttgacgcgcttgggagcgggagccgctttcttgggctcgaagaacggccacttgtgcaaagcccaggcgtgcagcgcgggaatcttggcaacggcgaagccgatgaccagaccgattaccatggcccaggtctccagatcatggcctgcgaccagcaagccgatgaacactatggcaacgatgaagctcaccatctgcgaggcctttgactgcttggcggtcaccagatcggccttcatgggaacgagccccagaaacaggccgcaaggcgcgcatatgacgcccagcaccacgctgatcacggttgacacggttgttacttccataatgttcctttgctgaagtgggatgattcgcttgattcgggcgaacgataacgatggttactggcgattagtggttggcggtgcatcggcatccgtggttgcgacgtcggtttcgacatcgtcatcggtgtcgtcctcggatccctcggcatctgcggtgtcggtatcggtaccgtcaggcgtatccgcggcgtcatcgttctccgcatcctccttgctgggttgacgccaccacaatatcaatgcgttggcggcgcagtagacggcggcaatgccgatgcataccaaaaagatgatgtttgaggtgctgatcatcgtgccatcggccattgcttctttggcggattgccatatccaaatcacgcatgcgacggcggtcagggcgtacagcatcatacgggagcggtcgttcatagaagaatctccagacttgttcaaacgacttgattatagccgtatttgtggattgcgtgggaaacgaaaaatgccgccatgtgtgcttcagcgaggagcgcggtataacagcggctcttcgcgatgcttgccatggcggcattcatcaggaatcgttattcagttgttatctcatggattgtgctggcagcgtatcagccgcgcgccttggcgtatgcctcgtacacggcttcggtgggctcgccagtctccacgccctcgatggtgagttgccaggtcagcggttcggcctcgccggacagcacccaggcggcctgacgggcggcgccgatggccacatattcgtcggtggccggacgggtcacgtccatgccgaggattgagggggccagcgtgcggatggccacggacttcgcgccaccgccaatgagcaggatgcggttgatctcggcacccagcgaacgaatcagctcgaggcagtcgcgctgggaacacagcaggccttcgacgaacgcacgagccagattctccttggtggtgttgtgcagggtcaggccagtcagcgaggcggtggcgtccggacggttcggcgtacgctcgccgtcgaagtacggcaccagggtgatgccgccggcacccggctcggccttaaaggccagttcggccagctcgtcgtagtccacgccaagggcggcgcgaccggcgtccagaatgcgcgaaccgttgatggtgcaggcaagcggcagataatgaccggtgcagtcggcaaagccagaaatcgctccggtcaggtcgtacaccgggttttcagcgatggccgcggccacgccggaggttccgagcgatacggacacatcgcccacggccatgccgaggcccagcgaggccatggcattgtctccgccgccggggccgatgatgcagccgccttcaacgtccttgccggcaatggcggggtcggccttgacggcggctgcctcacgcgggcccagcacggtgggcagcacaatggcgtcggcgtgggccttggcggcttcctcgccctcggcgggggtcagcaccatggcgatgagatcgcggcggtactcgtcatgcgcggcatcgtagtaaatggtgccggaagcgtcggaacggtcggtgaacagggcttcgagatgagcgtcctcgccctcggccaccgggccatagccggcgatacgccagctcagccaatcgtgcggcagacagacggcggcaatcttcttggcgttctcaggctcgttctcggccacccacgccaccttggtcagcgtgtaggaagcgacgggggaggatccgacggccttgacccagcgctgcttgccgcgggcggtcacgtcgtccggttcgtcgccctcggccggagttgcaccgagcttgtcgatcagggcggcggcctgcggggcggaactggtgtcattccagagcatcgcatcgcgaatcacgttgccctgcttgtcgagaatgaccatgccatgctgctggccgccaaccgcgagggccgcgacatcgtcaagcccgccggcctgctcggcggccttggtgaaggcctcccaccagaattccgggttgaccgaggtgccatccgggtgcttggcctgcccgaaccgaacctgttcgccggtggcggcgtccgtaatgcggacctttgttgattgagttgacgtatctacgccggcaaccagtactctcgtcatgcattcctcctcgatgagggtcgcgcttgcaagtttcggcgcgccacaaccaataagttagacgattaaactatactgtattgcagtgtatgattgcaaacggaaacacgcgaaggtgcgtatctggttcaatcgtttgacgcacaatatcattgtgcgatagacggatgtgagcgcctgtgcggcgttcgagactaggggtgcaaggaggtaggagcctatggcaagtctacgcaggatcaatcaggaggatctgcgcaaccataatttgtcggtggttctcgacactttgttgcgcgcggagaaacccatgagcagggccgacttggccaaggaaacgggcctgaccaaggccacgctttcgctgttggcctcgatgctgatcgatagtggcgtggtgcaggaaggcgagccggtcgtctccaccacatatgggcggcccagcacgccgctggagattcatggcgggtccatcgccggcatcggcctgcagatcaacaccgatggctacggttgcctggcactcgatctgaacggcgacactctcggtcaggagtgggtgagtgaggatatgaccggcactgacccgtacgagatcttcgccaagctcgatgcgatgaccttcccgttggaaagccgactcaaacgacgtggctgcaaagtggtgggagccgggcttgcgctgccgggcatcgtcaccgacgacatgtggctgttggtggcccgcaatctgggttgggaaaacgtcaacctcacccggttcaacgtggtacgccggctggatgtggtggccggtaacgaagcgaagatggccgccatcgctcagattccggggtatgccaccgaacgtgcgtccttcctgaatgtggtggatcgcacggattcctttatttacctgtctaccgatatcggcatcggcggcgcggtggtgcgtgacggcgaagtggtgatgggctcgcacggattcgccggcgagatcggccatctgtccgtggcgatggatgggccgttgtgcagctgcgggcgccacgggtgccttgaggcgtttgcgggccgtcgcgccttggtcgaggctgccggcattgccgaggatggggatgccaccagcagcgaggccatcgatacattcctccagcgttggcgtgcgggggatccagacgtggccaaagtggtcgatcaggccgctgatgcgctggtttccgccatcgcttccgccgtgaatctggtggatgtcgatacggtgctgttgggcggactgtggacgcacttcggcgacgagctggccaccgtgcttgaaggccggctgcgttcggaaattctgggatacccgaatgtgaagatccgcgtgttcgtgccgccggtggcgctgcatccctcgctatatggcgcggccgaaatgggcttgcgacggttcatcgagaacccgttggggtacatgggggagaagtagcgccgggagatgccgcttgttgtgctggcgggtgcatggcatgggtgcatggcgcgtgtgccggcgttgatgggttcatgctacactttgcaagttggctgttttacgcagcgaacgtggggccgtagctcagtcggttagagcatgcgactcataatcgcccggtccagggttcaagcccctgcggccccactcttttgcgtcgcctcctgcggcggcacagcgcgtcttcacgtccagataggcgcgtacaatcccttaggttccggttcacgtcctgccataggggcatgacgacccgggtcccccgaatccataggagacgtaaaatgcagcagggtatccatcctgattaccaccccgttgaggtgacgtgctcgtgcggcaacaccttcgtgacccgcaccgctggcaaggaagatcacatgttcgttgacgtgtgctctcagtgccacccgttctacaccggcaagcagaagattcttgacaccggtggccgcgttgctcgcttcgagaagcgctacggcaagaagagcaagtagcatacttcacgccagtccgattcgattcggcatgctccggcatacccgatcgaggactggcgtttttgtattctttgacaagttttgttgcagcattgacctgcgcaattgaataatcgaacagaacagcaccatacagaagaaagtgtgttatggcagacgaacagttcccggcggcggcaaccgcgcttgaggagtaccagtccatcgaagaacagatggcgagccccgaagtcgtgtccaacccggacaagctgcgcaagctgggccgtcgtcacgccgaactgggtgccatcgtgggcgcctacaaaacctggttgcaggtgaaggacgatctggcagccgctcaggagatggccggcgaagacgccgacttcgccgaggaagccaagcgtcttgaagccgaactgcccggtgtcgaagagaagctgcgcaccgcgctgatcccgcgtgacccggatgatgcgcgcgacaccatcatggaaatcaaggctggcaccggcggcgaagaagccgcactgttcgccggcgacctgctgcgcatgtacacccgttacgccgagaagcgtggctggagcgtgaacgtgcagtccgagaacaccaccgagctcggcggcgtcaaggacgtgcagattgccatccgcgccaagggcacgcccgctcccgaagacggcgtgtgggcttcgatgaaatacgagggcggcgtacaccgtgtgcagcgcatccccgtcaccgaatcgcagggccgtatccagacttccgccgccggcgtcatcgtgttccccgaagccgacgaggatgacgacgagatcgagatcgatccgaaagacctgaaaatcgacatcttcatgagctccggccccggcggccagtccgtgaacaccacgtattccgccgtgcgcatgacccacctgcccaccggcatcacagtgaacatgcaggatgagaagtcgcagatccagaaccgcgccgccgcgctgcgtgtgctgaagtctcgcctgctggccatgaaacatgagcaggaggccgccgaagccgccgacatgcgtcactcgcaggtgcgttcgcttgaccgctccgaacgtattcgcacgtacaacttcccggaaaaccgtatcgtcgatcatcgcacgaattacaaggcctacaaccttgacgccgtgctcgatggcgacctgcaggccgtcatcgattccgacatccaagccgacgaagccgaccgtctggccaaccagcagtgatagccgacctgattcgtcaagccgccgcgcagttgcgcgaagccggcatcgagacgcccgaacatgatgccaaactgttgctggccgaggccgtggacgctgagctacgcgatatcgacaaggccatgctgatgggggagggcctcgattcgctggcccccgccggcgggggctgttgcgcagcgactgggggtggtcaggccgaccccgtcaccaatatccttgccgccttccacgccatgctttcccgacgcgccaaacgcgagccgctccaatacatcaccggccacacgcctttccgctacctcgacctgcaggtgggccccggcgtctttatcccgcgcccggaaaccgaaaccgtagtccaggccggtcttgactggctgacccggcacagcatgatccacccgcgcatggtcgacctgtgcgccggttccggtgccatcggcctgtcgatagtcagcgaagtgcccggcagccaagtatgggccgtcgaattatccccgcgtaccgccgaatggacccggcgcaatctggcggtaaccgcgaaacgatacccctccatcgcctccaattaccaactggaagtcgccgacgccacgtcactggccacgctggcgcaactcgacggcaccatcgacatcgtcatcaccaacccgccctacgtgccacaaaccgacatccccgaacaaccagaagtacgcgactgggacccggaactggcgctatacggcggttcggcagacggcacgctcatccctgaacgcattattgagcgcgcctggcgcctgctcaagcccggcggcgtattggttatggagcatgatctcacccaaggcgagcgattagtggcctatgccaaggccacaggtttcgccaccgcctccaccggcaaagattggatcggccgagaccgctatctcttcgccgagaagtagccacaggcgcggggccgccgctgctactgcgcgtaatactgcagggcggaggcgtccgcgtccgtgatttcgcgaatcggacgggccggattgcccacggccacggtgtgcggcggaatatcgcgcgtcaccaccgagccggcaccgatcacgcaaccctcgccaatcgtcaccgggcaacaatccagcacagtgaagttgaagttggcgaacacgcgctcgctggcgcgcggcatacgcagttcgacgggaggcatggtggtggattcagcattgattccgctcattgaacactcctgtaatttcgcgaaagagcatggatgaactcattgtatctacggtctgtgcgtatggggcgaatcggaaaacagcagtacggcaaacgagcgatgatgaactatgcaagtcggggcgcaatggtgcaatggtagattgtgaatacacaggcgaacggaggtgtcgtgagcgtggagggcggaacaacgctgaaagtcacggatgaatcgctggcacaagcggcgcgtgtcatccgggatggtggattggtcgtcattccaacggatacggtatatggagtggcgtgcgatccgcgtaataaggccgccatcgaccgtatctaccggctcaagcgtcgcccacgctataaggcgttgcaggtactgctcgcatccaccgaccagcttgatgaactcggtctcgacctgccgtctccactgaatcgtttgtcggcggcgttcctgcccggcgcgttctcgccgattgccgtagcccggcccgactgcacgttggagactttggccgacaccgccgatggtcgccccggcacgcagggcatccgcatccccaattcggcgctgtgcctcgcgattctcaaggccactggtccgctggccgcgtccagcgccaaccgttccggcgacgaaagcgcacagactgtccaggaggcggttgacgcgttcggcaacgaagtcgacctgtatctggacggcggtcccacccaaggccatgtctccagcaccgtcgtcaaagccgatccgtacgcgcgcgacggcatcgagatcctgcgtgaaggcgtcatcgcccaaaacgtgattcgcaaggccctccacctcaacggcgggggactcggcgcatgagaatctacctactgattgccgccatcgccggtggcgtcacctggctggtgactccgctgattcgccacgtcgccatcgaaatcggtgcggttggcgaggtgcgtgcccgagacgtgcacaccattcccacgccgcgcatgggcggccttggcatgctgatcggttttgccgtggctaccgtattcgccagtcggctgccttttctctcgggattgttcaacggcaattaccagatgtgggtgattcttgccggcggcatcatgatcagtctgctgggcatggccgacgacctgtgggatctcgattggatgctgaaactcgccggccagctgctgatttccgtattcgtggcttggggcggattgcagatcatctcactgcctttgggtggttcgctgattaccgcctcgccgagtctgtccatggcgatcaccgcattcctgatcgtcgcctcgatcaacgcggtcaatttcgttgatggcctcgatggtttggcggccggtatcgtggcgattggtggcatagcgttcgccgcctattcgtatatcatcgcccggtcttccccgagttatgcttcgttggccacgctgatcgacgtgatgatggtgggtatctgcgtgggcttcctgttgcataattggcatcccgccaaactgttcatgggtgattccggttcgatgctgcttggctatctcatcacctgcgcttcgattgtgatgaccggacgtcttgacccggcctcgattcatgccagcatctatctgccggtgttcatgccgattctgctgccggttctggtgttgttcctgcctgtgctcgacatgtgtctggcgattgtgcggcgtttggccaaaggccagtcgcccatgcatccggaccgtatgcacctgcaccatcgcatgctgaagatcgggcattcggtgcgtggcgccgtgctgattctgtggggatgggccgcgttgatcgcattcggttcgctgacgattctgttcttcaaagcgcagcacgtggccgtgggcatggccatcgctgtggtggtgctgaccatagccacgatgtacccctatctgcggcatcgtattcccgagatccaagccgagaacctgacgttcgaatccgcacgtaaaaacgcgcagcatacagtgcctaaatcgcagtctgcagtaggggagagccgggattcgattggctctcaggcagcggattcgatgactgattcgcctgcaaattcgcgggactcgcaggtgggtgaggtgcaggacccggcagcggataagtgagcgctcacaagcgtgtgtcgtgaaggtcagcgcattttcatatagtgtttacatggctacaaaccttgatgaattaaacgcccagtcggcgtatgctccccttcccccgattttcgccaagctcggccttgcctatgacgatgtgttgctgttgccgaacgagacggatgtcattccctccgaagtggacaccagcactcatctgactcgcaagatcgtgatgaaggccccggtcctctccgctgccatggataccgtgaccgagtccgagatggccatcgccatggctcgtaacggtggcatcggtgtgttgcaccgcaatctgtccatcgacgaccaggccgctcaggtcgatgtggtcaagcgttccgagtccggtatgatcaccgacccgctgaccgtcaaccccgaggtcacgctggccgacctcgacaagctgtgcggcaagttccacatctccggtctgccggttgtggacaaggacaacaagctcgtcggcatcatcaccaaccgtgatatgcgcttcatcgcctccgaggattacgacaccctgaaggttaaggatgtcatgaccaaggagaacctggtcactggcccgtccaacatctccaaggacgacgctcaccgtctactcgctcagcacaaggttgagaagctgccgctcgttgacgaggaaggccacctgaccggcctgatcaccgtcaaggacttcgtcaagaccgagcagtacccggacgccaccaaggatgagcagggtcgtctgcgcgtggccgccggcgtcggcttcctcggcgacgcctggcagcgtgcctccgctctgatggaggctggcgtggacgtgctcgtggtcgacaccgccaacggtgaggctcgtctggcactcgacatgatttcccgcctgaagcacgactccgccttcgacggcgtgcagatcatcggcggcaacgtcggcacccgctccggtgctcaggccatgattgaggctggcgcggacgccgtcaaggtcggtattggccccggctccatctgcaccacccgtatcgttgccggtgtcggtgtcccgcagctcaccgccgtgtacgaggccgcccaggcctgccgtgccgctggcgtgccctgcatcgccgacggtggcatccactactccggtgacatcgccaaggccctcgtggccggcgcctcctccgtgatgctcggcggcacgctcgccggctgtgaggaagccccgggcgagaaggtgctcctgcacggcaagcagtacaagctgtaccgtggcatgggctccctcggcgccatggccccgcgcggcaagaagtcctactccaaggaccgctacttccaggccgacgtgacctccagcgacaaggtcgtgccggaaggcgtggaaggcgaagtgccgtaccgcggcccgctgaacgccgtgctctaccagatgctcggtggcctgcaccagtccatgttctacatcggcgcccacaacatcgccgagatgccggagcgtggcaagttcatccgcatcaccgacgccggtctgcgcgaatcgcacccgcacgatatcgtgatgaccgccgaagccccgaactactccggcttccacaacaactgatcggttgatgcccgctagcttgcgctagttaggggttgattccttgtgaaaagggtctgcttatgcaggcccttttcgcgtatgtggctcgagatagcttgtatgcgctggggtatagtctgaactgttctgcataagcgatgaccagcgaagaaaagaggcacaccatggtcgacagccatgacgcggaaacgtacagcgcgaaggactcgcgcctgatttggatcgattgcgagatgaccggacttgacatcttcggcggcgacgaactcgtcgaggtgtctgtggttcccaccgactttgacctgaatgtgctggacgagggcgtggattacgtcatcaagccgtccgagaaggctgtgaaccacatgaacgatttcgtgcgccagatgcacacccgttccggcctgatcaacgagtgggagaatggcctgagcctggccgaggccgagcagaaggtcaccgaatacgtgctgcgcttcacgccggaaggcgtgcgcccgctgctggccggcaacaccatcggctccgacaagaagttcctcgaccactacatgccgggcctcatgagccacctgcattaccgcagcgtggacgtgagcaccttgaaggagctcgcccgccgctggtacccggccgtctacgagaaccgtccgccgaagaacggcggccaccgtgccctcgccgacatcatcgagtccttggacgagttgcgctactaccgtaaggccttcatggcccccgtccccggcccggatgatgccgcctccaaggccatcgccgccgacatcgtggccaccagcattctcaataagtagtctgccgtacttggctcccctccctgaggggagtctagagaggttgatatgcgccaaaccgaagccctagccattctgaacgccggcgcgaacgtgtttctgaccggtgcgcccggtgccggtaagacctatgtcttgaacgagttcatccgccaggctcgggccgacggcgccagcgtggcagtcaccgcgtccacaggcatcgcctccacgcatatcaacggccaaaccatccattcgtggagcggcgtcggcgtggccaccgccctgagcccgagtctgctcaaactcatcaaatcccggcgcaaacgcaagattcaggctacggacatcctcgtcatcgacgaggtctccatgctgcacgcatggctgttcgacatggtcgaccaagtctgccgcgaagtgcgtcgcgacccacgcccgttcggaggcatccaggtcgtgctgtccggcgacttcttccaactgccgccggtttcggtgtccgggcgcaaccgcgacctcatcgcccccacccccgaattcatcgccagtcgcgaacggtatgcccgtgccggcttgaaccccgaaggcttcatcaccgaatcgctggtatggcccgaactcaacccggtaatctgctatctgaccgaacagcaccgtcaggacaccggcgaactgctgaccgtgctcaccgacattcgcgaaggcgacgtgacccagtccgaccgtgacgtgctcgtcacccgtctgggcaaactgcccgagcccggccaggtcgccgtccacctattcccggtgaaccggcaggccgacaatctcaacgacatgcgcctgaaccagatcatgcttgagccgcacgagttccacgccgagacagcaggccctgccaacctggtcgaccgactcaagaagaacatgttggcccccgagcgactggtactcaaggaaggcgcggctgtcatggccctgcgcaacgacaccgatcgccagtacgtcaacggctcgctcggcaccgtgcgcggcttcgcgcaggagaacaagggcggctggccgattgtggaattcgaaaacggcaacatcgtcaccatgaaacaggccacatgggaaatgatggacggcgacaccgtgctcgcctccgtctcgcaggtgccgttgcgttgcgcgtggggcatcaccatccacaagtcgcaaggcatgacgcttgatcgtgcggtcatggatctgaagcgcaccttcgcgccgggcatgggatatgtggcgttgtcccgcgtcgaatcgctgggcggactgtatttggctggcgtcaacgaacgcatgttcctcgtctcgcccgatgccgtggtgctcgacggcgacctgcgcgaagcctcggcctcggcttccgaccagttggccgatgaaggtgcaagcgcgttcaaacccgccgagccggacgaattcggtgtcaatcccgatgatgacttcgcccaggacgcgttattctgacggtcgatatatcgaacgaccgctaatttgagtgtttctgcacttcgaggggcggattttgagttttcgggacatctacttccgtttcaaggggctgatgtccaagtagacagcgcttaaaaacggcggaatgacgttggtatgaagccgtttctatgtgcgattgagcggatgaccagcccctcgaaacgcaagtagatgtctccaagaggcggaatcggccccttgaagccgaagaagacactgcgaacttgtcttcattgaggaactgaacggctaccatggaataagaggtggtagttatggtgctatccgagatatttcgtggaaacaatgaggttcgcgaggccgcccgggccggtgtgcaaatcgatacggttagtgtggctagtgcgtcagatgcagcaagcgcggcagacggcagcggcaaaatcactggcgcaatacgtccgccagcggtggctggttcgttctaccccgctgaccgcacaacgctcaagcaactcattacccatcaattggattacagtcgagaggttctgcaacagttggagcccacgcttccagcgggagtgccaaaggctgtaatcgtgccgcatgccggttatgtgtattccggcacggcggccgcgcttgcctatgctttgctcgaacgagggcgggggagtgtgactcgcgcggtaatcgtgggaccgactcaccgtgtggccgtgcgaggcgtcgcctgttccacggcagcggcgtttgaaacgccgctgggcactgtgccggtagacattgcagccgagcgtaaggctctgggcctgtctgtcaatgagccattgcgctccggtacacatgcccgtccgggcgcgtcggctcccgcaatgatcgtcaatggcccaacccacgcacaagaacatgcggtagaagtgcagattccgttcctgcaaaccgtgctcggcccagacctcactattgtgccgttgaacgcgggcgatgccacgccacaagaggcgggtgatgtgttgcgtgctttgtggggtggcccggaaaccgtcatcgtgattagttcggatctctcgcactatcatccgcacgaagtcgcccgcgcgttggatgaccagaccattgcggacattgcggctttgcatctgccgattcaccctcgccgggcctgtggcgcatacccgatcaacggccttctggatgtgctaaaaggccgcaaggacatgaagctcttcgagctcggctgttccacttccggcgacgacggcgtggtggcgcttgccggccaacctcgccccgcaatgcgagacgccgacgagccggtagtgggatatgtctcgtttgccgcgtgggaatccaaaccagaagcagatgctccagccggtgcagatgacttaggcgaatcgggaacagcccatggtgatgtgctgctgaaactcgcccgtgccgctatccgggaacggttgcatatcgagcatccgaccgccgctgattcgaccgcgtccattcttgccgcaaacccatggctgaacgagtccggtgcctgtttcgttaccctgaccgagggtggccggctacgcgggtgcatcggttcgctggccgcccaccgctcgctcggcaaggacatagctgcacatgcggtggacgccgccacccgtgacccacgtttcaacccggtcaccgccgcggaatacccgttactcaatgtggagatatccgtcttgggcgagcccgagccgattaccgtgaactcctgtgacgccgattcgcgcgataccggctcgaagaccgcgactctggcatcgctgcaatccggacctcagaccgacgccgtcaaacgggacggcagcaacgtcgaacgcccggtacgttcgcgcactgaacttgaggaagtattacgccccggcaaagacggtctgattctcgccgaccgtcgtggccgcagcgccacattcctgccacaagtgtgggatgagctgcccaatccgcacgatttcgtcgctcacctgctcgccaaggccggtatccgcccgtcctacgactggaacgatggcgaaatcgactgtcaacgctacgaggtgaccgcctatgccgagcactaacgcagcaaccatgtcccctcccgctggcgggaggtggcgcgaagcgacggagggtggtcaccgagaatcagagggtggtcaccgggaatcgtgcggtcatacggcgtcagtcacagatgttcgtaaccccgccatagcccgctggcaaacgcaattccacgacggtaccaaccgcgctcgctgcgaactatgcccgcgccgctgcgtcctcaagcccggccaacgcggcttttgcttcgtccgctcaaaccacgacggactcatcgtctccgacacctacggccgcagctccggcttcgccgtggacccagtggagaagaagccgctcaaccacttccaccccggttccagcgtgctgagttttggcacggctggctgcaattccggttgccgattctgccagaattgggatattgccaaagcccgcagtttcgaccggctcggcgtggaagccagtccggagaaaatcgcgcaggtcgcggccgaccggggcatcgattcggtggcgttcacctataacgatccgatcgtgttcgccgaatatgccatcgacacggccgaagcctgccgagcgctcggcattcatcccatcgccatgactgccggatacatgagcgccgaagcccggcccgacttctacgccgccatggacgccgccaacatcgatctcaaaggcttcaccgaagaattttattggaaagtgaccggcacgcatctggccgatgtgctcgaaaccatcgactatgcggtcaacgaggcacgcacaccagaaggcgaacacgtgtgggtggagctcaccacgctactcatccctggactcaacgatgacgacgcccagctgcatgctgaatgtacatggatacgcgagcacttgggtccggacgtgccgctgcacttttccgcattccactccagttaccgcatgatggacgtaacgcccaccccgcacgagactctgacccgcgcccgaggcatcgccctcgaagagggactcaattatgtgtacaccggcaacgtgcatgatcgtgaaggcgataccacatattgcccaaaccctgaatgcagggccaagctcgtggaacgcgattggtatcgaatcattgccaaccgtttatctgccggatacagtggcaatgggcactgccccgtatgcaggactgctatcgccggacgttggtaatctgcctcaggtcgcccgcgcgatttagcgcagatcgccaatacgcgcggcgatcgtcctcatcgatttgaggctcgcctcatagcgcgcggctgccacaatcagaatgatgccgcccaaagcaagccacacccaccggtagtggcgggagaattcggcccgccatggccacagcacagtcaccgtgctgacgataagaatcaccgtgccgtagatcaacggtgcttgcagcaaacgcacacccacaatcagcgcggccgctccggacaggccgcttgttccgggaccgacataggcgattgcgcaaatggtggcatggccattggctgttgcgataccggttgtcgcggaactgccgttgggaattgcggggttgcagcagaaaattgcggggcccatgctgggccggttgatacaccggttgctccgcgggttccggctgattcccctgttgctcggtcggctgcgtcatcgtgccctcctacccttctagccatcattgttgtacgaatgagtccgaatgccaagatgaaggccggaatagtgcgaatagcaggcgggcttgtcggttcacgcgaatatcttggaacacatgacttccaatacccttcgtatgtcaaccatgttcctgcgcaccctgcgcgaggaccccgctgatgccgatgtcgattcggccaagctgctgcagcgcgccggctatatccgcaaggccgcacccggtatctggacctggctgccgctcggtctgcgcgtgctgaacaagatcgaggccatcatccgcgaggagatcaacggcatcggcgcccaggaagtgcacttcccggccctgctgccgcgcgaaccctacgaggccacccatcgctgggaggagtacggcgacaacatcttccgtttgaaggatcgccacgaggccgattacctgctggcccccacccacgaggagatgttcacccttctggtcaaggacatgtactcctcttacaaagacctgcccgtcaccctgtaccagatccagaccaag

SEQ ID NO: 2601 - DNA, 18720 bp, Unknown
  R222_15m  MAG No. k141_13162
aatcgtcgcggcgaactgcagcgggtgctgagccgcgaggaatcatatgtagacggcaaactcagccgggcggcgttcatctccatcgcgatattgacctttattaccttcgtgggcaacttcacgcagttgcagctgagttccgcgctgccgattatcgtttccgaattccacatctccgtaaccaccgggcagtggctcacctccgtgttccagctggtcatgggcgtcatggtgccgctgaccgcgttcctgacccgtcgtttctccacccgccagattgtaatctgctcgatggcggtgttcacggtcggctccctgctggcatggttggggccaaacttcgtatgggtgctggtcgggcgcgtgctcgaagctgccggcacgggcgtgatgtggccggtgctgcagatcaccgtgttctcgatctacccgctgtcccgacgcggctttgccatgggcacggtgggcatggccatgagcgtggctccggcaatcggccccaccttgggcggctggcagaccgacgccaatggctggcgttccatcttcctgaccatgaccgtgattggcgtggtctcgctggtggcggccatgttcggactgcataatttcggctcgcatgacccgtctgcccgcgcggactttttctcggtgagcctgtcggtgattggctttggtgggctgatgttcggcttcaccaattcggagacctatggatttgcggcaccggtcacgtgggggccgatggttgtgggactggtcggcatcgtgtggtttgtgatgcgcaacctgcgtcacggtcggcggtatcgcgaagccaaggcggcgcagtcgggagcggagccggccgcactcccccagcctccgctgctggaccttgaggtgttgaagaatcggtcctttaccgtcggcaccatcacggcgtctttggcgttctttgcgttcagctcgattctggtcatcatgccgctgtacatccagaccgaccgtggttactcggccaccatgagcggcctgatcatgctgccgggcgccataggccagtgtgtttcccaattctttggcggtcgtgcgatggatcgtttcggcgcgcggcccgtggcgttgtgcggctcgattgtgctgaccgtcggtacgatcggcatgtctttggtgtctatggatacatggatttggtgggtgtcgatctgccagttcacgcgccagatcggcatgggattcctgcttatgccgattaccacatggtcgctgaactgcctgaacgggccggatgaggtgtctgccggatcgtcggtcacgaacaccgcgcggcagatcgcgggcgccgtgggtgcacctgtgctggtaattcttatggaaacgttcgccgcatggaggcatcaggcgggagtctcagccgttgcggcttccatcttcggcatccagtgggcgctgcgattctccgcgctgctgtgcttcgcgatggtgttgatggtgttcttcggcgtcaagggcgacggtgccggtcgtacgcgagacattatttccctgcgttcgctgcgtgaacggcgtgcgcggcgtatggctgcgaactgacggcagattcaaccattctcaacataataagaagccccggtttccaacaccggggcttcttattatgttgtgctatcgcaggatttcagctggagtctattacgccctgcccattagcgtcaggacaatcagcagcacgttcaacgccacaatcagcgccacgacgatcatgaagatcacgtgcttgacggttccatcagcccacttgcccatgagttccttgttatgcgtgtatcgcatcagcggaatcacggcgaacgggatgccgatggaaagcaccacctggccgatgaccagcgcctgagtcgggtccttggcgaaccacagcacaatcagtgccggcaccagcgtgaccacgcggcaggcccacatcggggcgttgacgtgcagcagaccgtgcatgatctccgagccggcgtacgtgccgaccgatgtggagctcagcgacgaagccagcaggccgatggagaagatcgtgccgatcaccgggccgagcacctgcgtgatcgcccgctgtgcgccgtcgatggagtccgtgccagacatgccatgcagcgagttggcggcgagcaccagcatcgccagattcacggtgccggccagcaacagcgcccaggccacatcgattttcgagcctctcagctgcgttttgatcgacggcttttcgccgcctgcgtaatggtcgttcaccagcgtggagtgcaggtagatggcgtgcggcatcacggtggcgcccagaatcgaggcggccatcaacaccgagtcggcgccttggaagcgtggaatcatgcctttgaccacttcgccggggttcggcggggctacgaacagacccgcgatgaagccgaatgtgataatcagcagcatcacgatgatgatgcgctcgaatgtggtctgtgtcttgccgccttggaaccacagcatcaccgtggagattgtgccaatcgccaaaccgccgatgaacagtggaaatccgaacagcaggttcagggcgatggcgccgccgatcacctcggccagatcggtggcgatggcgatgacctcggcctgcatgaagaacatgaagcggccggcatcgctcatacgctcgcccagcagttccggcagggatttgttggtcacgatgccgagtttggcggactgatactggatgagcacgctcatggcgttggcgagcaccagcacccacaccaacaggtagccgtatcgtgcgccggaggtgatgttggccgccacattaccaggatcgacgtaggccacggccgccacgaacgcggggccaaggatgctggccagcgcatggtcatgcggctttttcttgttgttcgtccctgctccggccccggttccgactccggcaagctggcgttccttcccgatttccggtgtttcctgttcgatgtctgccacagcgttcgtcatagtggttgccgcagtggtatctgccacggtgtgtgttactgccatattgtttgtacctgttcccttcataccgcgcacagttatagcgcaggcatgtttcccgagtcaacagacggacaatctgcggacgattgatggatgaccggcggactggcagctggcatttcccgccatctcgctcatgaaatgtgaaaaaccgccgaaaactcgctcatgaaatgtgccagacggtagaaaactcgctcatgaaagtgtaatatcattgatatagcagtaattcggaaaggggctcctcatgtatctcaaacgcaaagccgatgcctatctcaatgcatggaaatccgacccgaatcgctccccgctaatcatcaagggccctcgtcaagtaggcaagacagagactatcgattactttgccgcacacaactaccgttcggtagtggaaatcaacttcgttgaggaaccgaaatatcgtgcaatcactgcggacggttatggcgcgaataccatcgtccgcaatatttccctgatcgacccagccaaaaagttcattccgggcgatacgctcatctttttcgacgaaatccaggcccatcctgatatcgccactgcactgaagttctttaaaatcgacggcaaatatgatgtgatttgcagcggttcaatgttgggcatcagctataagcaaatcgaaagcaatagcgtgggatataagaccgactacgaaatgcgatcgttggacttcgaagaatttctgtgggctcgcggatacgatgaggccgtcatcgaaagcatgttcacccacctgtgtgatgctacgccattctctgaagtggaaatgaacgtcttctccacggcatttatggattactgcgtgcttggcggcatgcctgcggttgtcgcctcccatatacgcactggcacgttcgagggaacactgcaattgcagcgccagcttattttggactaccaggaggatatccgcaaatacgcgcaaggacccgatcaggcacgaattctcaacgtgttcaaccatattcccgtgcaactcgccaaggaaaacaagaagttccaaatcagcaaggttgccagcggagcgcgtttcaaagactatcgaggatgcgtggaatggcttgaaacctcgggaatggtgaatatctgccgatgtatgtcctatcctgaactgccgttgaaaggcaattatgacgaaaacaagttcaagatatatttcggcgataccggtctgttcgtagcgatgcttgacgacgaggccagtgatgatctgcgggccaatcgtaatcttggcgtctataagggtgctatgtacgagagcatcgtctctgaagcgctacggaaatccggctatgacctgtactactacaaaaaagaggattccacactggaacaggatttcttcgtccgcacgcgcgaatggctggtgccggtggaggtgaaatcgaaaaaaggcaccgccaaatccatgcggacgctaatcgcttcggattcttatccggaaattcagttcggcgtgaaactatccgccggcaatatcggtagcagcgaacacgtgttcaccgcaccatacttcaccacatttttgctccgacggctcctgcgcgcttatgacgaggggcaggcacctatgctcaacaatcctgagcggtagcccctattcgtctgcgggcacggcctggcccgggcaggtatggaggacggcgagcatggcgtccttttcttgggaggtgacggtgagctggtacttgtctttgacgccaatctggcgggccacgtagtcgcaacggtagtcggcgttggtgggtagccagtaggcggcggaagccgaacccttctcctgattggccggaccgtcgacggccagcaggttataggggtcattgccgaattcatggcgtttggcagtggaccagtcgtgcgcaccggattgccaagcgttttcaagggccaccacatggtcgatctgcactttggcgctggtggcgcggccacgtacgaaatggatggtctgggcggtgtacggatcggccagtgtgccggactcgaccacacaggaaccggcgtatttgtaggtgatgtccgtgagatcgcgggcgagcacgtcgtcgcgtacgtcgcagccattgctgtcgacgtcggtggtgcggaaaccgaaggaatcgcggtcgtagccggaggagctttggttgtcgtctacggcgagcgcgttcaaagtgtcggcggctgaaccggtggcagtgtagccaccggtgattttggccacgtcggagctgacctgcggcagtaacaggccgatggtcacgccgattgctacggcgagaacgatgagaatcagcacgcgctccagcggtccagaggcgttgaaacgacggcgaaagtgggcgttacgacgtgccatcaatcacgcataggtgaaggtgagggggtcgtggccggcgcgggtggggccgtcgagggcgtcgatggcaccgtgttcatcggcggtcagggcgaagccgaacaggtcgagattctccctctgacggtcggcatgcacggacttggggatgatgatcgtgccgttttcgatgtgccagcgcagaatcacctgggccgggctgacctcatgggcggcggcgatcttctcgatggtgccgtcgccggcgttgaggtcggcgccacgcgccatcggcgagtaggcctccacggcgatgccgtgcttcttgcagaacgccaccacttcgcgctgctgccacgtggggtgcagctcaatctgattgacggccggccatgcgccggtctccccgtgcagacgcttcagatcggcgggcatgaagttgcatacgccgagcgtgcgtgccatgccttcgtcgcgcagcttgacgaacgccttccaggtgtcggtgctgcgccagtcgaacggcgtgggccaatggatcatgtacatgtccacgtaatcgagctggaggagtttcagggagttgtcgaatgccttgagcgcggagtcgtagccctgctcggagtcgcgcagcttggtggtgacccacagggtctcgcgcttggcgccggtgttgtatccggaagcggcgagcgcacgacccacgccggcctcgttgttgtatccggcggcgccatcgatgtggcggtatccggcttccagcgcagattcgacgacaggggccacgccctcgtcatcgatacgtagcatgccaaggccgacctgcggaatggaatggccgtctttcaaggcgatgtccggcacgttggcgggattgatgtgtccgttggtcatggcttgtgatgctccttcatgtactgcaactacacgccactgtacacggttatgcaggcgatgtgcgggtgctgcaaccaaacggcatgattgcgcccggccttccgtgtgggagagccgggcgcaatcatgacaacatcacgctctactcctgcgaccggccctcgccctattgttcccgggcgcgaatttgccccggtacaggcgtcaatcgattgacgtttgcaccggggcagaaatcgttgtcccggtacgcaatttcgggccattttcgagaaccaggacaagacaatccccaaagtccacataccccgacaaacagaatcggcggaatacagccaatcccgaaatcaacatactgtcccggttctcacgtagaacgattgacgtgcaaaccggggcaacgggaattgtcccggtacgcgaaaaacacccgttttcgcaaaccaggacagtgatttctgtcctggtacccacatcaaacgattgatgcacgaaccgggacagaatcgcatcgctgcgccgagacagacgcatctgacagccgacaaccgataaacgacagccgacagatggcatctggcagccggttgccggctgccggcaaccgcatcataatgccgcatcagtctctatcaggagcgcttacgacgcaaagcaagcgagaccccgccggccacgccgagaacgacaaccgcaagacccacggcagtcaccgcgctaccggtattgctcagcacaccagtgatcttgtcgccattcgcaccgttggtcttatcgccctcgcccgtatcgggattgatagtagccccgccattacccgcaccgtccgagccgttgccggaaccaccttcggcccgagcggtaaccgcaaccgtataggtttcggtgacattcggattcgacttgagcgttacggtaaccttcgccgcatcagcgggagcggagaaatcgtaatcgagcgtgaactggtcggcggaaagcgtcacgttgcccatgcctgcggaatagttgcccacgaccttgagatcatggtcggcatcgatggcatcgcccacctgataggtggttttgcttggcgtgacggtcagactggagacctccttttgggcgaggccggcaatggtctgcgtggcggagaaactgtaggcatcggatgcccaaaacttcagcgcgcgcttgccgtcggcggcgttgccactgtcttcggtgatggacgcaccggtgccggcaatggtccagttcttatcattctcagcgttctcgaagctgccgtccgttacgtaatccttggcgggagtggcggtgacggtgatggtgacggtcacgtcgtggccagcgttggtggtgccggtgatggtgtatgtgcctgcgccacgaatccagtcaagcgcagcggattgccaggtcacggtttcggtctcgtccaccccatcctgatagtgtacggccacctcactcggcaattgcgctttgatcgcgtcgatggaatccgagtcagtcgcggtaatctccactggatctatcttggtgaacacatgatcggtgacggcaccggtgtgaatgtacttgaacgtctgcagagaggcgagcgccttgccgccggtgcccacgggcacccatgcgagctcccagtagaacacacccaggccgtcgttttcgccatcgccatcattgtcgccgatattgttcacggcctcggcgaccgcgcgaatctcatcggcctggccttgcgggctgatgtcgtatttcttgaggttatcggcggttactttactgggcactgtgttggaatcgtcgtcgccatcatccaaggtgtatgcccacgacgtttccgccatggaacaccggcaacaacgtgctcgcgtggcatggcgtgtactggcgacagtcaccacggcgaccccgccatggaacgtggcacaaccatgcgggggacgctctatgtgcattcagtcatgctgccgatgctctttaacttgcatatccacgggggcggcacgaggcaattcggccgcctttacccgtacatccatggggcggcgaaaatcccatggggcggtaacttgcccatggggcggtcggtaaaattttaccttccgcagaatagagccattttcagctaccgccccatgagggattcaccgccccatgaggaaatcaccgccccatgggacatctatataacaacgacttcgtgcagcagcaccagcattacagcaatgtcgttcagcgtgtggaggcgcgggcgatgacctgggattcggtggtgagcagttcggacttggtgatgctgccgtcgatgcgtccgaggatgcgatccactgccgtgggagccgtccagtcaaggcgggaatccatggtggtcagcggaatctgcaggtagggggcttcctcgttgttatcgaagccgatgacctgcacctgcacgggcacctcataaccagcggtgcgcagagcggtcaatgcgccgatggccaactgatcgttcaaggcaatcacaccgtcgaatggcacgccggaatcaatgagccgctgggtcacacgggcaccggctccgatggtccaatcctgatcggtggtgccaatcagctgcgaatccaaggagagcccacggcggcgcgtttcctcaatgatgccgcgcagacgcagctgcgcgttgccttctacggcattcagcaatgcatcttcgtcgtaaacgtcacgggcgccgatcactgcaagtctggtggaaccgcggtcatacaggtagcctgcggccatggcggctgcggatacatcgtctggggtcacgtgatccacaatgccccacgtggtacgcgcgccaacgatgaccagcggaaaatcaaccttcagatcatcgggcgaaatgttttccacctcgctcatggaaaggatcatgccatcggacaccgtggagttgaacttcttcagcagatcgcgcgcgcctttcgcggagccttccgcatacgtggtgacgtatacggaatagtcgcgctgacgggcggcctcgatggtgcggttggcgagctcggccagatatggcggaatcagcgaaggcacggcgagggtgatgaagccggtgtgatcgcggttgaggttgcgggcggccacgttgactcggtagtcgaggtccttaatgaccgactcgaccttggcacgggtctcatctgtcatacgcccggagccattgatcacgttcgacgcagttttgagcgatacaccggcggcctgagcgacatcgcgtagcgtcactcgacgcttggctgttttctcgtcgctcatgccgcactcctctatccggacaacattgccattctagcgcggtttagcaggacgttttagcgataagaatggcgttgcggttcagcgtatatccaacggcgtcagtctcgcaacggtgggcgatgatgggatcaccttccacaccgttgatggcgacgggctggtttgagcggttgaggtagaaatcgaagcgggtggagccgtctgcggatcggcggatggtgtgcaggatgcggggatctgtggtgggataggttggagtttgaccactctcagtcggctgcgccgacaactcctgccatcgggagccaagtgctttgagcaactgggcaatgtcgtgacggttgaggtcgcagcccacgtagatggcggtaccgttgccataggggcggctggtgatggcgggggtgcgctccagctcccagtcggcggcggactcacctgcgtaagaggcaagcactgtggtgtccgcggctacggaagtcacgtcgttctgccacaggcgggtcgtcagaccattggacaggctgatttcgctgggctcgccttcggcttcttcaccgaggatgttgaattcttcggagcggatgccgagcatgtcgcgtaggagcccgttgccggcgccggggtagccgccgaggccgatgtggaagtgctcgtcgatcaggccggcggcatagccgacgatgacggttccgccggccttcgcgaagtcggcgatacggagaacgtcttcgtcggacaggctgagcacggtgggcagcacgatggttttgtagccggtccagtcgtaggcgagcggcaccacgtccgcgcgcagcccggcatccaggaagccgcggtaccagtcgcgcacgtcgtgccagtggttgagtttcatgctgggcagggtttcggagcgtgtggcccattcggattccgcgctgaacaggatcgccgtgccggcacgctcgagctcagtgccctgcagcccggcgtcggagagggtcttcagcgccttaccgagctcgcatacgccgcggaagaccttggaatcggcacccgcgtggggcagcatggcggagtggaacgcctcggcgcccgacttggattgccgccattggaaaaagcagatggcgtcggcgcccatggccacgtgggccagggagtcgcgcatgagttcgccggcccgtttgcgtgtgttcagcggcttccactgcacggctgaggtggagtgctccatcacgtaccacggcttgcccagcgcgagggagtccatgagcgcgtccgagcaggcgagttcgtccaggtgggattcgccctcatggaagtagtgatcgttggacacgaagtccacctcatccgcccatttggcgtagttcatgacgcactggtcggtggagaccatgaagttcgtggtgaacggcttgtcggggcagatctgctcgatggcgtcgcgttcggctttgtagaagtcgagcagcatgtcgttgccgaaccgctcgtaatccaactgctgcgacgggttgaccatggcgtcgccgcccatgtgacgtggcagcagcacctcgtcgaaactgttcacgtgctgcgaccagaaggccgtgccccacgcctcgttcaacgcgtcgatggtaccgtacttggtctcgcaccacgtgcggaacgcggccaaggcgttgtcggagtagtcgtagcggttgttccagccgtattcgttgcccatgtgccaggcggtcacatacgggttgtccttgtagtgttcggcaagtttgcggcacaggcgcagcgcgtattccttgaacaccgggcttgtgggctgccacgactggcgtgagcccgcgttgacggtatgaccataccggtctaccggcagcacctctggatgggattcgtacagccacagcggcgcggcggctgtggcggaggccaagtccacggcgatgccggctctgccgagcctgtcgatcacatggtcgagccactcgaacgtgaacgcgccctcgaccggctcgatcttgtcccagctgaaaattgccagcgatacgacgttcacgccggcctcacccatgagacggatatcctcgtccagcgtctcctcgggccactggtccgggttgtagtcgccgccgaacgcgatgccgcggccggattccgtcagcagggacggccacctaaatgctctatgagtagtcatattaatcaaatcctttattgtatcggctcatggccggtgctgtgtttgccggttttgggctttggctcccctcagtctcactgcgttcgacagcgtcatcggcgctttgatcaaggcgtgaatgctgcgttgcgttactgcattgccatgttgccatgttaccgcgttattgcatcgctacgttgccacgttgccacatcacattgcattgccgcattgctgcgttgccgcatcacatatcgcaacacaaacgcagcaacgcaatgacgaccggagatggcatcgccgccacccgcgaggaaccgcagtgcaacgcggtaacgtaacgcaatgcgatgcgattcccgcgtagttacaggcagttacagattgagtaccgcatcagcaatgcgcatggcggattcgcggtgggagaccagcaccacagccgcgccgcgctccttgtctgcatgctgctcacccacggccatagcgtgaatggaacgtagaataatagcctcgttcaaagcatccaaacggctggtcggctcgtcgaaaagcaccagatcagcattgcgcaggaacacacgagccaaaccgatacgctggcgttcaccttcggatagacggtcgcccaactcgcctacctgagtatcaaggccatcgggcagggaatcaatgagatcaagcacggaggccttggcgagagcctgacgcaaacgagcatcgagaccgtcagctgctgccacctgaacggcatcgccctctgccgattgcgccgccaactgctgctgtcgggaatcaacggtcttggcacccacttccccattgcctgcaacatttgcagcttcaacctcggactcaggcaaagcaatcagcagattgtctcggatagagccatcaaacaggtgggtttcctggctcatcatggcctgaatacgtcggcgagcatgcacatcgacctcgggcaacggcgtgccggacaacgtcacctgaccgcgctgcggatcccagtagcgcagcagcagcttgagcatggtggacttgccccggccggacggcccctggatacccagcacgccatgctgcggcacgtcaagcgagaagtcggacaggacttcatgctcccccgcatatgcaaaggtgacgtcatcaagacgcatgcccatatactcctgcggcacaacagtgccgttctcggtcacagcgggcacctcgtccatcagtccgaacagtcggctagcggacgcgaaggtctgagtcaggttagcgggcaaggcggcgagcgccaaagtcggtccgaacgagccggcgaacagcacgaaggcggcaatcagagccggaatgctctgcgggttcgcgccggcacaggcaatagccacggcgaccgaagccgctgtgagcacagccaccaagagtccgctgattccggtgaaacggccgttgaccttgctgagtttggcgtgatccttccacaacgcatgggtacggtcctcgatggcctgcgcacgttcctcgccgcggccaaatcggatgatttcgtccaggccgcgcatgtcatcgagtatcacatcgtcgagttctccggcagcgccacggatggcagggccaaggttacgtacgccggtggcaaagaatcgcggcacaaggatgccgataaccaggtgggcggcaatcaacgccagcgccatccatgggcttagggtggcggccacaatcgtgtagatgatggtggaggttaccgcgatggccaccggactgatggtgtgggcaaagaagatctcaagcagttccacatcggtggtcagcatggcgataaggttgcccttacctttgcccgcgagcttggccggtgccagtctgcgcaacgcggcgaacgccttggaacggaagagtgcgagcagatggaatgccacattgtggttcagatattgttcaatgtatcgggtgatgccacgcagaagagcacagataatcatcatgatgacggcgggcgcaacacccatgccccacaccggattaccggtaagtgcaaatgccgcgataatgccgaacacgggcaggaaagtggccgaaagatggccgatggtgccggcggtggaggccgctgccatcagtcctgccagaggtcgggcttccttaagcagtcgcctgatcacttggaatgtgctcattttggaagacgaatcgctatttgcaacaccagccggagtctcagccgaggcctgctcactcccgccaacggaagccgtcggcaaagctgactgcaggcggtcaaccgtcatacccgcctctgcgcttacgcgcgctgcgccaccctcagtccgactgtcgtcggacagctcctgcttgcgggaaccaacctgcagcacacgccgagcatggccttctccgaagttctcaatatctgcctgcgtggtaaacagcttggcgtagacgccgtccgccgtcatcagctcggtatgggtgcccctctcaaccgacttgccgtgttcgagcaccaccacttgatcagcgtattcggcgttggccatgcgatgggtgatcataataaccgtcttgccgcgggattgcgccaattcgcgaattgtatccaggatcagctcttcggattccatgtcaacgctgctggtcgcctcatcgaacacaaataccggcgaatcatgcaggagtgcgcgggcgatggcgatgcgctggcgttggccgccggacaggttggcggcatcggactcaatcggcatgcccagtccgttcggctgtgcgtgcacgaagtcggcaatgcgcgcctgctcgagcgcggaccacagacgggagtccacggaatccggtgaatcaggaatctcgtcatcgggcaaggccatcagaagattctcgcgcaatgcgcccgcaaacagatggctgctggcaccaatcacagtgacggctccggccagtgtttcgcctgacaaatcggatacctcgacgccgttcagtgtgagcgaacctcggtaaccggccagtgtaccggcgagcagcgaggcggccgtggacttgccggaaccggagatgccaacaatggcggtgaactgaccgggccgtgcggcgaaggtgatgttggtgagcgcaggagcgacggcggaattggggctggtttcaccttgcttatcggtctttgcggatgcggacttggagtcgccgtgcccggcatcatcataggaatagccgacgtggtcgaagcggaccgtcagaccgtcgtcagcggaatcggaatcgttggccggcagggtcgccgtgccatgctcgggctccggggtgtccagcagagcgaagatgcgcttggtggaggtcatgccgttcatcgccacgtggaagaacgagccaagctgacgcatgggaataaagaattcggcggacagcagcacaatcagcagcagtccggcgagggtgagcggaagcccgcaccgaacggcatcaggtattgcaggccgtaggccaggtaggcgaatgcgccgggcaggtgggcggcgagcatgatcggcgaccagccggcggtgctggctcctgcggcggctgcggtggtatgcgcatactgccatagagccacaccaatgccggccgccgcaccgccgtaggccacgatatccatggcggtcagcgagcgcagctggatctgcagcacgcgcatggtcatgaccctgcgctccacattccgcgcaatcccattcaccttaagcgaacgccctcgcacacgccagacttttaaagtgagaaaggccacagaattatcgattgcggagtgcgcatgctagacgcgccaaccagaaaaaatatgcttcgatatcaggggctgaagcatccactacacccaatacgtgcatttatccgtttcgaggaggctaatttttgcgtttgccggaggcctacttccgtttcaaggggctgatttcgcatttgccggaagtctatctccgcttcgaggggctcctcatccatgtaatcggaagtataaacggctacacgtcaacgtcattccgccgttttagggccgtgtctacttgggcatcagcccctcgaagtggaagtagacttccagataaggcaaaatcagcccctcgaagccgagaaagcacgtttctacggtgtcagaagccttcggaacgcaaaagggtcgtctgcacgcagacgacccatatgatcaattcgccaataaacgcagcaaacgcggcctagtgctgcttctgcgcggcgaccagtgcttcggcggcggccgtacttatcggacaggaagccggaggagccggcgccgatcacgccgccgatcatgatggagctgatgaccagaccctgcagggccgggctcagcgcgtacttgtcctgcaggaagtcgatggctcccgaaatggacacggtcataaccgtagagcaaaccggttagacacggcgttgtatacaatccacaaaaccagacagacaacttctccattgcccacaacgcgcgcaaccttacgccagcgtagcctaaattgtcaggatggctcgatttgttaacagccatcacgcaacgcatgtaaggacacggcccgcttatgcttgaccactacaccacgcccggcgaatccatcgagatccgcgatgaccaaactatctattcactgctcaccgatcgccttgcccgcaccggcgcggacacggtaatcgccgccaagaaaatcggccccggccgctggcagaacgtcaccaccggcgaattccacgagcgcgtggtctcagccgccaagggcttgatcgcgctcggcatcgccaagggcgacgcggtaaccatcttctcctccactcgtctcgaatggggcattctcgatttcgcactggccgcggtgggcgcggtaagcgtgccgatctatgacaccgactccgccccgcaggcccagcgcatcatgaacgattcggtggtcaagctggcctttgccgacaatcgcgagcgcttcgaccggctcgactcggtcaaggaccactgccctgccttgaagcagattctcatgctcgagggcaacgcactgggcgcgctcgaaggtctgggcgtggctgtttcggacgaggaactgaacgagcgcgtggccaccgtgcgcacggacgatctggccaccatcgtctacacctcgggctccaccggcaacccgaagggtgccgaactgacccataagaacttcgtgtccatcaccatcaccgcttcgcaggcgcttcatgaagtggtgcttgacgaccatccacgcctgctgctcttcctgccgctggcccactgcttcgcacgatttatccagtacgcctccatcgactccgatgacggcgtggtcggctatctgccggacaccaaaaccctgctgccggacctgcgttcgtttgaaccgacctacctgcttggcgtgccgcgcgtgttcgagaaggtgtacaacgccgcctcgcataaggccggtgccggctggaagggccgcctgtttgtcaaagccgccgaggccgcgcgcgtctggagccgcaaggagcaggccggcgagcagcacacatttgccgaaatcgccgagcgcgccaagtacgaaacgctcgtctaccgcacggtgcgcggcgctctgggcccgaagatcaagtacgtggcctgcggcggcgcaccgctgtcgcttgatctggcgcatttctacaacggcatcggtctgccgatgattcagggttatggcatgaccgaaaccgccgccccgttcgccgccacgcgcgtgaccgacaatgtgatcggcaccgtaggccagcccgcgcccggctcctcgattcgcatttccgacgaaggcgaactgcaggtcaagggcccgaacgtgttccgcggctaccacaatctgccggagaagacggccgaggcgttcaccgccgacggctggctcaggaccggcgacttggccgagatcgatgacgccggccgcatcatcatcaccggtcgaatcaaggacattattattaccgccggcggcaagaacgtctcccccattccgctggaggaggagatcgccaagtgcccaatcgtggagcactgcgtggtggtgggcgaccagcgcccgttcatcggcgcgctggtgacacttgacccggagtcgctggccatttggctgcccgcgcacggcctgtccacggagacgccggtcgaccggctcgccacgaacgccgcggtgcgcgaggagatccagcagtacgtggacaaggcgaatgcgacggtctcgcgtgccgaatccgtgcgcaagttcgccgtgctgggcacgcagttcacgcaggagaacaagtgcctgacgccgtcgctgaaggtagtgcgcccggccgtcaaccgcgtgttcgccgatgtgatcgacaacgagatctacaacggcaagcggtgaaacgcgcggttcgtaatccgacacaaaatagggccttttgaaccgcacctccgatcatcgaatctgtattactccagtccaacaatcggggtgcggttcaccctcgccgggcacttcatcattcatcactggcatggttccattatcacgcacattatggcgcagagcgaatacggcaccccggcaacgcgagtgggtcgccggggtgccggagcgcgggggtgccagaatgccgaagggccgggataccggagtgcccggtcgccggggtgccgaaatgccgaagcggtgtatgggtgccgcccggcccaggtgggtcacgcccgggtcagtttcttgctcctgagacgcagcacgacatcggcggagtcggcgacacgcttggaatgcgtcaccacgattacgcatttgccgagctgatgggcggcatgctgcagcagatgaatcacctcgtcggtcatctccgggtcgaggctgcccgtcggctcgtccgcgaggatcgcgcggcccggggcgaccagcgcgcggccgaccgccacccgttgacgctggccgcccgacaggtgcatgatgttgcgcttggattcctcacggctcaaacccag

SEQ ID NO: 2602 - DNA, 33649 bp, Unknown
  R222_15m  MAG No. k141_15166
tcgcgtgtacttcgcccagaaccgtcttggaggggtactggcgcccactgaatgcgattcggtgcgccgcggcatccagacattggccctgcgcatggaccggcagcaggagaatgcgaatgccatcgcgcggtacctgctggtccatccgctggtcaagtccgtccactatccgggcctgcccggtgcaggcgaccaaaggctcgactccaagggactcaagggcgccggcggcgtgctgagcttcgaggtcgtgcctggcgtggacccggccgacgtgctcaacaatctgcacgtgttccgactggccgtctcgcttggcgcggtcgaatcgctcgccgaactgccgtgtcgcatgacccacttcgaactgccgcgcgaggagcgtttgaagatcggcatcaccgacgaactcgtgcgtctcgccatcggcatcgaggatgcagtggaccttatcgaagaccttgatcaagccttcgaaatcgcctgctcccgttacctccagaactatgctgaagcggacgtattcaaccagttgacctcgggggtgttcgcctgatccaataacactgccattgacgggccggtgctgacattcggtgccggcccgttcgtatacgccggaaaaggtgagaacaatacgaataaagagtgcctgagtcggggcatggactcgggcagccggggtagagggtttccgctcttatacccatccataaccaacccatatagcaacgccgtggtaggcgatgggcttttgcattatggtcgtaaccatgccgcacggggcgtcggccgagaccgcccgccgtgccgccaccacgcttcaacctactgataaggggacaattatggcaaggttcaacacgcagctcgttcatggtctgccggtcgacgacaacgacactggagccgtgaacccgccgatctacaactcttcgacgtacgccttcccctcggtcgactccgtgccgcgctgggattacgcgcgcagcggcaatccgacccgtgacttcctggagcaccagatcgcgcagctcgaacacggtcgccgcggcttcgccttctcctccggcctggccgccatccacgccgtgctctccatcttccagcccggcgaccgcatcgtggccggcgacaacgtctacggcggcagctactcgcagttgaacgaccacttcacccgttggggtcttgaggtcaccaccgtgaacacggccggcgacctcgaccgtctcgaacgcgccatcagcggcaacggcgacaccgcccccgcaaaggccgtctacttcgagaccatcaccaacccgctgctgcaggtcaacgatgtgagccgcatcgccgccatcgcccacaaatacggcgctctggtgatcgtggacaacactttcgtgaccccgtatctccagcagccgctcgacctcggcgcggacgtggtcatccactccgccaccaagtacctggccggccactccgacgtgatcgcgggcctcgtggtcacctccagcgaggatctggaaggccgcatctacttcgcgcagaaccgtctcggcggcattctggctccggccgaatgcgacgcggtgcgccgcggcatccagaccctggccctgcgcatggaccgccagcagaagaacgccaaggccatcgcccagtatctgctcaagcacccgctggtggccagcgtgcactatccgggcctgggcgaggacggcgagcacgagcttacggtcaagggactcaggggtgccggcggcgtgctgagcttcgaggtcaaggagggcgtggatccctcggtggtgctcgacaacctgcacgtgtttcgcctggccgtctccctcggcgcggtggaatcgctcgccgaactgcccgcccgcatgacccacttcgaactgccgcgcgaagaacgcctcaaggtcggcatcaccgacgagctcatccgactgtccatcggtatcgaggacgtcgacgatttggtcgaagacctcggccaggccctcgacaaagcgtacgaagccctgccgctggatgtcaagcagaccatcgacgccgacaacgacagccagatttccaagctgatcgcctgatatcggccgattatccaatcgaccgcgctcggcaaccatgaggtcgggccaggtctgacggacagggaagccggtctggaatttcaagcaaaaccatcgcaggtggcccgcacgaatccaatcgtgcgggccacctgcgcatatggtgccatatccgggtgaacggcatggtatccgaatgaaaatcgatagggaggagcggatatgtccgtgaaggaacacaaccgagtgcaggggctgcagccggaacttgaggaatactaccggtggttccatcggcatcccgagccgtcgtacggggaggtcaaaaccacggcccgcatcaaggagatcctgaccgtgcacggcatcgaaattttggacacgggactcaaaaccggcttggtgtcacgcatgcaaggcacggcggaccccgccgcggagccggtgccgggccgccaggcatgtggtggcggtgcgcggcgacatcgacggcctgcccatacaggagcaggccgggctgccgtgcgcttccgaaaccccgggatacatgcacgggtgcggccatgactacaacatgaccaccgccttcggagccgtgctcttgcttcagggacgccgcaaccggttcgccggcacggtgaagctcatcttccagccggccgaggaatcccgcgggaccgcaggcaaccccaccggtgccggccgtgatcaacaccggcgcggtgaacaaattccgcatcaccatccacggccgaggcacgcatgccgcccgcccgcaccgcgttccccgaagaccgcgcgataatccataatcgcgttcaggccatcgtggaaggcatcgccgccacctacggcgtcaccgtggacttcatctgggaggacagtgcgcccgccgtgatcaacgatccacgttggttggcgctcgtggcctccaccgccgaaagcctcggactcaccgtgaccggaccgaacgccacactcggcggcgaggacttctcctattatctggacagggcgccgggcgcgttcttccgcattggcgtgggcaacaagggccgtgccatgcacggccccaccttctatgtcaaactcgatgcgctcgccgacggcgccgatctgctcgccacctccgttgtgaacacattggccgcattggggagcgactgatctggctatcagcctggttataagccaggttgatagaaaacctcttcgctataagctggccatatatcgccctatcggatatccagaaccccaaaacgttgaaatctcgcggttcctgagactcgggggtctacgatgaaagtacttccgcgcagggcgtgaatcggttgggtatgagacatgacgatggcgggaacgggagcggttcgctcccaagcgttaccacacagagagccatttcggggggagttctgtaccccggcgtgagacggggtggctcagagaggggaatggcgaaatgcttaccgagcatcgtcttaccatgaaagccactgccatcttcggcatactgcttaccaccttgacgttcggaggctgtggcatcagcaccggtagcagcagcaatgctgcgtccaccaccacggacaactccaactccaagaccgccgactacaagtacggcaccgtggaattcccgaagtccagctcgctgtgcagctcgccgatcgccatcgccctggagaagggattcttcaaggatgagggcatcaacgccaagctggtcacggccgatgccgaaacccgcaaggtgggcctcgacacgggccgcttcccagtgaccaacggtgacttccaattcttcccgtccatcgagcagggcgtgaagaccagcgtggtgggcgccctgcacaagggctgcatcaagatcgccgtcaagaagggctcgccgatcaagactgccgaggacctgaagggcaagaccattggcgtcgatgagatcggcggcaccccgtacatggccgccaacctgtggctcggcgacgcgggcctgaacgtggaccagaagaacggcgatgtgaagtacctgccgttcgatgacgccaacctcgaattcgaggcactgcagaacggccagatcgacgcggccgccctgtgggacccgctgcccaccatccaggaggccaagggcaccgtcgacatcatcttcgaccttggcaagaacccgaagttcgccaagcgcttctgctgcttcctctacggctccaacaaggtcatcaaggagaagcctgacgagatgagcgccatcctgcgcgccctcaacaaggcccgcgactacatcgcccagcatcctgaagagtccgccgacatcatcatggcgaagaagtactccaccatcaacgacaaggacctgatcgtcaagctcttcaaggactacgactacgccgtgcagcccgacgaggccaagcagatcgaaagcgacgtggactacttctccgaaggactgaagaagatcggcttcctggagaccaacgacccgtccgcctttgccaagcaggcctaccagaagattgatcagtgatcgcggcccgcggccatccgattgcatcaatggtatgacggtaggacctgaacagggccggacggcattgaccgtccggtcctgttcaggtccgtccgccctgttgttgcagggaccgcattgatttcgatttctcattcaccatcattcgttcgttcatcgttcgtcatcggaaggaacaccacccatgagcagtatcaccgccaaccttgtggagccgcgttcggccgcaaggctcgaaacgcgggacccggcacgtccgcaatcagcgcgggcggcatccgtctccgccgccgatcccgtagcggagcattcggaggcgacggcacaggccgtaagccggccggccgccgaccagcgcgccgcgcggagcctgccgtatccgttcgcggtggcgctcactgcggccggggtcgtcatcgccgtcatcgtcaacgtgatcttcccgcagagcgcccccgtcgagttcaagcaagggcagatctggatcttcctgctcaacggccaggaactgtatctgacgctgctggccgtgttgacactggtgtacgtggtcatcggcatcgtcgacgcccgtaatcccaaggatgcggctcgattccgctaccgcgcccaattccggttcgcagccggactggcactcgctctgtgggacgtcaccggcaccaaactgcaggtcctgccgcagccgttcttccccggcccctcccaggtgctggagccgttcctgaccgacggcagctacatcgccctcaacacgttctattcggtgcgcctgttcgcggccggattcgtgaccggtgtggtgctgggcgtggtgaccggcgtgctcatcggctggttcgcccgcgcctactactgggtgttcccggtgctcaagatcacgggcgtgattccggcggtcgcttggatgccgttcgccctgaccctgatgcccacgccgttcattgccgccatgttcctgctggtcatctgctcgtggttcccggtggccttcctgaccgcgcagggcatccagagcacgccgaagatgcttgtcgaagcttcgcgcacgttgggcgcggacacgcgctacatcctgttccatgtggccattccgcactcgatgcccagcatcttcaccggcatcggcatggccaacagcctctcgttcctgaccctcgtgatttccgaaatgatgggccagcctggcggcctcggctactacatcgatcaggcgaaggcatggtccgcctacaacgaaatccttgcggcgatcgtcatcatggccgtgctgttctccctgattatgaaactcatcgaactggtgcgcggccgtgtgctgcgctggcaggagggactggtcaaatgagcgctgcaatcgcagaaacgacggcgacggcgggcaatgccgtggacaccgaaaacgccacgaacccgattatcagcatcagccatatcgaacgcgacttcgtggactccgacggctcggtcacccaggctctgtccgacgtaaatctggacatccgaccgggcgagctgatctccatcatcggcccttccggctgtggcaagaccacgttgctgcgcctgatttccggactcgaccggccgcagcgcggcgaggtgacgttcaagggccgcccgattgaggggccgaacccggaacgcggctacgtgttccagcagggcagcctgttcccgtggctcacggtcgaggagaacatcgccttcggactgaaggcccagggcaagtacaaggaacgtaaggacgaggtcggcgagtatctggagaaggtggggctgaccgggttcggcaacgcctacccgcaccagatttccggcggcatggcccagcgcgtggccattgcccgcgcgctcatcgaccaccccggagtgctgctgctcgatgagccgatgggtgccttggactcgttcacccgcgccgatctgcaggaccgactgctcgacttgtgggagaagtaccacatgactatgattctggtcacgcatgatgtggacgaggcgatctacctgggcaatcgcgtggtcatcatgacgccgcgtccgggccgcatcaaggagatcgtgccgatcgacctggcccagcgcgaccgcgtatccgacgacttcgccgcctaccgcaaactgctgctgaccaaactgcactttgatgtgcacagggaaggtgaggaataaataataagtgagttggctcccctcaggaggggagccaagaacggcacaagaagagggcgactgccatgtggcagccgccctcttcttgtgccgtatgtgattactccccatacacggcatcaaacgcctgggacagatcggcgatgaggtcgtccgggttttccagtccgatcgacaggcggatggtcgtgggacccacgcctacgatggcacgcgcctccttggtgaactcgcggtgcgtggtgttcaccgggtccacgatcagggaacgggcgtcgccgatattcgccagataacggaacagcttcacctggttgatgaacgcggcggtctgttcggggccgccctccagctcgaaggacagcacggagccgatgccgttcggatagttcgtggccaccagttccgactgtgcgccgccgggcagaccggcatagttgacagccgtcacatgcctttgtccggcaagatacgcggccaccttgccggcggacgcggtctccttggacacgcgctcggtcaaggtctccagaccgatgagctgcagatacgcctcaaacgggcccagcacggcaccggtcaggcgcagatacttcagacgcagacggcggatgaacgccagcggacctgcggcctcgacgaagctgcgcggctcacggcccgcggcctcgcccagaatgtactccggcgcggtgaactgcgggtagcggccattggcccaatcgaacgaatcgccggaagtgaccacgccgccgatggcgttgccatggccgctcagcgccttggtagtcgaatacacgacgatgtcggcgccatgttcgagcggacgatacagatacggcgtgggcagcgtgttgtcgatgaccagcggaatgccgtggcgatgcgccagttcggccagcgcctcgacatccgtgaccacggtggtcgggttggagaccgactccgcgaaaatcaccttgacgtccgtgccgccctcgccgtccgagccctgctcgatcagcgactcgatatgatccagatcgttgatgttctccacaaacgaggtggtcacgccgaactgcggcagcagcgtgcgcagcgagtcgaaggtgccaccgtacacgtcatagggggcgataatacggccgccgccctcagccgtgttgagcagcgcataggtgatggccgccatgccggaggcgaccgccacggcttctttggcgccatccagttcggcgatgcgcttctccaggaacgagaccgtgggattggatacgcgcgaatacaggaagcccggcacatcgccattggccacgtcatggcctcgctgcgaattctccagccagaacgccgcgttcgagtaaatgaccggcgtcaccgaatcggcgttggcggccgggtcgaaaccggcatgcacctgcgccgtgtcgaattgatgatcagacatgaattcccctttttatgtggtcgataacggtgggaaccgtgctggtccctattcccggcatccccggccggtccatgtggctcacaatctatcaggttcgcagcgaagccgttccgtgcaacccatcggtaaaacttatgatggcatcaatgaaatgattatgggccgtcggcatccggaatcggccgtatacccgttgcttatacccggcccaccggtgagcttatagcgcggtgggcgggcggccgcaaacgtgaacgctggggccgcaatggcacccattcatgattttgcttataccccaaaacggcggaaacgcgagggttttgccgtttgacgaggctgccggcatcccatacgattcgagtcaattcaacacatcgcctgccgcccgaccgggggagagcggccggcgaacatcatcgggaaatcacacagggggatcgctttgaccatcagcgtagtagatgcggacgtgctcgggaacgagactgcggtaaaagtcgagagcgtcgagaacgtcgaaagtgttgccggacaggccgtcgccgacgccatcgatgccggcgacgaaaccgtcgcgttcctccagcggctgatccgattcgacacccgcaacgatggcagcggcaccaccaacgagcgcccggccgccgaatgggccgccgagcgactggccgaggccggcatcgactccatcatcatcgaaagcaagcccggccgcgccaacctcatcgcggacatcgccggcgaggaccccacgctgccgtccctgcttgtgcacggccatctcgacaccgtgccggccaacgccgacgactggagcgtcgacccgctgggtggcgtcatccgcgactacaacggcacggcgtgcgtctgggggcgcggtgccgtggatatgaagaacatggtggcgatgacgctcgctgccgtccgttccctggcccgggccggcatccgcccccgccgcaacatcaagctggtgctgttcgcggacgaagaggccggcggcttccaaggctccgaatggctggccgcgaaccgtccggaggtcttcgacggcgtgggctacatcatcagcgaaaccggcggattctccggcagcgtgaacggccgtcgcgtctactacgtgcagacgggggagaagggcacccaatggttctccctgacctcgcgcggcacgcagtcgcatggctcgcagatcaacccggacaacgccgtggtgcatatcgcccgcgcggcggtgcgcatcgccgaccatcagtggccggtggcgctcaactccgtaacccggctgctgcttgaccggctcgccgaactcaccggcattcctgccgactcgcccgaacacgtggcccagctcatcgaggccaccggattcgccaaagcctgggtcggctcctcggtgcgcaacaccttcaacgtcacttccatcgacgcgggcagcaccgtgaacatcgtgcccggcaaggccagcgccctggtggacggccgtgcgctgtccgggcaggaggacgacgtgctcgacgcgctgaagaccctggccggcgaccgcgtggacgtggccaagatccaccgcagcaaaggctacctgtccgcgccggacggggagctgttcaccggcatcgaacgggtgctcggcgaactcgaccccgaggcgcaggtgctgccgttcctctcgtccggcggcaccgacagcaaggcggtgctctccgtgaacccgaacgttcaggtggctggattcatcccgctcaaggtgcccgagggattcgactacatcgccaacttccacggcatcgacgagcgcgtgcccatcgaggcgctgcgcttcggcgaacaagcgctggaacgcttcatcgccacgttctgaccgggttctggacgatcggccggccggacttcgggggaggcccggtgggcggccgccggcaatcatccgtcaatcaaacgaacgccaataaccaaccaatagcaaccaccaatcaaaccagaaggggaaccaccaatgaccagactgctgacctccgagtccgtgaccgaaggacatcccgacaaggtgtgcgacatcatctccgactcgattctcgacgcttaccttgaggtcgacccggactcgcgcgtggccgtcgagacgtccgccaaggacgggctcgtggtcgtcgaaggcgaggtgtcggcacccaggacgctcgaccatgtggccatcgtgcgcaaggccatcgccgatatcggctacaccgacgccgccagcggccttgacccggaaggcgccggcgtgatcaacaacatctgtccgcgcgaattcgacagcaacgacggcggcgcctggggcaactacggcgacgacacgaaggtgagccgcgaggaggcgtacaacacgttcggtggcgaccagggactcatggtcggctatgcgtccgacgacaccaaggtgctgctgccgctgccgatctacgcggccagccgtctcgccgaacgcctggcctacgtgcgcaagaacggcatcatcccgctgctgcgcccggacggcaagacgctcgtctcggtcgaatacgcgaacgacaacatcaccgatccgcgcgcgattcgccacgtgctcatctccactcagcattccgacaagctcgcgctggacgacgtgcgtgcgcaggtgcgcgaatacgtgctcgaaccggtgctcgccacgctgggcgtggacgcgtccgaagccgaagtggtcatcaaccgttcaccgttcatcaacggcggccccaaggcggacgccggcctgaccggtcgcaagatcatcgtcgacacatacggtggcatcgccggccacggcggcggcgcgttctccggcaaggatccacgcaagcccgaccgttccgccgcctacgccgcacgttgggccgccaagaacatcgtggccgccggcctcgcccgccgcgcgcaggtgcagctcggctacttcaaccgcgtggccacgccgatcaccatcgacgtggagaccttcggcaccgaaaccgtggcccgcgagaagatccagcgcgccgtggccgccacattcgacttccgccagctcgccatcatcgaccagctcgacctgcgccgcccgatctaccgcaagaccgccgcatacggccacttcggccgcgacgacgccgacttcacgtgggagcgcaccgacaaggtcgacgaactgctgaggaacgtcaaatgagcgataccggcgacccgttcaagcacgaatacttcgacgacttcgaacgcgaccatcccaacattttcgcctcgaaactcgcgctgctggaagtcgccatcacggcggacggcacgcgcgacatcggatacacggtgtccgtgggcgccggcaccggctcatacgaggcggcgctgcggcgcgacgggcttgacgtggaccgcatcatcgagccgtcggcgaatctggcggccgaagcgcgcgggcgcggcttcgacgtgaccgaggcgctcgcccaggacgtgccgttcgaggacgcctcgattgacacgatcttctacaacggcagcgccttcgggttcatcgacgaagccacgctgcgcgacctgttccgggcgcattaccggcagctcaagccgggcggcgtgctcgccctactcgacgtgccgccggccagcgccttgggacttgcggtgcaggcgtcgttcgtcatacccggcgaatcgtatatcgcggaagtgctgcgggccagctggtacggggctgaaaccccgcacaaggaatactggcgcactaccgacgactatcgcgcgctgcttgaggacggaggcttcgaacgattctccacctggcaggcgctgcgccggcacctgatctaccagaacgacgcccgcgagccggtggccgaaggctatcaggagggaagttacgtggctttggtggcgcgtaagtagcgtgtcttgagctcgttaacggatgaacaaggaaagggtatgactacatcgactacattacagacaactcgttggggcaaggtggctatcggatcgttctgtgcgatcctgctgacggtgggcctgtccgcctgcggcaacgcggcgggcacctccgcgccgcaacagtccggaaccagcagcaaggtgagcgatgataatgccgcgcaccatcatcaggcggcgtcggccgaaaagaccgaacagtcggatggtcagctgaaggacacgacggcgggggagtcgggagattcgaccggcacgaccgggcagtccacggatcaatcgaccgcgggcaatccggccgattctggttccggcgccggcgccggtgccaagacggccggcggctccggctgctgccacgacgagtgatgggaaaggaacacccatgggagaaccatttttcgaccggtacaaggacaacggccagattctcgacaacacctggcgcgcgcgaccgaatatctacgagtcgcgtctgcgactgctgcaccgggcgctgaccacccgcgaaccgggcaagatcctgtccatcggcatcggctcgggcatcttcgagaccctgctgcgcgaacgatacggcatcgaggtggccgaggctgtcgaaccgtccgcaagcctaggcgccacggcccgcgagaaagggttgaatgtggtggaaagcaccgcgcaggactgcgactacgcgggagcgccgtacgacaccatcgtctacaacggagcgagcttcggcttcattcccgatgacgaaatcgagtcgaccttcgcccacaaccgcgaagtccttgccgacaacggccgactgatcctcaccgatgtgccggcggaaagcacgcttggcatcatcctgaagctcgcgcagcgctacgacatcgcacgcgaggacatcgacgacctgctggtcggtacctcgttcttcaatctcgacacgcacgcctacaaaccgaactggcatccgattccctggtacgccgacctgctgatccgcatcggctaccgcgatctccagttcttccagaccgtgctcgccaatccgccctaccaaaacgatcaggtcgaagaccccatcaagggctacactcaaggcaactacgtggccatcgttgcctcgaagtagtggcgggtgttgggtgcttgattgctgcgctcaggtttctctgtgttggaggaggaacttgagcgttttttctttaacaacgaaggtttcgctcgaatcgtgataggttcgagctcgctgtgtgtcctggtgccgatggcgtggttgccaccgttgttgtgtcaatcgtttgatggtgaaatggtgcgcagtatggtgtcgtcgcgagattatgaaaatggcggaattccaatggtccagcgaaatggggtgcgggatgccggctgtgtgtatcgtttgacgtgcgtgtcgtcccgcacggctgcgggacgacagccccaaatcggccgaaaatcgcgcggcatcccgcatttctccgatatgtgggaggaatgcgtccgccatatggtgattgaggcagaggcccgatgagatacgactatgtgacaccgtcacaggcagtgttgccacgagtgatattgcaacgggcggtattgcacgggtgccgtcgcgggttgtgccaacacccataggatacgccggcgcaccactcactggaagtggagctgcttgccgctttcttccgcgtcgacgttgccggtggcgagatccatgagctgttggaacagcgggaacatgagcagggtggagagaatgccccagatgttggtgaacgtggcgggcagtggcatgaacagcaggacgagctgcgccgtaaacatgacgttgagcagcggcatatcgtcgtcgtcacgctgggctgcgggggccataggcgtcgtaataatcaggagtactcatgccttacggtatacgagcttccccgccggttttccaattggttccagtgtttgttttcctgaccgatatcggccgcttccacttgccggccccgcatggccaaattcacagcggcaagagtacttccggcacgcaaataaggggatgcagcctcgcctcatatctcatatgaagcgaggccgcatcccctatcagcagcgaatcatcggccggccaagaccacacacagactcataatcaatccatgccggcccgccaacaccaacgatcaccaggttggaatctcggcgcccttggactcgttctccatgatctgtcggacgttcttctggtggtaggccttgatgacttccttgtagatatccttgtccttatcttcggtgcgggccacgatcacgttgatccacggcttgttgacgtccttggtggggtccgggtcgatcttgaagattgcgtccttctcggggctcttgccgtaatcgaccacggcgttcgcgttggcgatgccggccgccgcgtcatcgagcgagctcatgatcatgttgcggtcggtgggcaccagctcgatgttcttcggattgctggtgatgtcttcctgggcggggtagatgcccttggccgggtcgttcttggacgggtcaaccttgagcacgccggcctcctgcagcacgatgatcgcacggccgccgttggtgacgtcgttcgggatgaggaccttgtcgcccttcttcagttcggagatcttcttgattttgttggagtagatgttcagcgggctgatgtacgcctcgccgatcaccgtgaacttgtagcccttctccttgatctcgccgttcaggaacgcgtaatgctgctgcgcgctcagatccacgtcgccggcggacagcgcctggttgcccagcacggcgctcttcatggccacggtcttgacgcgcaccttggcgttctccgcttccaggttcttgttcacctggtcccacagcgggtcgtcggtcgaggtggtcagcgccaccttcagcgtggtgacgccgtcggacgccgaagccgagccgcaggccgccgccgtgaacagcacgccgagcgcggacacgatggccaggcccgcgcggatgcgtttgccgactcgcgaccggccggtccagatgttcgtctcagtgttcattcttcctcccgataatggttccgatggtttggatgatggtgatgaaaatcagcagtgcgatcacggccgccacagtgacgtcgagctggttgcgctcgaagccgtaccggttcgcgtagtcgccgaggccgcccgcgccgatggcgccgatgacggcgatctccgagttgaagctgatgcaggtgatggtggtcacgcgtgccagtccggagatgctttcacgcaggtagacgtgccagatgatcgagagcgggccgaatcccatggcttgggccgattcgatcagcgtggggttgagcccgttgaacacggattccacctggcgtgagaagaacggggtgatgcccacgatcagcgggaagatcgcgccttccacgccgatggccgtgccggcgatcagtcgggtcagcgggaacagcaacgcgatcatgatgacgaacggaatcgaacggcacaggttgatgagcttgtcgaagaactcgaagaccggccggttctgcagcaggccacccttcttcgtgaccgtgagcagtatgccgaagaacaggccgagcacgaaccagaacggcaccgccgtgaagaacatgcgtaacgtgtcgatcagcgattcgacgaacacgtcggggttctccatcacgtgcgggaagagcttgtccaggatggtcatcgtgcgttctccttgtcggtgttttcgaccgtcgtggtctcgacggcatcgatgtcggccttcgccgcacccggttcgatgaccgtggtgcggatgcccttgcccttgaggaattcaagcgcctggtcgatctgcgcgtcggagcccttgtatttggcgacgatgctgcccagcgggtagccgtcgacgatgtcgagcgaggcgaacaggatgttgaccgtcagtccgaaccgcgtcgagatgatcgacaccaggccctcggacacggtcttgtccacgtactgcatgtggatcaaccgctcgtccggcccggtttcgagaatcggcgaatcggaatcgatgagttcgtagatgcggctcaggccggtggaattgctcacgaagcgccgggtcaggtcggccttcgggtcggagaacacggtgaacgaatcgccctgctccacaatcgtgcccttgtcgatgaccgccacttcggtgcagatctgctcgaccacgttcatctcgtgcgtgaccacgatgatggtcagatgcagctgccggttgagccgttcgaccagttcgagaatggttttggtggtgtccgggtcgagcgcgctcgtcgcttcgtccaacagcaggatctgcgggtgattggccagcgcgcgggcgatggccacgcgctgctgctggccgccggacagttgtgatggataggatttggcgtggctttccagccctaccagctgcaacagctcggtgacgcgcgccttcttctgctcccggttcagcgaggacctcttcagcggcagtgccacgttgttctccaccgtgcgcgagggcatgaggttgtactgctggaacaccatgccgattgacttacgcagttcacgcagctcgccgggcttgaggtcgggaatcgacttgcccagcacggtgagtgtgccctcggtggtggattcgagcccgttgaggcaccggaccagcgtggacttgcccgcaccgctcaaaccgatgatgccgaagatggaaccctcgggaatggtcaggctgacatcctgcaaagcggtgtacgggccgtccggggtggcgtatgtcttattgagattggatatttcgatgatgctgttcgtcattcggcaatgtcccttccttgtctacccgggcaacactcgtgaagcctacaggggaacaagaggggactcggcggtgtctttatcggcgttgcttatggcctgttacaaggcataagcaacgccgtgccgcacatcacaggttgtggtcgaagtagatgacgtcggggcgcgtgttccagccctgcttcttccagaattcctggccttcgatgttgtccgccaccacgaggatgccgatcttgacgatgccgatggccttgaacacgtcgtagatgcggttgatgagcgtggtgccgatgcccttgccgcgccactgctcgtcgaccgccacatggtagaggtagcctttgcggccgtccgtggcgccgagcgccgtggccacgaccttgcctgcgccgtccacggccacgaagcagctgtccgggttcttggacagcagcagcgcgatgccgccgtacgtgttgttgagcgactgcagatgcatgccgggcgtgcgctcccacagggcatacgcctcctcgtaatcctcggggagcatgcggcggatgcggatttgggaatcggtgattggcttggccatggggttatgccgtccttcctttacagactttacagattgtcgtacggggtgatttcgtgcgggctggtgccgccggtgatgatggccagcgcgtcgtccagggactgctgggccatgtttttgaccgccacgtcggtgaagaacgcgatatgcggcgtgatcaccacgttcggcaaggcgtggagtgcgttgtagtactggttgtcgattggctggtcggagggcagttcgttgccgaacagcttggcctcgccttcaagcacgtcgagcgcggcgccggcgatcacatggttgttcagggcgtcgatgagcgcgggcgtatcgaccacgccgccgcgcgaattgttgaccagataggcggtcggcttcatctgtgagagacggtgtgcgtcgatgagatggcgggtggtggcgtcgagatacgtgtgcatcgtcaccacgtcggattgcgcgatcagctcgtccttgctcacccaggtgagcagcgggtcgagttcgtggttctcgttgatgtcgttgccgagcacgcgcgcgccgagcgcatggaagatgcgtgccacggtcgagccgatgcggcccacgccgatgatgccgatcgtcagttcgctgatctcccgcgagatgagcccgtgcacggagaaatcgttgtgggaggcgcgctcgtcgaactgcggcacgtgccggatcaggcgcatgatgtggctgagcgtgagctcggcgaccgcgggcggcgagtaggacggcacgttggtgatacggatgttgttgcgatgggcggcggccaggtcgatggtgtcgtagccggccgaacgcagggagatctgccggatgccgtactcgctgaggcgacggtagaagtcggggttcgggctcggcgcgctgcgctgcttgtaggagatgccgtcgaaacccttgacggtgtgcagtgtgtcctcatgcagctcgaacgggaagcattcgacgtggacgccgtgttcggcggcccacgcctcggcgaacggccgctcctcgtcgatggtgtggtagaaggcgatggaggtcatgatggtggcctttctgaagattgatgggattggaatacgtcgaaaagatcagtggcgggggagcgcttgaaccagaacacaggcgggcgcgtggcgtcggagcccgataagtcctattgttcccggaaccgtcggatccggttcaccgcctcgtgcagcgcgtccagtgaggccgcgtaactgaaccgtacgtaccgggacggtccgctgacgaacgcctcgcccggaatgccggcgactttcgcgcgccgggccagaagccgcgcatagtcgtagctgctgccatcgaagatgggcggcacctcgacgtacgcgtagaacgcgccggacggtcgggccatcgtgtagccgagcccggtgagcgcgtccaccagatagtcgcgacggttctggtattcggccaccatgcggtcgatggattcgtcgccgcgttcgtaggccacttgcgcggcgtccatggtgaacatggcggccgtggacacgtgaatctgatgtactttgagcagctgcgcactcagggcgtgcggggcggcgaagaagccgaggcgccagccggtcatcgcgtagttcttcgacgtgctgtccaccacgatggtgcgttcgggcgcgaacagcgcgatggacggcgccgggcgcgcctcgtagctgatctccgcatacacctcgtcgctcagcaccgtcacgtcatggcgttcgacgacttcggccaacgcgcgcaactggtcggcggtcagggtcacgccggtgggattgttcggcgagttgatcaccagcaccgcatcccggccttcgaccgaacgcagcgcacgctccagtgcgtccggggtcagtacgaaatcggtgtccgtggtgtcgatttcgattgcctcggtgtcggtcagggcggccatgcttcggtacaggccgaacccgggcgtggcgtacagcagggtcgcgcccggatgcagcagggcggtcagcgcgctgctgatcgcctcgctcgcgccctcggtcacgacgatgtcctcggccgggtaatgcaggtcgcgtctgcgggccagatagtcggagatcgcctgccgcagtccgggggtgcccgcgttcggcgcgtaatgcgtgcgattgcgggccaggctttcgaccgcggcctgtttgatgaagtcgggggtcgcgaaatccggttcgccgagcgtgagcttgaggatgtcgggaatcgacgacacctcgccgtcgaacgagcggatgacggacgcggtgaggttgcccagttgcggaatcaccgcatcggccggctcgaaatggtgaggtttcggttgcggcgattccacaggctgatggtatgcgtcaggtgtttggctcattgcgtatctccggtgttggctgggtggtccttgtacgtgtgatgtgtgcgattggttgtcgcctattggcgggcggcggtttcggattcgaggccggaagtcttcggcagggccgccggcggcgtgaccccgacgcgcttgccaataaccgcaagctgatcgaacgtcgccctgtcgatgggcagggaagcgcggttgcgcgctgcggcaagccgttccttgtctcccggcaccagcacgtcgtggccgtccaccgagtccatggcgcgcaggcgagcggacagcgaggcgacgcgctcgccgaccgtggccgcgccgccgaacgcctccagatcgatggcggcgaagcagtggcagatatgctggcctttcatgtccagggacagcaggccgccggacagcacgccggtgagaatctccaccaccgtggccaggccgtagcccttgtatccggcgttgagctcgccggaaccgccgagcggcgtcaatccgccgatgcgcggcgtggcgcgaatgttgtccatcacgtcggcggagtcatggttgacgcggccggagccgtccacggcccaatcgccctcgatggattcgccgagtttgacgagcacctcgatcttgccgagcgagacagtgctggtggccgcgtcgtagacgaactggtcgtcgccgcgtcccacggcgaaggcgatgggattgctgcccaaagccgggtggccggcgtgcgtgggcacggtgagcggattgctgttggtgctggccacgccgatcagcccctggtcggccgccagtcgcgcatacaggccggcggtgccgaaatgattggaatcgcgcacggtcaccagtccgatgccatgttcgcgggccttggcgattgcgagacgcatcgcgtcgcgggagatgagctggcccatgccgctgtgcccgtccagcaccgcgcaggctttggcatcgctgaccacggtggcgcgcgcggacggatcgatcatgccgtggcgtagcttgtgatcgtacatggccatgcgctgcatgccatgggaggcgatgccgtgccggtccgcatcgagcagcgttaaggcgatgaaagcggcgtcatcatgggcgaaaccccgacgttcgaacactgcggtcgcaaagtcctgcagttcctgtgcggcgacccgaacgtaatcggacatgaccctctcctgatgtatcgcgaatccccatgaccagtcgttgacgatgatcggcgcgacggttcggccgcgcctttcccgaacctagcacggcgcaaccggcgcggttggggcgtggcaatcgcgaaaaccgatagcgtgctacaagctgaatctgtaccatgcggcgtgccgcatggcgtaccttatatacatgctgcgcatatagcgctttataggcaacgcatataaccacgccgacctgccacctgtggccttgcactagggttggcgggtggcaatgcaatcggcgagaccacaacgcggaccgcagacaggaggaaagcccggatgatccagatcagatcggtgagcaagagcttcaacggcaccaaggtgctggacgggctcgacctcgacatcccgcgtcagaacgtggtcacggtgatcgggccgtccggctccggcaagtccacgctgctgcgcattctggacttccatgagcaggccgattccggcaccgtcgacttcggcgacggtccggtggacctgaccaccaccaacaccgccgacatccgcaaggtgcgttcgaagatcgggttcgtgttccagaactacaacctgttcctcaacaaaaacgccctgcagaacgtggccgagggactgatctactcgcgcggcgtcaagccggaacaggcgcgcaagatcgccctcgaacagcttgaccgggtcgggctggcggacttcgccgaccggtacccgagcacgctgtccggcggccagcagcagcgcgtgggcatcgcccgcgccgtggcgctcaacccggagctgctggtgctcgacgagccgacctccgccctggacccggaaatggtcaccggcgtgcttgaggtcatcaagcagctgggccaggacggcatgaccatgctcatggtcacccacgagatgcgcttcgcctacgaggcgtcgagcagcgtggtgttcatcgaaggcgggcacgtggtcgagcagggagatcccaagcagatcttcgagcaccccacgcagcaacgcacggcggagttcctgtcgtccaccaacaacgtgctgatgattccggcggccgcctgacggtccgatgaggcggcaggcgtgcccaacggcattgccatcgccgtcagcacagcattcaagattttctctaatagatcaaccaatgagagaccaaccaagagaggggttcgtcatcatgtccaatacccatggagtgttccgcaaggccgtggccctgctgtccggcgtcgccgtgctgttctcgctggccgcgtgtggttcgtcatccgccggagagtccgactcgtccgattccggcaagacctcgaccagcgcacttgagcaggtcaagtccgccggcaagatcgtgttcgccaccgaaggcacctacgcgccgttcagctaccacgattccaagaccaacgagctgaccggctacgacgtggaagtggccaccgccatcgccaaggagatcggcgtcaaggccgagttcgccgaaggcagcttcgactcgctgctcgccggcgtggatgccaagaagtacgacacggtcgccgaccagatcagcgccaccgacgagcgcaaggccaagtacgacttcaccgaaccgtacacctactcgtacggcgtggtcgtgaccaccaaggacaacccgaagaacgtctcctccttcgataacgtcaagggcctgaaggccgccgaaaccggcaccagcaactggaacaagaccgcccaggagaagggcgccgaaatcgtgcaggtcaacgacttcggccaagccgtcgaggccctgcagtccggccgtgccgacgtgaccctcaacgacggtctcgccgtgctcgactacctcaagcagaagccggacgcgaacatcaagatcgccgccaagtccgagaagacgccggccgctcagctgccgttccgcaagggcagcgacgacctggtcaaggccgtgaacgacgccatcgccaagctgcaaaaggacggcaccctgaccaagatttccgagaaatacttcggcgaggacttctcccaggagtgacggccgccgtatcaggtaccgtaacaacgcaataaccgcatcacacaggcaaaggacaaggcaatggacgcacgggtatggtcgatagtggtggattccttcggcaagctccttattccgggacttaccgtgaccatcccgctcaccctgatctcattcgccctcggcctgctgctggcaatcatcgtcgcgctgatccgcgtggccaaagtgccggtcgcggcgcagatcgcctgggtgtacgtgtgggtgttccgaggcacgcctctgctggtgcagctgttcgtgatcttcttcggtctgccctccatcggcatcacgattcccgcgctgccgtccgccgtgatcgcgttctcactcaacgtgggtgcgtacgcctcggaaacgttgcgcggcgcgattctggccgtgccgaagggccagcttgaggccggatacgcggtcaacatgccgtacgtgacgatcatgcggcgcattgtgctgccgcaggcgttccgttcggccttccccgcactgttcaatacgttcatcggactggtcaaggacacgtcgctggccgccaacatcaccgtggtggagatgttcatggccgcccagcgcgtggtggccgtctactacgagccgctggcgctgtacatcgaggtgggcctgatctacctgctgttcagcacggtgctcacctggctgcagcagtactgcgagaagaaactcaacgcgcacttctgacgggtatcatcactcacgacgaagttcgcgacgacaacgaaccataacgagcaattacgatcaaaggagcaaacatggccattgacgtgtacggagccagctggtgtggcgactgccaccgtgccaaggccgcgctgaacgatctcggtgccgcgttcaactggcacgacatcgaaaccgaggaaggcgcggaggatcgcgcggtcgccatcagcggccagaagcacatccccgtcgtcctgtactcggacggcgccttccaggtcgagccttctgcgctcgacatcaagaacaagcttgaggcattgggcgaactgaagtagtttcgcctcagccctctttctgaggtttccgccattcatatctaagggtcggtgacataaaccactggctcttttcgtatatgttccgaacgaatacagattacagaagcaaaacggccatgcctaccattcggccgtcgccattccgccaaaccttggccggttggcgacgctcatggatgcttagcgtcgccaaccggccaaaagctggcaagacggcggcgctcaaaccgcttagcggcgctaccttgccagcgtttggccggataacgacgctgaaaggcgtcttagcgtcgccgagtcgccatggactggcctcttgactacgctgacgtgtcgtgagcgtcgctgtcctgccaaaccttggccggttggcgacactgggccccgcaatcgctgccgacctgccagtccgtggcggcttgacaacgcggggatgctgttcttcggacttggaccccacaaaacgactgaaaaacgtgaagccatagcttcgtataaatgattgatataacaacgccggtcagactgcaatcattttgcgttaaggtcgggaaacggaacgcgagaggaacggatgcgcgacatcagacttccgcgtcatcttgactggcaatcagtcatcggacgaatcggtgtgattccgcaatgatcagttccggtgagacatgattgcgttcacgcaacaagaggggaaacatagcaatatcaaccaagccgcagcttattgcccgcggcattaaagcattggcggtggcactcgtcgccgccaccgcgctcgcaggatgcggtgcggccggcaattccaagaacaacagtgccactcaatcttcgggtaacgtgcaggccatcaagaacgagacgataaaggctacggacccgtccaagagcccggccaacgccaacaagcgtaccgacacgttcgttgccaccatcaagaacccaggtggcgtgttcctgccgtacttctaccgcaacgcatgggatgagaacattaatcagccgattttcgccgcattggtcgtctatgacaaggacggcaaccccgcgggcgatctggccaaatcgtgggaagtgtctaaagacaacctcacctacacctaccatcttcgcgacagcgcgaagttctctgatggaactccagtgaccgccgatgatgtggctttcacgctgacccttgaaaatgacccggcctacaactttggcctcgccgactttaccgacatcggcatcaagggcgttgcggattaccaatccggcaaggccgattcgatttccggcatcaaggtcgtggatgacaagaccgtttccgtcaccactgaaaaagtcaaccctgtggcactgaccaccatcggcagctacgtgcggtccaagaagtactacggcaaggactaccggcgcggcaagctcgattacctgcagcagttctacgacaagccactgggtgccggcccctacgagctcgacaagtacgtgcccggccaggaagtgcggtacaaggcggatccgaactattatggcagcaagccaaagatcgaacacctaatcttcaaggtcgtcaccgatgacacggcgctccagtcctaccagaatggcgataccgataccgacgtgtttattccggattccgatgtgctgtcccagctcaaggacttcggttggtcggatgtgaacatccgtaccaatccgtactactcctattccgagttcaacaccaagaagccatacctaaccaaggaagtgtgtcaggcgctgtactacggcctcgatcgcaagcagattgtcgccgcttggtacaagggctacggcgaagtggccaatgtatacgctccgccgagcaactgggcatactccaccaagggcgtgaacacctacgaatgcaatcccgacaaggccaacgagcttctggacaaggatggttggaagaagggccccgacggcattcgtgagaaggacggcaagaagctcagcctggtctacgtgaccaaggaccagaccgacccgatcatcagcatcggcaaggagcagtggaagaagatcggcgtcgacctgcaggccacggtcaccgatcagaacacggagaccacgcggttgaagtccggtgactacgatttgattaccttccgtacctcggtcatcaacgatccgtatgaagcggtcaagccgttcggtaccactgacccgcaggtcaatgataacggctacgacaatgccacggttcgtaagctggtcaaggaaagcatcgccaagtccgaccgcgccagccgtgagccgatttatcagaagatctatcaggaactcagcaacgatccgccgtatctgctcattggatacatcaagggcttcaatgcctggaacgatcgtattcagaatggtgacaagttcttccgcggaaccggtgactcggcgattcagctggcaaagctgtccatcaagaaccagtgacggcattccacacgagatgacgcctcgcggcatggacccaataggtctgtgtcacgaggcgtctcgccgtgcagagtgacatcctgccttccatccaaacccccactaggcataaggctcattaatccatgctacgttacacgctccaacgttttctgctgatgatacccaccctcatcggcgtatccatactggtcttcgcgctgttcgcgatgatgccaggtgatttcttctccggagacaccaaactcacccaggtgcgactcgaccaattgcgtgaggcctatggcctcaacaagccggttctggaacgttacttcttgtgggtaagtcaactgctgcatggtgactggggtttctccatgcaatacaaccagccggtatccaaggtcatcggcacctatatctggaactcgttcctcgtgtcgttcggggcattcatcatcgcgtgggccttggccatcgcggtgagcatctattccgcccgccacaagtattcgctgtttgaccgcataatcactttcgtcgtgtttgcggtgatgtcgctgccatcgttcttcgtgggcctggtgcttatcaagactctctccatcaatctcggcatcatgccggtcggcggactgatcaccaccggatccaactacacgggagcacagtattggttcgatgtactgcaccatgccatcctgccgatgctggtgatcgtatgcgtgaacttcggcccgttgacccgttacttccgcaccagcatgctggataccctgagtatggacttcattcgtactgccagagcaaaaggattgcccgaatcacaggtcatctacaagcacgcgttgaaaaacgcgatgctgccggcgattaccctgctgggattccgtttgccggccctgttctcgggcgcgatcatcaccgagcaggtgttcagctggccgggtatcggacgcatccaattcgaatcggtgaccacccgtgactatgcgttgctgatgtccattaccatgctgctggccattctgacggttgtgggcaatttcatcgccgacgttttgtacacgatggccgattctcgtgtacgtatcacgcgagcaaaggggagtgccaagtgagcgttcgactgccattcgcatcccgcaaaaccaatgccgaacgggatgaaaaactcgctcgggatacgacttgcaccggtggctcgctgtggcgtgacgcgatgcgttcgttcctgcacaaccggtccgcgatcatcgcattgaccatcttggcgattatcgtgctgatcagctatgtcggtcctccgctctctcactacgggttcgaggattacgacgtgatgaacatcaagcaggggccgagtctggctcatctgcttggcaccgacaattatggtcgagacgtattcacccgtgtgatgtacgccggccgaatctccattgccatcggtctgatttcgatgattgtctcagtggtgttcggcgcggtattgggtgtcatatccagctacttcggcggctggatggacggcattatcatgcgcattgctgatatcgtgctgtccattccgagcatgccgcttatgttcatcatcgcggccctgctcagcgccttcaaagtgcccaatgacgccaaggtgtatttcgtggtcatcatgctgagctttgtcggatggccgagcattgctcgtatgattcgaggacaggtgctttccatccgtgagcggatgtatgtgcgggccacagatgtgctcggtctgggcctgggctccaaattgttccgacacatactgccgaacacgtatccgattcttatcgttgaagccacgctggccaccgccaacggcatcatgaacgaatccgcattgagcttccttggtctcggtgtcatgcagccgacgccttcctggggcaacatgatttcggcggccaacaacctcatcgatttccagatgcatccttggctatggatctcgcctggtatcgcggtgtccgccacggtcatcgccatcaataccattggcgacaggttgcgcgacgctttcgaccccaaacagtattcgtgacatgtgatcgaataatccgaatcatgcggtcatgcaccacggtgcaggtaacacgagggaacatttatgagcatcatagtatcgaacaaaacagcacataaagaggacaaagtcgatgattccgatgacatcgtacttggtgtgcgccacttgaaaacatacttttatccggatgacggctccgtacgcaaagccgtggatgacatcagctttgacgttcgccgaggacgcgtgtgctgtttgatcggcgaatccggttccgggaaaagcgccacggccatgtctttgatcaatctgatcgatcggcccggccgcatcgaatccggcgaagtgctgttcgaagggcgtgatctgctgaccttggatgtcaagcagatgcgcgaggtgcgaggtgccgatatcgggctcatcttccaagaaccgatgcattcccttgacccggtgttcaccgttggcgaccagcttgttgaaaccattctggcccatgccgatgttccccgtccggaagccgagacacaggcgattgcatggctcaaacgtgtcgaactgccgaaccccgaactcatcatgacggcctacccgcatgagttgagcggtggcatgctgcaacgagcgatgattgccatcgccttgtgctgcgagccccgcctgcttatcgccgatgaaccgaccacggcattggacgttaccgtgcaggctcagattctgcgtctgttggtccgactcaagaacgaaatcggattgtcggtgctgttcattacccacgatttgggcgtggtggccgaaatcgcggatgacgtactggtcatgtatgacggtcatatcgtggaacgcaacacggtggagaacatcttcgaccatcccaagcatccatataccaaggccttgttgttgacccgacccatcatcgggcaaaaacttaagcggttgcccactttgcatgaggtcatgcgggaagtggatgacggtgaaatcacccagccacaggactggagcaccttggccgccaccgtggaagacgattcgattgccgaggtgggtgaacgctcccggcccggcactgacgattcatgccagactaaggagcatcagggccagcctattcttcacgtaagccatctgaagaaatactacgaacgggtgcgtggtttcggctcgcgtggcaacaatgtgaaaaaggccgtggacgatgtcagcttcgacgtgtatcgcggcgaaacggtcggcctggtgggggagtcaggcagcggcaaaacccctatcggacagacggtgctgcgtctcaatgccaaaaccgatggtgaggtgctgttcggcggcgaggatatcttctcgctcagcaatgccaaactggcccgaatgcgcacccgcatgcagtacgtgttccaagacccatacagtgcgcttaacccaaggctgaagattggctcggccatcggagaggcgttgctgcatcacaagctggccacgaaacgtgacgtcaccgataaggtggtggaaacgctggaactgtgcggcatggactcctcctgcctcaatcggtacccgcacgagttttcgggcggtcagcgacagcgcatcgtcattgcccgtgccatggccttgcagccggagtttgtggtggctgacgaaccggtgtccgccttggacgtatccatccaggcagagatcatcaacctgttcagcgagctgcaacatactcgtgatgtatcgttcctgttcatctcccatgacctaagtgtggtggagcatatctgctcgtcgattctggtcgtgcataatgggcggattgtggaatccggttcggtgcatgacgtattcgaccatccccaggatgagtacaccaagagtctgttggattcgattcccacaagccaccccaaataccgcacgatcgcctgaattggcgggtggtatagatttttcgtatgcgggtgggggcgtggcctgtgccggaacgtggtggtatgggtgcagggcatccatgctgaacatcaaagatgggggaaaacaatatgacgaacactgaactgcagcgtcagctggaaacgtactacacgtggttccatcagcatcccgagccggcgtatcaggagaccgaaaccacggcgcacatcaaggagatcttggatgaacatggcatcaggattctggacagcgggctgaagaccgggctcatcgccattatccggggcgagggcgagtccgcgagtgtcggccatgtggtggcggtgcgtggggacatcgatgcgctgcccatcctggaacagaccggcgtgccgtacgagtcgctgaacaagggctatctgcacggctgcgggcatgactacaacctgaccgtcgcgctaggcgctgcactactgctgaacgagcgcaaggcggacttcgccggcgaggtcaaggtgatcttccagccggccgaggaggtggccgccaccaaggaggtgcccaccggcgcggtcaccgtaatcaacacgggagccctggacgatgtcgaggcgtttttcggcacgcatgacaccaaccagggcgagcccggcaccgcgttcatctccgccgggccggacagcggcgcggtcgacaaataccgcatcaccgtgcatgggcgaggcagccatgccgctcatcccaacggcggggccaacccgattcgcgtggccgccgcactcatcgaaggcatccagtcgattgccgggcaggacgtggacccggtgcatccccgcgtcgtcaccgtcacccacgtggaagcgggcagcacctggaacgtgattccggcaacggctttcctcgaaggcactgtgcgcacagcattccccgaagaccgcatcatgattcacgaccggctgcgcgcaatcgtggaaggcatcgcatccgcgtacgatgtcaccacggacttcgaatgggagtacggatcgccctcggtcatcaatgacgcggattggtcggcgctgttcgcgtcaaccgccactgagctgggccttaaggtcgagccgtcgcagccctcgctcggcggcgaggacttctcctactatctaggcaaggcaccgggcgcattcgcccatctcggcgtcggcaacggcgaccggccgatgcacggacctacgttctacgccaagctcgatgccatcgccgcgggtgcggacttgctggccaccgtggcgcaacgtgcgctcctgcggctgggcgagcagcggtagtcgccgcgcggcaatagattgtcgccgagtacgttgccggtcgctggctgtacaccaatgcgtacaattcccgggcgatttgtccgtcggctgatacgatgggagtcaccagccggaaccgaaggtggtcccgacgcatagtgaaaggaaagtcatgtccgtattttttgggggagcgatgatcacctttctggtcatcctcgtcattatcatcgtgctgctgggcgccgcattgttcatcgttccgcagcagcaggcgtacatcatcgaacgcttcggcaagttcctgaaggttcagttcgccggcattcacatccgtatcccgttcgtcgaccgcatcgccatgaagaccaacatgcgcgtcaaccagctcaacgtgcagctggaaaccaagacgttggacaacgtgttcgtgaccgtcgtggcctccacccagttccgcgtgaacccgaacgacgtggccaccgcctactacgagctgcgcgatccggccggtcagctcaggagctacatggaggatgcgttgcgctccgccattcccgctctgaccttggacgacgccttcgcccgaaaggacgacgtggcgttcgatgtgcagaaaaccgtcggcgccgagatgagccgtttcggcttcaccgtggtcaagacgctgatcaccgccatcgatccgagcccgcaggtgaagaacgcgatggactccatcaacgccgcccagcgcgagaaggaagccacccgccagcgcgccgaggcccaacgcatccagatcgagacccaggccgccgccgaagccgagaagacccgactgcagggtgaaggccaggccaactaccgccgtgagatcgccaatggcatcgtcgaccagatcaagagcctgcaggccgtgggcatggacatcaacgacgtgaacaacgtggtgctgttcaaccagtatcttgacgtgatgcgctcgctgagcgaatcgaacaacaccaagaccgtggtgctgcccgcttccacgcccggcggttatcaggatctctacgagcaggtcaccaaggccatgctcaccgcggccgagacgaacgacgccgcgaccgccgccggcaagtagcggtgcttgtggccgctagaccgcataatggcgtatgtatcggtgaagcccctcccagtgaggggcttcaccgtgtttgatgggcttatgacacggaaaaacaacgattgtgccatcgccggacggggtctgacgtcattgcgccattgtgtaatgggctatggcagaatcgttgttttttgggcttgtgctatgcctgaaggaatgccggaatggcttcggccgccgcgtatcccttgcgatacatcatttccaggccctcgaagttcttcttcagggtgttgagaccatacaggtcttcgggtgcgaggatcagcactttgccttccgcctcgtaatgcttggcgagttcgagttcgtcgttgtaggtcttgtagcgcatgcgcagcctctcggccgcggcggggtgggagcgttcgaggatgcgggccggggccagatccctctgctgcttgcgcacttcgtcgcgcaggcgggagagaatcaggatcacgcgatcatagccgtcatccagcgccttctgtaccgggatcggatcggcgatgccgccatcgaaatacggcacaccatccaccacatacggctcgcaggccaccggcacggcggacgaagccttgatgatgtcgaaa

SEQ ID NO: 2603 - DNA, 17408 bp, Unknown
  R222_15m  MAG No. k141_15285
cacccagaccgagcacgggatcattctgcacgacgacgtgataggccgcaccgagggcgtggtcgtcaccaccgtcaccgccaagcgcgaggctcaggtcaatgcggaccatcccgaacgcgaccggaacaagccgtggaaatcgtcgcgcgccatcggcggctgggagtacgcggtgatgcgcccgcgactggccgattatgtgctttcgatgccgcgcggcgcgcagatcatgtatccgaaggacatcgcccaggtcattcagctcggcgacatccgctccggcatgcgcgtgcttgagtccggtgccggctcgggcgcgatgagcgtgaacctgctggacgccgtgggcgagcgcggccatctgaccacgattgagctgcgccccgaattcgccaaagtggctcaggccaacgccacgctgtattacggtgaagcccccagctggtgggatctcaaaaccggcgacttcgactccgtggccgccgaactgcccgaacactggttcgaccgtatcatgctcgacatgctcgacccgtggaacagactcgagcaggcataccgcgtgattgcccccggcggcgtgttggtcagttacgtaactaccaccacgcagatgagtcgactggccgaagccctgcgcgcggccggttgctggaccgagccgcagatccaggaatcgttcgaacgcacatggaaggcccaaggcctcgccgtacgccccgaccaccagatgatcggccataccggtttccttgttatctcgcgcgccatggcctccggattcgaggcgctcagaaagcgcgatcgcgtgaccaaggacacgcagaccgacatcgactcgctcaccgacgaacagcgtgaggcgcagatcgaggaactggaactgcgcgacatctccgaccacaaactacgtaaggtgttgcgcgacctcgaccgtcaggtgggagaactcggcaacacgcatgaataaccgcccgacgatgagtttgtgaacgctcacacacctctatactggaagcaacaccacaccgccacaccgggcagacggttcgtgaagggagccacggatgggcatcaagctgagcaaagtcgccaaagcagcgaaaaaatacgaccatatcctcatcatcatgaggcatgccaaggccgagccgttcggcgacaagggtgactcggagcgcgagctcaccgacaaaggtctgaaacaggcgaaggccgtgggcaagggcatcgagtcgctgggactggtgcccgaccagatctcctgctcgtccgccacccgcacgcgccagacactggaccgcatgctcaagacctttggcgacaagccgatcgtcgactaccgcatcagcctgtatgacgggggagtgcaggcggtgttcgacgagctcgcccacgtcaaggccaagaaccgcgtgttcatgatagtgggccacgagccgactgtgtcgatcagcgcccaatggctcgcctccgccgactccgacggcgaacgactcgacctgctcaacttgggactttcgcccgcatccatcgtgatcatgggatcgaacaaaccgttcgacgaatggcaggtgcacagcggcgaactgctcgcggtcatcaatgtgaaagacttcgactaaagcggatataaattccatctataacgacactctgcggccatttataaggggtggaatccggatgttttgctaccctaagtcgggttacgaacgcatacattggaggattcatgtccactctgacttccgtctccggcttcccccgcatcgggcagaaccgcgaactgaagaagatcatcgaaggctactggaagggtgccaacgacctcgccgccgttaaggccaccgccgccgaactgcgcgccaagcactggaagctgcagcaggccgccggcatcggcctcatccccagcaacgacttcagctactacgatcagatgctggacaccgccatcctcctcaacgtgattccgaagcgttacgagcgtctcgccttcgataaccaggaggacacgctcttcgccatggcccgcggctaccagggcgacaagggcgacgtgaccgccctgccgatgaagaagtggttcaccaccaactaccactatctggtgcccgaagtcgagtcggccgcggagatcaagctcaactccaccaagccgttcgacgagttcaacgaggccaaggcgctgggcatcgacaccaagcccgtgttcatcggcccgtacacgttcctgaagctcgcccgcaccccggaagccaccgaactcgagctcgacaagggcctggtcaacgccgtggccgccgtctacgccgaagtgctcgacaagttcaacgaactcggcgccgcatgggtccagctcgatgagccgtacctcgtgctcgacaaggagccgggcgatgtggagctcttcaagaccctgtacaccaagatcctgtccgccaagggcaacgtcaaggtgctgctcaacacctacttcggccacatcgccgacgtgtacgagaccgtcaacctgctcggcttcgacggcatcggactggacctcaacgaaggccgtgaagagaacctcgaagccgtcgccaagtatggcgtggcctccaacaccgccatcttcgccggcgtgatcaacggccgcaacatctggcgcaacaactacgccacctccctcggcctggtcgacgccctgaagcaggtcaccgccaacgtggccgtctccaccgcatcctccctgctgcacgtgccgttcagcactgaaggcgagaccggcatctcgtccgaagacctcaagcacttcgcgttcgccgtggaaaagctgaccgagctcaaggaagtcgccgctctggccgacgccaccgaggacgagaagaaggcatccgccgccctcgccgccaaccaggccctgttcgacggcacccgcgtggccgccgacccggccgtcgccgagcgcatcggcaagctgtccgacgccgactacgtgcgccagcctgcccgcgaggagcgtcaggccctgcagcgcgaggccctcggcctgccgctgctgccgaccaccaccatcggctccttcccccagaccaaggagattcgcgccgagcgcgccaagctgcgcaagggcgaggtcaccaaggaagcctacgacgagttcatcaaggcccagatcgacgccgtcatcaagaagcaggaggagatcggcctcgacgtgctggtccacggcgagttcgagcgtaacgacatggtcgaatacttcggccagaacctcaacggcttcctgttcaccaagaacgcttgggttcagtcctacggcacccgttgcgtcaagcctccgatcgtctggggtgacgtgtcccgcgccaacccgatcaccgtggaatggtctgcgtacgcccagtccaagaccgaccacgtgatgaagggcatgctcaccggcccggtgaccatcctcaactggtcctggccgcgcgaggacatcacccacgaggaacagaccaagcagctcgccctcgccatccgcgacgaagtgctcgatctcgaggccgtcggcatcaaggtcatccagatcgatgaggccgccctgcgtgagaagctgccgctgcgcaagtccgactggcacgtcaagtacctcgactgggccgttccggccttccgtctggtgcactccgccgtcaagccgaccacccagatccacacccacatgtgctactccgagttcaacgacatcatccgcgacatcgacgcgatggatgctgacgtgatctccttcgaagcctcccgtggcgatctggtggtgctcgacgccattcatgacgcgcacttcgagaccgaggccggcccgggcgtctacgacatccactccccgcgtattccttccgagaaggaaatcgaggatcgtatctacgagatccttgacaagatggacgtcaagaaggtgtggatcaaccccgactgcggtctgaagacccgtggtaacgccgagacctggccgagcctggagaacctggtcgccgccgccaaggccgtgcgcgccaagctcgacaagtagcggaaatcaccgagctccctctgtatgagggagctcgggtttatgtaaggaaatcagcatgcattccccgatgttcacccttgaggtctttcccccgaagcgcaacgctcccgtggacaccatctatgacacccttgacggcctggaggggctgaaccccgacttcatttccgtgacctacggccacggcacccattcggatcgcaccgccaccgcgcgcattgctcatacgataagcaaggagtacggcattcccgcagtcgcgcatctgaccgcgttgtattccgacaaggcgaaaatcgacgaggccctcgacatgttcgagcaggccggcgtgagcgccgtactcgcattgcgcggcgactacatcgacggcgagcagctggtaggcgagttcaaccacgccagcgacctcgtgtcatacatccgctccgtgaagccgggcctcaaagtgttcggcgcctgctacccggaaggccactaccaggctgactcgctggaccaggacatcgaaaaccttaagatcaaggtcgatgccggcgtcactcacctgatctcccaactgttctacgacaacgaggacttctatcgcttcctcgacaaggcgcgcgccgccggcatcaccgtgccgatcgaggcgggcatcatgccggtgcgtggtgccaagtccgtgcgtcgcatggccgaacgcaacgcctcgcgtatcccggacaagctcaacaccctgctgaacaagtgggaggacgacatccagtccctgcgtgccgccggcatcctctacgcttccgagcagatcgccgacctcgtggcccacggcgtggacggcgtccacctgtattcgatgaaccaccccgccaccacgcgccgtatctggcgcaatgcggaaccgttgttcctcggtacgcaaggttgacgcatatcgcggcgcggcgcatctcaatgcgtcgcgccgcacgttaatctgctggcgaaacccagagttcccccagcggccgatggatatcatgaacgtacaagccaaccaaagcgatggaaggaagtccgttatgtgcactggtgtccgtttctccgatgatgagggcaacacctatttcggccgtaatctcgactggagtttctcatatggggagaccatcctggtcactccgcgcggctaccgctatgacacggtgttcggtgcgggcggcaaagcgaagccgaacgcggtgatcggcgtgggcgtggtcatggccgataggccgatgtatttcgactgcgccaatgaacatggtctggccatcgccggcttgaatttccccggctacgcctcgttcgtccacgaaccggtcgaaggcacggaaaacgtcgccacgttcgaatttccgctgtgggtggcgcgtaatttcgactccgtcgacgaggtcgagaaggcgctcaggaacgtgacgctcgtctcccagatcgtgccgggacagcaggagtctctgctgcactggttcatcggcgacggcaagcgcagcatcgtcgtcgagcagatggccgatggcatgcacgtgcatcatgatgacgttgatgtgctgaccaatcagccgacgttcgacttccatatggaaaatctgcgcaactacatgtgcgtcagcaacgagatggccgaaccgacttcatggggcaaggcctccttgaccgcctggggtgcgggtgtgggcatgcatggcatcccgggcgacgtgagttccccgtcgcgcttcgttcgtgtggcctacaccaacgcgcattacccgcagcagaacgatgaagccgccaatgtgtctcgcctgttccacaccctcggctccgtgcagatggtggacggcatggcgaagatgggcgacggccagttcgaacgcacgctgttcaccagcggatattcgtccaagaccaacacctattacatgaacacctatgatgaccccgccatccgttcctacgccatggccgattacgatatggattcctcggagctcatcagcgtcgcccgatgactccttcccggctcatgccccattcggagggcatgagcgtatatagtggaatcttatggaatcggcgatgttcaaacccagctccatggatctcatcagggcaggtctgcaagacctcgacaaggcccgcaccttgttcgaccagctcaagacggacgacattcccgatgagcgatgcgccgaactgctgagcatgctggcccacgcctgcgaccccgatatggcattgagcaatttcgtggatatcgtcaacgcgatgcaatccagccagcgcgatctgaaacacgtcatccccgacaacgacgccctgaagcgtctggtcacggtgctcggcgtctccgacgcgatgggcaagttcatgcgcttcaagccgcagcttgtggaggccgcagcagtcgacaactgcaacagccatctgttcaatcacgcgcaacgccgtgcacgtctgctcaaggcggtcggcgcggacccggacgaatcggccatgcccgtcgcctccaaggatttggccgaagcggccacggccttgcgttccagctaccggaaccaactggccgccatcatcgcccaggatgccgtggcggacgacccggcctccatccaaccgaccatcagccgcgaactgtccgacctcgcggacgcggcgctcgaaggcgcgctggccatcgcccgccacgaaaccgagggcagcgagcacgtgcgcttcaccatcatcggcatgggcaaactcggcgcacaggaactgaactacgtctccgacgtggacctcatctacgtggtcgaaccggccgacaaggacgtggaccatcagacgctgatccgcgtgggcaccaagatgggcaccatgctgcagcgtgtctgccagtccgccatcatgggcgtggccgagcagccgctgtggcagatcgacggcggcctgcgcccggaaggcaaggacggcgcgctggtgcgcgtgctctcctcgcacaagaactactacgagcagtgggccgagaactgggagttccaggcgttgctcaaggcccgcccggtggctggcgaccctgacctcggccgggcctacatggatatgactcggccgttcgtgtggagcgcgtccaagcgtaagaacttcgtctacgactgccagaaaatgcgcaagcgcgtggaagatctgattcccgcacctctgaaggatcgcgaaatcaagctcggccgcggtggtctgcgcgatgtggaattcaccgtgcagatgcttcagcttgtgcacggccgtaccgatgaatcgctgcgcaccagcaacacgctcgactcgctgcagcgcctgtccgaaggcggctacgtctcgcgcaaacaggccgtgcgcatgtcccaggactaccgcttcgagcgcgtgatggagcatcgccagcagatctggtccctgaagcgcacgcacctgttcccggacctcggccgggcctcggtcggaggcctcgaaaagaagcgcgacatcgacgtggatgagctcaaccagaaccaggagctgcgtcgcctcgcccgcgcattcggcctgcacccggaagaactcgtcgacaaatacgacgacacccgtcgtgaagtacgccacctgcacctcgacatctactatcgcccgatgctgccggtcaacgcccagatggagaacgaccagatcgtgctgagcgtcgaggccgcacaggaacgattcgaatccatcggcttcggcgacccggacgccgccatccgccacgtgcaggcgctcactgccggcgtgggacgcgcggccaaaatcaaccgcatcatcctgcccgccgtcttgcagtggctgggcgagggccagaacccggacatgggcctgctcaactggcgcaagctggaggagaacttcggcaccgaatccggctacctcggcttcctgcgcgactccacctccgctgcccagcgtctgtgccacatcctgtccaactcgcgattcctgggcgacgcgctcaacaagtcggtcgaatcgatcagttggctcggtgatgacggcaatctgcaggcccgcacgcgcgaggcattggatgtgcagaccggctcggcgctggaacgtttcggctcgaacatcaacgagttcgccacctccatgcgcgccatgcgccgccacgaaatcgaacgcatcggcctgtcttggatgagcggtgtgatcagcgactccgacagtctcaaggccatgaccgacgtgtatgacgcgatcatcgatgcctcactgacctgggccgtgcgccaccagatcgccgcgttcggcgtcgaaaccgcgccggccggcatcaccgtcatcgccatgggccgttacggcgggcgcgaagtgaacttcagctccgatgcggatgccattctcatctaccgtccggccgacgatgccgacgacggccaagccaacgccttcgccaagaaggtcgtggaagacctgcgcaacatcctgcaaggcccgacgacgctggaaccgaagatcgaactcgacctggacctgcgcccggaaggcaagaacggcccgctcgtgcgctcctatgcctcctgtgaggaatactacgaatcctgggcctcgacctgggagcgccaggcgctgctgcgcgcccggtacgcggccggcgacgccgaactggcgcgggacttcctgatcaacatcgccgacccgttgcgctacccgaccacggagctgaccgaggccgaattgcagaacatccgcaagctcaaggcccgtatggaggccgagcgtctgccgcgcggcgtgcgtcgagaacgtcatctgaagctcggcaagggcggtctgtctgacgtggaatggaccgtgcaactcatgcagctccagcacgccggcgatatcaaagatctgcgcgtcaacggcacattggaggcattggacgtgctggaggccaagaagctcatcagcgctatcgatgcgattcagctgcgcaaggcatggacgttgtgcaccgcggcccgcaacggcaactatctgtggagcgggcgcgccaaccaggccgatattctgcctgatgacatctattcgctgggcggcatcgccgtctacctcggctacggcgcccaccgcggccagcatttcgagaacgacctgctggccgtgatgcgcaaatgccgtgacgtatgccagcgcctgttctacgggcaggccgaagacgaggcgactgcggcaaccaccgccacggcctccgccgcaacgcagcagccgcaaaccgcgcctcgcccgcgtatgcacgtgatcgcaccgcgactggagcggaaccgacgccgcgcgcagcgatagacctttcttgtattgcgttcactacgttcattaggtcgattcatcgttcattaggtcggtccgccgccgcataccttgttggaatggcggcattccaacaacagatacgagggtgcagtgacctaatgaacgtcaaatcgacctaatgaatgagctctggcgttccaaagcagatatcagctatacagacacagcatattcgttggattttcaggtgaacactcggtgaatgcggctgtccgaaaaatggcgtaagttatattaggtcacacaagggtggccacctgaaaaccacgagcgaaaaggtgagccttgtctgaagaaacgccaatggtcggcaaaagcgtcgtaacgctggacggcctgtctacaaaccagattctcgacctgctgcataaggccgaatacatcgattcccaccgcaaagaggttgcccatacctgcgatgggcgagtgctggccacgctgttctacgagccctccacccgtacgcgcctgagctttgagacggcaatgctgcgtctcggcggcaaggtcatcggattcgccggcgcgcagctggcctccgtgaccaagggcgaatccatcgccgacacgttgaagaccgtgtccaactacgtggacgtggtcgccatccgtcacccgaaggagggtgccgcgctggtggcctcccgcgccgcatccgtgccggtgatcaacgccggcgacggcggccacatgcatcccacgcagacgctggccgacctggccacgctgcagtcgcgcttcggccgcatcaccgacctgaccgtgggactgtgcggcgatttgaccttcggccgcaccgtgcactccctgatcgagaccctgtgccgcttcggcaacgtgcgcttcgtgcttatcagcccggacgagctcaagaccccgcagtacgtgatcgaccgcatcaacgccaccgacaactgctcctacgtggaagtgcgcgacctggcctccgtgatcggcgacctcgacgtgctgtacatgacccgcgtgcagaaggaacgcttcttcaacgaagacgactacctgcgcctgcgcgacacctacattctcgacgaagaaaagctgcagctcgccaagccgtccatggccgtacttcacccgctgccgcgcgtcaacgaaatctccgtggacgtggacgacgacccgcgtgccgcctacttcgaacaggtcaagaacggcatgctcgtgcgcatggccctcgaaagcaccgtggtgggcgacgaactacccggatacgaaccgctcaaccccaaggaggttcaggcctgatggaagtcaccagcattcagaacggcatcatcatcgaccatgtgccggccggaacctcgctgaaggttctcgaatacctgaaaatcgacccggccaaaaccaagcttgcgctcatcatgaacgccaactccaagcgttacggctccaaggacatcatcaaaatcgaggatgacaaggacatcgacctcgatgtgctcggcttcgtggcccgccaggccaccgtagacgtggtgcgcggcggcaagatcgtcgaaaagaagcagccgaacctgcccgagcacatcgtcggcgtgatctcctgcgtgaacccgcgctgcgtgaccaccaccgagcccggcatcaagcagatgttccacctcgtgcactctgaacggctcgaataccgctgcgactactgcgacgaggaagccaaactgtgagcatcaccctacgcaacatcaaggtctggaacaccggcgaagtcatcgacctcatggtgcccgggaccgctgccgcctacttcgccgacacctccgccgtggctgacggtgccgatatcgacgccaccggactgaccgtggcccccggtttcgaagacccgcacgtccacttccgcgatcccggccagacctacaaggaatctatggcctccggctgccgcgcgtccgcatccggcggatacacgaacgtgctcatcatgccgaacacgttgccggcactggatgggcagaccgtgtctgacctggaagcggccggtgcgaaagaggttctggatgccggcttcgacaacgtcatcgacttcctgcagcagtacgatactgcgcacgatgttcaattgccggttcgttacgatctgtgcgtgtgcgcgtccaaggatcgcgccggtcatgaggcaagcgacgttgccgactggctcaggtacgtgcccggattcgaggacgacgccaagacgccggccatgctcacgcaccccatcaccgcaattagcgacgacggttccgctgtgacgccggagatcctggaccaggtgctggagaacgtcaaggcctccgacctgtacctaatcgagcattgcgagcatcacgatacaggtgccgtgaacgaaggcccggtctcgcgcgaacttggcgtgcccggcattccggaagacaccgagctcaagatcgtggcccgcgatatagaagcggcccgccgcactggtgtccacgtacacttccagcatgtgagcactgccatctcgttcgaggcgattcgcaaggccaaggccgaaggattgccaatcacctgcgagaccgcgccgcactatctggcgttgagcgacgaggcgctgctcaagtacggcacgctcgccaagatgaatccgccgttgcgctccgaagcggaccgcaaagccaccatcgcggccatcgccgacggcaccgtggatctgctggccaccgaccatgcgccgcacacgttggcagagaaggaactcggcttccttgaggcgcccaacggcatcatcggactggaatgcgcgtacggcgtgtgccacaaggtgctcgtcgacggcggcttcatttccgatgagcgtctgatcgagctcatgtccgtgggacccgccgaactcatggggcatgtgccaaccgacgtggccgcgctggtcgaggactacgccgaacccgcgcccactggggatgatccggatggcgtgattgcgggggagagcgacgctcagccgcagcgtgaaggcgtcaaccgactgctcgacctgagccgcgtggatgacgccgacaatgtcgacctcgtggtgctcaacaccgctgaggaatggaccgtggaccctgaacagttccactccagggctcgtaacaccccgttcggcggctggcaggtcaccggacgccccctcgccacgatcatcggctcccagctgatgttcagccgtctgtagataacataaggagcagcatggatcgcctgatcgaagcgattgacaacactcagaaccccagcgtcgtgggcctcgaccccaccgaggcgttggtaccgccgcaggtcgtggcgagctttgccgacgaggtgcgtgactcggtcgaatccccggaggaaatcgaatccgcgcagctggccgtcgcctacttcgaatacaaccgcacgatcatcgacgccatcgccgacatcgtgcccgccgtcaaaccgcagatcgccatgtacgaggcgctcggccccgccggcgtggacatctacacgatgacctgtgaatacgcggcccagcagggcctctacgtgctcggcgacatcaaacgcggcgacatcggctccactgcagccgcctacgcccaccacctgaacggcgtgggcgacttcgacccgtggcatgaggatgcggtgaccgtcaacccgtatctcggcaccgacggcatcaccccgttcgtcgaggccgccgccgaagccgacaaggacatcttcgtgctcgtgcgcacctccaacccgtcctccagcgaactgcagatgctcgacctggccgacggcacgaaggtctacgagcatgtggccgatctcgtggaaggctggggcgccgagaccatcggcagccacggctactcccgcgtgggcgcggtggtcggtgccacccaccccgaggaaggcaaggcgttgcgtgaacgtatgccgcacacgttcttcctcgtgccgggctacggtgcgcagggcggcacggccgcggacgtggcaggcatgttcgacaagcagggcagcggcgccatcgtcaactcgtcgcgcggcatcatcggcgcatggaagaagagcggcaagtactccgaattcatgaccgccgacgaggcgctggaccttgtggcgagcagcgcgcgccaggcggcgctcgacatgcgcgataatctgcgggttgccgtatataggtaggtagattgtccggctgtgggctatacgtgagtgtgggctggaaaccggagccgagtgtgtttaactacccctcagtcaacctgcggttgacagctcccctgatagggggagcttgatgtgctgaataggaatgaaatgacaactttcacccccacccatgatgtggttgcggaggcgactgcggccggattcttcccgccgcgccacaacgtcgaaatcacgcaggttacggaactgaccgaccgcgtgatgcgactgacgttccacgacccgttcatcgcctcccacgccaagcccgcccagttcgtcaacctgttcacgcacgacgacttcatgctcatgccgcgtccgttcggcgtcagcgaagtcgacggcgacgaagtcagcgtgatcttcgccgtcgtgggccacggcaccgaacagttggcaggactgcaagacggcgacaccgtcgacgtgctcggcccgctcggccgcggcttcaacctcaaggaagacgccaactacattctcgtcggcggcggactcggcgtgcccccgctaatctacgccgcgcaaaagctcgccgaacacgacgcctcctttgccaccgccgtattcggctaccgcaacgaccacttcgctgaggaatacgtctcccggtacgcggactggtcgtggagcatcgacgacgccgaaggcaacgtggtcgacctgctcaacaaactcgaacaaggcgacgacctgaaggcctacgatcgcaagccgatcatcttgtcctgcggaccgctgcctatgatgaaggccgtggccgcttgggccgccgaacgcggcatccccgcgcagctgagcatggaacagcgcatgggctgcggctacggcacctgcgtgctgtgcaccatcgacaccgtggacggccggctcaaggtctgctccgacggacccgtgttcactcgcgaacagctcggatggggggagtgacgatgagcgcaaacaaccagtccgcgcagggcagcgacaaccacatcaacctgtacgagccccacgtgtggaagcaccacaccaaggtggccggtctggaatggaagaacccggtcggcaccgcctccggcaccttccagtacgccgccgtccgctggttctacgacgtcagccagctcggcgccgtatgcaccaagggcgcctcgcccgtgccgtgggagggcaacccctcgccgcgcaccgccgaatcgccggccgcgaacatcaacgctgtgggcctgcagaaccccggcatcgaccattacttggccgaagacctgcccaagctcaaggccgcgggcgcgttcgtcatctccaatgtcgccggacattgcgatgacgattacgcggcggtcgtggaaaagctcgccgactccgacgcggacatgctggaaatcaacgtcagctgcccgaacgtttccgccggcggcatgagcgtgggcaccgacccggtggccctcgccaatcttatggaccggctgcgcccgatgaccgacaagccgatgatcgtcaaactcacgccgaacgtcaccgacatcaccgtgccggcgcgcgcggccgtggaacacggcgccgacgcgttgagcatgatcaacacgctcaaaggcatgcgcatcaacattcgcaccggccagccgatcatcgccaacgtcaccggcggcgtatccggcccggccgtgctgccggtcggcctggcagccgtctatcgggtgcgcaccgcactgccggagattccgatcatcggactcggcggcatcgacagtggtgagaaggcgctcgaatacctgtacgccggcgcgaacgccgtcgaagtgggtgcggccgcgctcttcgacccggtggccccgctgcgcgtcgcccgcgaacttgacgacctgctggacagccgtcccgaactcgctgctaaactggccgcaggacagacttggaggtaaggaacatcatggcagaaacactcgcacatcgcttcactgaattcctgttggaatccaacgcgctgaagttcggcgacttcacgctgaagtccggccgcaagagcccgtacttcatcaacgccggcgccttcgacgacggcaagaagatcgccgcgctcggcacgttctacgccgaaaagattagccaggccatcgtgcacaacacgattccccgcaacatcgacaccgtgttcggccccgcctacaagggcattccgctggccgtgtccaccgcgatcgcgctgaacgccggccacaacatgaccgttggatacaccttcgaccgcaaggagaagaaggaccacggcgacggcggctggatggtcggcaccccgctgaccgacggcatgaaggtgctgctcgtggacgacgtgatgaccgccggcaccgccgtgcgcgaagtcatccccaaactcaaggccgaggcgaacgtcgaggtcgtgggtctcgtgctctccgtggaccgcatggagaagaccaaggactccgacctgtccgccgtgaaggccgtggaagccgaattcggcttcccggtgctctccatcgccaacgtgcgcgagatcttcgacgccgccgccaagatgaagaactccgacggcaccccgttgctcagccacgatatccagcagcgcgccgccgcctaccttgaggaatacggcgcctgatcgtcttcaacctaaaaccaaaagcgggcttgcgagcccgctttttttattacgatccatgaacagcagtaccatattaaggcagaagctttggcaaggagcgtgctatgaactggttagttggtatagggctgtttgcgctcgtggggatatgcagttacttcggcatcgagcatcatctggacagcaaagcgaacaagttgtcgcaaggtaatgaagaagaccgccgagatgctgccgaattacgtgatatcgccgccaaaatcgatcacggtaagtattacccgatgctgtaacgggcaatctgggcctaaattgatgctatctccgtttcgaggggctgatgtcgtggtttccagagatctacttccgtttcgaggggctgatgcccaagtagaagcagcatgaaaatggcggaatgacgttggggtgatgccgctcatactcgggatatgacggatgaacagccccttgaaacggagatagatgtctccagaaggccaaatcagccccttgaaggcgagatagggttttaaactctgggaccgactcgcctgtgatgaaaacccgctcggcgtagaattaccgtaggttcgttacattcgaacaaggaaggccgccatggggaacatcaccgacgatatccggcaacatttcgacaccttcgccgcactgccgttcaccgaggcggacagtctcgccctgtcccagctggcctacgcgcgcatgccggataacgttccgcgctatcacgaggattcggcggacgtcagcggcatgattcccacggtctccatccgcgacctgctacgcgccgaatgctatgacgccatgttcggcaaggtgtggtcgccgcagatgaacgtcgatctgctgcgtgcgatgggggagagcccgcgctggcgcgacctgcgcgtcggcgaatacgtggatgaattcgacgccgaaaccaccaaacagttctcggcctgcgtcttcgaactgggcgacggcacgctgtacgtggctttccgtggcaccgacagttcgatcgtcgggtggaaggaggatttcacgatggccttccgccgtccggtcgcctcgcaggaggccgctgtgcggtatgtgacttatattgccggccgctgggccgggccgattatggtcggcggccattccaaaggcggcaatctggcggtatacgcggcggccaatgtgcccggcgaaattcagggacgtatcacggccgtgtattcgcacgatggtccaggcttcgatgaggcgttc

SEQ ID NO: 2604 - DNA, 14549 bp, Unknown
  R222_15m  MAG No. k141_15639
accatatcgtgcaggctattgccaatgaggaagtggctgcggctaacgcttcacgcaggaacatccccaagccgttcgagccgaacgtgcttattcccatgacgctggtgccaggcgataccacgcgttgatgctgcgcgtcttcatgcgtgtgcccggtgtggatcgcatcgatttcagcggcgtccacaaccagcggacgcccgtcgatagtcgtgctcatcatccgacttgtgcacatgtgtccgattctgccgaatcggacgtctaagttccgaaaaaagtgttctgtgtgtccgattccggagaatcggtcatgtgtgatgcgtgagatgtttggatgtccgattttgcagaaacggacacattggggtcggacaggctgggttgtgtagaacaccgcatcaaaccggttcgacacgcgcattttgcggtattactggacatcaacgtccctttcgaggtagtatcaaaccggttcgatacgtataagtatgtaaaagcacgcatacactgcgcacacattgcacctgcatccatgaaccaagggaggtcccatgaaaaacaaagtgcagctcatcgcttacgccgatcgtctcggcgatggcactcttagctcgatgaccgacatcctgcgcacccgcttcgacggcgtgtatgacggcgtgcatatcctgccgttcttcactccgttcgatggtgcggatgcaggctttgacccgatcgaccacaccaaagtcgacccgcgtctcggcagctgggacgacgtcgctgaactttccaagacccacggcatcatggtcgatgccatcgtcaaccacatgagctgggaatccaagcagttccaagacgtgcttgaaaaaggtgaggaatccgagtattacccgatgtttctgaccatgagctccgtcttcccgaacggcgccaccgaagaggaactggccggcatctaccgcccgcgcccgggcctgccgttcacccactacaagttcgccggcaagacccgcctggtctgggtcagcttcactccgcagcaggttgatattgacaccgattccgacaagggctgggaatacctcatgtccatcttcgatcagatggccgcatcccacgtcagctacatccgtctcgacgccgtgggctacggcgccaaggaggccggcaccagctgcttcatgacccccaagacctttaagctcatctcacgcctacgcgaggaaggcgtcaagcgaggcctcgaaattctcattgaggtgcatagctactacaagaagcaggttgaaatcgcctccaaggtggaccgcgtttacgacttcgctctgccgccgctgcttctgcactcgctgttcactggccatgtcgaacccgtggcgcattggaccgacatccgcccgaacaacgccgtcaccgtgctcgatacgcacgacggcatcggcgtgatcgacatcggctccgatcagctcgaccgcagcctcaagggcctcgtgcccgacgaggacgtcgataatctggtcaacaccatccacgccaacacccacggcgaatcccaggccgccaccggtgccgccgccagcaacctcgacctctatcaggtcaacagcacgtactactccgcgctcggctgcaacgaccagcactatctggccgcccgcgcagtccagttcttcctgcccggagtgccgcaggtctactacgtgggcgcgctcgccggccgcaacgacatggaactgctgcgcaagaccaacaacggccgtgacatcaatcgccattactactccaccgccgaaatcgacgaaaacctcgagcacccggtggtgaaggccctgaacgccctggccaagttccgcaacgaactgcctgcattcaatggcgagttcagctacgaagccgacggcgacacatccatcaccttccgctggatcgctgccgacggcaagaccaaggccgccctcatcttcgagcccggccgcggactcggcacggataacaccactccggtcgccagcctcgcctggaccgatgccgccggtgaccacgagactgatgatctgctgagcaacccgccgattgccgatatcgactaaccgttggcccataaacgccactccgctgtgcgcgctccaagtagtgcgtccggcgtaagctgggtccatggaaaacaaaccgcccgcagtgcactgaagctagtgcgctcgggcggttttgcatgtggcggggttgcgggtcatgctcagtcggagctggccggtacctcccgccggtgatgagagcaaagaaagagcagcaacatgttggaaccgtacgtgcgcccgggtattgacgaccgcccggatctcgacaaggcattgagtcccgaagacaaggatgccgtggcccgactggccatcaaagatcgtcggcgtcctcccgaggcatccgccgatcagcccgaggcccaggccgtgcgtctggcggccgccggttcgtcggctgctgccgctgccgcggccagcgtggatgcccctgcgcctgatctgtcgtctgcatatctcgatatgcgcgatccgatggtcgccgccaatggtcagcgacccaccacgggccaggtatcccgtctcaactgggggttcttcgccgcttccattctggtcggcgcaccttggatagcattgaataccatcgccatgcccaacgccgtggcgcgtttgttcggctacgacaccgcttctgccatatcggtcaccatcaatccgtccaccggccgtccgctgcccgtcgccactgacttggtggtgcctctggccgtgctggtggtcgttggcgtggtggcctccatgttcgcgatgcccttggtctccgcgctgtccgaccgcacacgtattcctctgggccgccgtaccccgtggatggtggcgggtggcgtgctgtgcgcgctgatcacgctggttctggggcggaacacaggcctcgtagtgctgtgtttcttctgggcgctcatgcagtttgcctatgcgatgatttccgtgccgttggccagcgccatcagcgaacgggttccggacaaattccgtccgcgcattgagcgctggcacggtatcggcgtgatgcttggccaagcgcttggtgtatgcatgggtgcgctcggcgtgatgttcgactccttcacgccgtttgcctacaccgccgtgctgtttgcggtttccggcatcctgaccgtgatcatgctgcccaaggagccttccagccaggagcagccacatcaacgattcgagtcgagccaggtgtttgaccagctgcgtccgccggcacatgcgcctgcattcgcccgtgtgttcgccgctcgcgtgtgcatgatgacgggcgttgggctgaccggggtctttctgtggtatctcgtgcgcttttgggtgtatggcaaggctgtggtgttcacttccgcgccattgaccattcccgcgggcctcctcatcgccggcatggccgcggcaacgctcatcggtgctgcgctcgcgtcctgggccgctgggccgatctccgagaagatcgaggaacggaacatcgccaccactgcagtggtggcggcatcctgcctgctgtatgccatcggcgtggcggtggcatgggggctcggcgtctggtccaccggcacggcacgcgaaaacggcatgctgctcttcgcgctgatctccggattcgccttcggcgtctacgatgcgttaggccttgaactggtgatggactctttgcccgacccgcgccgagccggccacgacctcggcatttatgcgctcgccaactcggccggtctggcgctcgccgccatcatcggcgcgctactggtgaacgccttcgagcacagcttcggctattacctgctcttcccgtccgccatcgtcatggtgctgctggccggaatcgtcaccctcaccgccgagtccgcgcaatgacgggccggtccggctccccggccgccggcggcgttcctccccgcggcgggggcgttcgtctcggcgacgtggcgtccacaatgtgaacccttgctggattggcaagacagccaaacctatgtttacattccagttcaggtcgaacggcctgaggaaataccgaaaggaggccacgcgatgactggattcaatgcttctgcgtttgtatccgcacgaattattagcccgtcttcgctggcggactaattcggcattgatgcttgaagccccgtcaacgaaggcagggccaatcaagctgacacaatcggtaaggccctgcaagatgcggggctttttttgttgcgctcacaaggcttacggcagaatcccgcagacggaaacggtagcggacagtacacggcaacaacacagcaacagaacaacaacctccctgtgagacgaaataatcgcccgccaatgagagtgaacgagagcaaaacaggagtaacaatgactgcagcagtcgaagagactggcttagggcaggcggcaggtaaagccgctaccttggtacgcgattcggtcaagaccgtgatcgccgcatcgatggtcggtaccgccatcgaattctatgacttctacgcctacggcaccgccgcggcaaactacttcccgcacatcttcttctccgcgaaggacaaccccaccgtcgcactgctgatgagcttgctgaccttcgccatcgccttcatcgcccgcccgctgggctcgctgatcttcggccacttcggtgaccgcatgggccgcaagaccacgctggtcgtcagcctgatgaccatgggtgtcggcaccttcctgattggctgcctgcccacctacgatcaggtcggcgttggcgcagtcgccatcctctgcctgctgcgcttcatccagggcatcggcctgggcggcgaatggtccggtgcggcactggtcgccaccgagaacgcgcctgaagacaagcgcgcactgtacggctccttcccggagctcggtgccccgatcggcttcttcctgtccaacggcacctacttcgtgctcgaatccttcaacaatcaggacgcgatgctggcttggggctggcgtgtgccgttcctgctgtccgccatcctggtgatcgtcggcctcgtggttcgcgttcacatggaggagaccccgatcttccgtatggctcaggagcagaagaaggtcgtcaagtccccgctgaccgaggtcttccgcaagtcttggcgtcaggtgctgcaggccaccttcctcgtggccgtgacctacacgctgttctacacgctcgccacctggtccctcgcttggggcaccaaggagcagggcgaaggcggcggcggccttggcttcaccaaccaggaatacctgctcatgctcatgatctccatctgcgtgttcgccctgttcatcgtgctgtcctgcctgtacgcggacaagatcggccgcaagcgcgtgctgaccttctcctcctgcgcactcgtcgtgttcgccgtgctcttcccgttcctgctggacggtggtctggtcggccagaagaacttcctcgccaacatggtgttcctgtgcgttggctttgccctgatgggcgtcgccttcggcccgatcggcgcgttcctgcctgaactgttcgaggcgaacgtgcgctactccgggtccggcatcggctacaacctggccgccatcgtcggtgcggcgttcgtgccgaccatcgccacttggctgagctcccattggggcgttcactccgtgggcctctatctcgccgtgatggccgtgtgctgcctggtgtcggtcctgacctgccgcgagacgaaggacgctgactttaccaagtgaaatcctccataactaaatatcgccaagttcacaacgtgaaaaatctcaattccacgaagtgaacccctacgaggcttttccggtgcaacaggactaaacctgcatatcggaaaagcccacaaggaaagccacaactaaaaacagtttctgcagaaccagcagagcacaataacaattaaagatttcacccccataaacaaataaataaaaggagcgccaaaaatggcagcaactatctggtacgagaaggacgccgatctgtccgtgttcgatggcaagaaggtcgccatcttgggctacggctctcagggtcacgctcacgcgctgaacctgcgtgactccggtgtcgacgtggtcgtcggcctgcgtccgacctccaagtctgtcgagttcgccaaggagcagggcctcgaggtcaagccggttggcgaggccgtcgccgaggctgacgttgtgatgatccttctgcctgaccagtaccaggccaaggtctacaaggaagaagttgagccgaacctgaagccgggtgctgccctggccttcgcccacggcttcaacatccactacggctacatcaagccgtccgaggatcacccggtgttcatggttgccccgaagggcccgggccacatcgttcgtcgtgagtacgccgctggccgtggcgtcccggtcgtcgttgccgtcgagcaggacccggacggcaagacctggccgctgtgcctggcttacgccaaggctctgggcgctctgcgtgcaggcgccatcaagaccaccttcaccgaggagaccgagaccgatctgttcggtgagcaggacgtcctcatgggtggcatcaaccacctgtgcgacctcggcttcgacgtgctgaccgaggctggctaccagccggagatcgcctacttcgaggtcttccacgagctgaagatgctggtcgacctggctaacgagggtggcctgaacaaggctcgctggtcctgctccgacaccgctcagtacggcgactacacctccaccgtcatcaccgaggagaccaagaagcgcatgcagtaccagctcaagcgcattcaggacggctccttcgccaaggagttcatggacgaccaggccgctggcgccccgaagttcaagaagctgcaggaagagtactctcacccgcacctcgagaccgtcggcccgaagctgcgcgccatgttctcctggaacaacgccgaggccaaggacaaggacgaggccgagtccttcaacggcaagatcgctcgtacccaggttcagtgattgccgcccctgaaggggatttaagctagcaaaccgccgttcccgcccatacgggagcggcggttttgtgttgttgcgcgcagcgaatcattctcaataacaactatgcgctgatttcttgcaggcaaacgaacaccgaatatgcaagatcgttgatatctcagcctttccccatatgtgggattgtgcgattctgttcaaaagggtgcagagttgttatcgagaatcgttctctgcacacggctgtccatactccaatagtgacctagctcacgttgtggactccagcggggctgcgacggcgttctcggtaggattgatttcggtttgaaggacacaatcctcgcaacacaggacttatctgcacaccgtagataccccggcgcccagcggcgccacaccccactactgaaaaggagtgccaataatggcagcacagatctggtatgagaacgacggtgatctttctgttctcgaaggcaagaaggtcgcaatcatcggctacggctcccagggccacgcccacgcgctgaaccttcgcgattccggtgtcgacgtggtcgtcggcctgcgtccgacctccaagtcggtcgacttcgccaaggagcagggcctcgaggtcaagtccgtggccgaggcttccgccgaggccgacgtgatcatgatcctggcccccgaccagtaccagcgcaccatctgggccaacgacatcgagcccaacatcaagccgggtgctgctgttgcgttcgctcatggcttcaacattcactacggctacatcaagccgtctgaggatcacccggtgttcatggttgccccgaagggcccgggtcacatcgttcgtcgtgagtacgccgctggccgtggcgtgccggtcgtcgtggccgtcgagcaggatccgcgtggcgatggttgggctctgaccctggcctacgccaaggccctcggtgctctgcgcgccggtgctatcaagaccaccttcaaggaagagaccgagaccgatctcttcggcgagcagaacgtgctcatgggcggtgtgaacaagctcgtcgagatgggcttcgaagtcctgaccgacgccggctaccagccggagatcgcctacttcgaggtctgccacgagctcaagatgctcgtcgatctgatgaacgagggcggcctgaacaaggctcgttggtcctgctccgacaccgcccagtacggcgactacgtcaacaccgtcatcaacgaggactgccgcaagcgcatggaataccacctgcagcgcatccaggacggctccttcgccaaggagttcatcgacgatcaggatgccggcgccccgcacttcaaggaactgcaggagaagtactccaacgagcgcatcgagaccgtcggcccgaagctgcgcgccatgttctcctggaacaaggatggcgtcaaggatgccgacgaggccaactccttcaccggcaagatcgcccgcgcccaggttcagtgattcttccttggctcccctcgggtgaggtgcgcacgaacagcgagccggcaatcgcagccttcaggctgtccgtgtttgcaggacgctggcgcgtaagcgcctgagggtggtccccagtgcataccaaaaggccgccgctccgattcattcggaacggcggcctttcgcatggtccccaccacgtagtcaaacctccatcgcgaggtgaaatccccacgacgtagcgaactgcccaccacgcggtgacgcaaaacggttctattccacggaatgcaaaattacgctgacatcgtggtgaaccacaaagttacttaataacccacacagacgtgtcggtggggagctggccttcgggggtcagcgggccggacgccagcaccacggagccatcgggcagcgcgaccggagcgtcgccgaaattggtgatcgaggtgaacacccgcccgccaaccgccgcgcgggtgtacgccaccacatcgtcgcccatgtccacctgctcggccgtggtgtcgcgcgtggcggtcagcgactcctggcgaatcgccagtgcggcgcgatacagcgcgagcatcgagtccgggtcggcttgctccacgtccaccgcgtaatccttgaaccacagcggttgcggcaggtgcgggtcggcggccggcgtcacgccctcagcgcgcgtagccggcgagaagccgaaggaagcgcccgtgccgaactggccggcggcgcacagcggcacatggttctcgccggtaccgtcatcggccggagtcggacggctgaaatcggccaaggccggctcatcggcggcggtccacggcagcggcacgcggcagccgtcgcggcccttgtccatcgtggcctgagcagtgtggaaagcggtcggatcctccaagtgatcccacggaatatcggccacctcaaacaggcccagctcctcgccctgatagatataggcggcgccgggcaggccgagctccatcaaagcggcggcgcgggcgcggcgagtgccaagctcgcgatcctcgggataggtagtgccgttgcgcagcagccagtcgtgcggcagctggtggtagggcgcgcccttgatctgcggcaggccgtaacgggaggggctgcgcggcacgtcgtgattgttcatgacccacgtggtggtggaaccgccggtttcggccgccgccttgagtccggcggcgatggcctcgcggaactcgtcggcataccagttggcttgcgcgaagtcgaagttgaaggactggcccagctcgtccatcgaagcgtacaggtgctggtgctcgggcaccacccacgcctcggccacggcaaagcgcggcgggttgtactcgttgaacaccttgcgccattcgcggtagatatcgtgcacctcgcgacggtcgaacagcgggtggctgaagtcatgattcagcacgccgaccacgctgtattcgcggccgagctcttccaacggcttggattcgaggtccttggccaggccgtgcgccacgtcgatgcggaagccgtcggtgccgtggtcggaccagaaacgcagggtcttcttgaactcctcgtggatatccggattcttccagttgacgtccggctgcgccttatcgaacaggtgcagataccactggccgtcggccacgcgcgcccaggccgggccgccgaagaaggattgccagtcgttcgggggcagttcgccatgctcgccgcggccgtcgcggaagatgtagcggtcgcgcgccggggagccaggctcggcggcgagggcctcctggaagaacacgtgcttgtcagcggtgtggttgggcacgatgtccacgatcaccttgatgccggcctcgtgcgcggccttggccatcgcgtcgaagtcttccatggtgcctaggcgcgggtcgacgttgcggtagtcgattacgtcgtagccgccgtccgctaggtcggaggggtagaacggggaaagccagatggcgtccacgccgaggctcttcaggtagtccatcttctcggtgacgccggcgatgtcgccgatgccgtcgccgttaacgtccttgaagctgcgcgggtaaatctggtaaacgacggcctgcttccaccagtcgtcattgaggttatttgcggtcatgccgattccctcctgttccgggtgcgttgtggttgggttgttccggtcgcgcccgaactgctgtgtgaaggcccgaccgttgtattgatgatgacaacgatatcatgtgaattacgcatgcaaaaatcgatttatcggcgttttgcggtggtaacgtgctcacgcctgcgcgggcgctgctgtcgcggcaggcggcgcggtggtttcgcgcagtattagcggagtgtccggccgtacgaatgccggttcgattgacttgccggcaatggcatccaataccatgtgcccggcagtcgcgcccattgcgaacgggtcctgatgcagcgtggtcagtcccacggcggcggacagggtggaatcgtcgaagccgatgatggaaatgtcctgaggtacccgccgcccgtattgacgcaggcgatacagcacgggcgcggccatttcatcatcctcaaaacagaaggcggtgatgctgggggagacgttcagtacggcgttcaatgccgcgttgctttcgccaagaccgcgttgaatgctcaggggcgttagctcgatccccggatgggcggcagcggcatcaatgacgccctgcaaacgagcctcggtactgtagcgcatattggtttcggtcggtgcgctgccgacgaacgcgatatgccggtggccgagtgcaatcaggtgctcgatagccgaacgtgtggcggcgtaatcatcaatgctcacgcctgcgtcgaacccatcggtggaggggatgttgatgccgacaatcggcacgtgcatatgcttcagtcgctccacttcagccggttcgatgtcgaaggagctgacaatcaccgcatccgcattgcgccgcacgggcaaatccgcaaagaagtcgtggcgctcggcggcgttgcgcatggggtagggcacagtgtcgtagccggaggggcgcagcgccgagtcaagaccggcgaagatgttcgaattgaaccaactggcgatggtctcgctggcaagtagtgcgatacggaacgattggccggattttagggcggcggccgagcgtgagactgagtagtcgagcttttcggccgcggccatcactcggtctcgagtctcgggaagcaccagatccggcttggcgaaggtccgggacaccgtggatacggaaacgccggcctcgcgggccactgcctgaatgcttgccttggtcatatgccgtcgctccttcgccgtcgcgaacaatcattgtcatgacaacgataacatgcccataacaagtcgccgtcttcggctatctcgattacgaggggctgatttagggcattccggacatctacttccgtttcaaggggctccttgccggtgaaaccacaagtgcaaacgactttgtgccaacgtcattccgccgttctcgcgctgggtctacttgggcgccagccccttgaagcggaagtggatgtccgggaaaggccaaatcagcccctcgaagccgatttagaccaatttcccattgcggaatcgatcaccgcttctctcggcgcatcacggcggctagggactgcacgcgtggcaggtcgaagacctcgtcggtatgcaccacgtggcctgagctgtccgccagcggcacgcgccagttcgaatactcgctggaagtgcccggctgattctgggaacggcattcgcccacgccgtccaccaacgctgcctgcagcagcagcgacggcgtatcggtgagcatggcgtgcatcgcctccacgatctcctgcacatggccttccacatcatccgccacggtctgcgagatatagccgttctccaccagacggttcatcatggccgtgcgttcggccatcgccgaggcggcgaacgcctccaccggctcgctcaggagatgcagctcctcgcgcagcttgacgtgttcgaagttcaggtagccggcggtgggtggcagatcgtgcgtggtcaccgaggccaatgcctgtttgcgatagtccttgggtgcacggtacgggtcgccggcgttcggcgaatcgtccacgcggttgaaccattccacgtcagtgccgagcacgccgtgatcggacagaatgcggcgcacgtaatccggtacggtgcccagatcctcgccaaccaccatgcctccggcgcgcgtggcctcgatggccagtactcccagcatcgcctcgtggttgtacgtcacgtatgcgccgttgagggcgccgagcccctgcggaatccaccacaggcggaacaggcccagcacatggtcgatgcgcaccgcgcccgcgtgctcgtacatcgaatgcaccatctcgcggtacacctggtagccggtggcctccagatagcgtgggttgaacggcggctggccccaatcctggccctgctggttatagaagtccggcgggcagccgaccgtgacgccgccggaggcgaagcgttccggattggcccaggcatccgcgccgagcccgtgcacgcccacggccatgtcttgcatcagacccagtgtcatgccgtggtccagcgcctcctgctgcgcggcgttcacctgctcggcggcaatccactgcagccagcggttgaactcgaacaggtcgtggtgctcctcgacgagctggcgcacggccgggtcgtcgatggtcttctcgaagaaccaacggttctcgccccacggcgcgccccatacctcgaagcacaggcaccaggtggcgaaggaatcgaggtctgggccggcggtggtcttgaaatgctcgaattcgagctcgcgcttgttgttgcggcccgcgtcgaagatcaggcgcagcgccgggcgtttggctgcccacgccgcgttgatgtccatcgggttcgattcgtcgttgcgtgcggccaccgaatcatgcagcgcatccacctgcgctcggatatcggccggcagcgtgccgtattcggggatgtcctgcgggcggatgtacgtcacgttgaggaatcggcgcgattccggtagatacggcgatggctcaagcggcggaatcggcgcgccggcgtgaatcgggttgatgagcatgaagtcggccttggacttgtcggccgcgtccgccagcagcagcttcagatcgccgtaatcgccgatgccccacgattcgcgagaccgcacggaatacatctgcgtcatccagccccaccgctggtgctcggcgaccgcctccggcacgggaatgcgcgcgggggcggcgatgatggccgccttgccctcgcgcccgtccaccgtgacggtcagtgtgtggtagcccatcggcagatcgggggcgatggtcaagtccggcttgccggaattgaggttcggcagcagggcaaagtggccaaacgcggtgccgtcctccagttcgatggagacggtgatgtccgcgtccgacgaacagttcagggtgatgccggtcggtttgccggtggtggcgacgatggtggaggggagcaaacgtttgctgttttccacctcaagttgggtcatggaacgttttatggcctcgtcgctggaggcgtccacatcgagggccttgagcacggcgaccaaggcctcgtcgctgatttcggtgtaggtgccgagctggtcgatgaacgaggtggaaagcccgcatgctttggccagcttgaccagcggacgggcgagtcgttccgcgctttccgcgcgctgcggggcaccggaagcggcgtcgttggtggtgtctgcgatggtgccggtgctggtcgctgcgtcgttgccgtgcgcgtcagtcatgatgactccttgcttgcaaatcgggtactgctagtcgtttgcattgctgttcgagggccgctctgcgttgaggttccggcaatctgacagaccaatgttcgagctgttctatctttaccgtaactcatattgacaacgattgcaata

SEQ ID NO: 2605 - DNA, 34590 bp, Unknown
  R222_15m  MAG No. k141_16543
caaaccaccaccactcacccacctcgcagctccccggaggagaaccactcgctgagcggcagcaaggaaataagttacacgcattcacggactcgcgcaaatcgggcgcacgaagataagcccaaatcgttgaaacgacagacttcgctcggcgtgtcgaaatcagcttgaatcacgccgttaccatcaggatacgccggctttttatgggctcacgtaacgaaatcagatgttcaccggcgtgtcgcaacaattcattccacgttcaactcccctcagtccgatcacgcggacagctcacccgcaattacggacgagcaaagctcgcgcccttatggctcgactatcgtctcgccttcgtctaaaaaaacagtccaccggactgttttttaaacgacccagcatcaaagagggaagccaaaaggggattagaaggtcaggcgcatttggtgccagaccacgtcaccgtgagtggaatcggaaatgccctcgtcctcatatccgaatcgcgcatagaatccgaccaaccgatctttgcaggtgagcaccaggcctttacggccggctgcacgagtgtcttcaatgactttcctcatgagtgtactggcgcaaccgcgatgctgatacttcggcgcagtatccacgccgaaaatcatttgccagtcaccttgagggttgtgctgcgcggcatcctcgtacatgtcatcggtcaagtcgcgccgatcggtcacaaaaccgttgatgaacgccatgacgatctcgccatcaatcaatagccagaaacattccggataggtctcgattcgggcgcgcagggacgagcggtcggcggcctcggcggccgggaagcattcgaattccatggcggccagcgcgtccagatcgtcgatggtggcgtggcggattaactggggatcagaatcagtcatgtttttgtctttctcttaacactccgttgtgagcaactcccccagtcacgcttcgcgtgctggctcccctcaccttgaggggagccggatggatgtcagattacgtggtattcgcgtagcagggtggcaatatcggtgccgtcgagtttcttgagcaccttcttgaccacggccttttcaatgaagttgagcttcatatcggtgaccggtgcaccgtcacgcaatttgacggtggcgttgagcaggttgcgcacgtcatagacactgccccacacttcaggcacgccgcggtccacgccgagcaacgtgtagacagcttccataccggtgcgcatcgagtactcggtggtgaagatcgtgtcacgcggggtctcggcgaactggccaaggaatgcgaagttcacggcaccatcgggcaccacgtccgggcggtcgccggccgcgcgcggcatgaagaacgcggtgatgtacggcatcatgaccggcacggtgttggcgtgatgcttggcgagcgcctcgatcttgtcggtcggcacgcccatgtggtaaagccactcctcgcaaatctcttcaccggtgcattcggtcatcggcttcttcacatagttgccgggcttgtccgggaacaggccgtagacccatacgcacagctggtccttgggctggtcgcggaactgctgctggcggttcagggtccaactcatgagccagttggagtcctgcacagtgacgatgccgccggtgacgaccttgccggagaacgggtcgcgcttgcaaatcttctggatgtacggcggaatctcgccgtccagggtggtgatggtggcgctcatccacttggtggcattcggatcggagcagaacttctccggatggccaaagctcgggtcctggtcggcgatacgcttccacatatcccagccgccgccgggcttcaggtctgggttccatgcggcgggcgagttctgggaacccatggtggagttctccacgcaaccgccgttggtgatgaacaccagatcgttctcggtcaggtcgatggaggatttatcaccctcgtgatccacgtcgatgcgcacggcaagcttcttggtgggcgtgctggcagggttgcgcttgaagaaaccggaggtggcctgaatcttttggatggtgtcctggcctacgccggtgtgctcgcgcttggggccggctcccccgccaatcgcgaattccacgttctcaaccttggtgttgtagcggaattcgacgccatgcgattccagatacttgaccatcggcagaatcatcgactcgtactggttgtagcgggtgaaacgcagcgcggaaaagtccggcagtccgccgatgtgatgaatgtagcgtttgatgtacagcttcatttccagcgcggagtgccagttctcgaaggcgaacatggtgcgccagtacagccagaagttggagttcagcacctcatcatcgaagaaatcggtgatcggcttgtcatacaggtcttcgtccggggtgaagaacagcttcatgatttccatcgaagccttgtcggacaggccgaacttgcccttgagccccgcgtccttgccgaggtccttggtggcgcggcacagcgagtagttcgggtcctccttgttgagccagtagtactcgtcgagtacgctgacgccctcggtttcgatggaggggatcgagcggaacagatcccacatgacctcgaaatgattgtccatctcgcggccgccacgcatcacatagccgaggccgggaatatcaagaccgtcacaggcgccgccgggtaccgggtccttctcaaggatgtggatgttctcgccaggcatctgaccatcacgcaccagataacaggctgcagacaatgccgccagtccggtaccgatgatgtatgcatgcttgttgtccacgtcggccggcttcttcgggcgtgcgaaagcctcataattgccgctgttgtagtacatattccgcctccttggggtagagttgacgcttcgtcaactcttcttgaatagacatcatgtcacattattgccgaacacgccataggcaacgttcggcgttctgccgtattcgccaataccttgcgtctacggttttcgaggcctgtgttggctgttggctcataactattgaaggcatacaggcatactgaggatgctgggtgcttcaccgaaccggatgattgataaggtcccgctcaatccatgccatgaccaaatcggcaagtcggtttacctccgcttcggtgagttcacggcctttgggcagatgatgccatttttcgatgcatccgcggcagcatgtggcggtagcatgctgagcggtgaataccggatggccgcgccatggcgtctgcctgccgtcgttcttcggttcggctgcgcctatgcggtctcgcaacatttctcgcgcatgacgatcgatggtcgccttgcctttggtgcgggcataggctcgttctttgtcggtcaaagcgaatttggcgcggaactgcgaatgagacagccgttccagcatcgcggcaatccattgtcgctcgtcatcgttgttaccagtatccgccatctccatgcccatacgttccacaatagtcgcgcacatcgtacggtggcacatgccttagctccctctgatgaaggagtccccagcaaagccagatgagggagaggccaggggcgaaacccgccaatcaggcggcaggcaagcagctggggccaaacagaatcttgatctcagcaaacaacgaagtatcccgcttgacgcggaaacgatcgccaaacgtgagcacctgagcgttacccttctcatccagcaccgcaagatgtacttcgcagtaaccaggatgattagcgagcacctgaccgagttgcatcatgcgttggcgctccaacgccaccggcggcagcgtgatgaccaacggacgttcatcctcggcttccaaggtcggaatctgcatttccgtggctctcagagaaacggtttcgtcgcgcaactccacttggccacgaatctgtacgatggcgtccacggcgagttcggcggcggccgcttcatagaccttgccgaagaacatgcattggatggagctttccatgtcttcgatggtcacgatggcccaggggttgcccttcttggatacgcgccggtccacattggtgaccaaaccagccaacgtgacctgctgtccttcacccatcgttttggctcgatcaaccagatgcgcgatggacatttcacgcaaggacgcgagaatcgactgcataccggagagcggatggtcagacacatacaggcccaacatttcgcgttcgaagttaagcttggtcttcttgtcccattcctcaagatcgggtacggtcacggaagcgtcgcccatggcctccgctcccccatcctcggcatcggagaacaaatcgaactggccctccgcctgtttgcgcttcagactcaccaccgagtcgatggcggcctcgtgcacggtgaacagcgcgcgacggttcgggtcaatcgagtcgaaggcaccggccttgatcaacgattcgaccaatcgccggttcagcgcggtcaggggcacgcggcggatgaagtccatgaagttcacgaacttgccgcgcgggccttcgcgttcggcgatgatatcggccacggccttgtcacccacgttacggatggcaccaagaccgaatcggacgacgtcgccgactgccgagtactcgtacaccgattcgttgacgtccggcgagagcacctggatgcccatgcggcgggcctcgcccaagtacagtgcggtcttgtctttgttggtggcggcaccttgcaacagggcggccatgaattcgaccgggtagtgcgtcttcagatatgcggtccagtaggagatcagaccgtatgcggcggagtgcgctttgttgaaagcgtagccggagaacggcaccagaatatcccacacggcctgggaggcctcttcggagtatccatgctccttcataccggcgaagaacggcaccttctccttggccagcacttcgggcttcttcttacccatggctcgacgcagcacgtctgccttgcccagcgaatagccggcgaggattcgggcggcggactgcacctgctcctggtagatgatcagaccataggtctcgtcaagcacctgcttcagaggttcctcaagctcagggtggattggcgtgatcttctgcaggccattcttgcgcttggcgtagttggtgtgcgaatccatactcatcgggcccggtcggtacagagcgataagtgcggaaatatcgttgaagttatcgggcttcagggttttcagcagtgaacgcatgccgtcggaatcgagctggaacacgccgagcgtgtctcctcgggacatgagtttgtaggtttcggcgtcatcgagcggaatcttggtgtagtcgatggcgggtttgccgttggcctcgatgttcttcagggtgtcgtggatgatcgtcaagttggacaggccaaggaagtccatcttgaccaaccccaacgtttcgcacgtgtggtattcgaaggtggtggtgatggtgccatcggtgcgttccagcaacggcgaggtgtcggtgatgggcgcgctacccatgatggtggcgcaggcatgtacaccggtctgtcggatcaggccttcgatacccttggcttcttcggtgatgcgcttggcgtccgggtcggaatcgtagagttctcggaattccctggcctcggcgtagcgtttggctgtcgggtcgaagatgtcatgcaggctgatatccttgccgccggtggccgcgggaggcagcgccttggtgactttttcaccgaccgagaactcgtagcccatgatgcgggcggagtccttcaaggcctgcttggttttgatggtgccatagatcacgcactgggcgaccttatcggtgccgtatttttcgccgcagtattcgatgactcgcgcacgaccttcagggtcgaagtcgacatcgatatcaggaaggctcactcgctcagggttcaggaacctctcgaaaatcaggccatgcttgagcggatcgagctcggtaatgcccatggaataggcgaccatggcgcctgcggccgagccacggcccggacccaccataatgccgtggtccttggcccactgaatgtagtcggcgaccacgaggaagtatccgcagaactgcatctggcagatcacaccacattcgtagtcggcctgcttcaatacgtcgagcggcgggttgccgtcgtaacgcttctccagaccttcctcgacttttttaaggaacagggaggtctcatcccagccttcggggcaggggaatttcggcatgaacgcgccgtcttcgtggtcgtcgaacatcacgttgcagcgttcggcgatggcgagggtgttgtcgcaggcgtccggatggtccttgaacagttcgcgcatctcttcggcggttttgatgtagtagccggtgccgtcgaatttgaatcggtccggatcgtcaagacgggaaccggagttgatgcagagcatggcgtcctgtgcctgggcatcttcggcgtgtacgtagtgggaatcgttagtggccagcagtggtgcgttgagtttcttggctatggtcagcaggtcaccggtcacctgagtttcgatgggcagaccgtgatccatgagttcgatgaagaagttgtctttgccgaagatgtcctggaattcgccagcggcgcgcagggcctcatcgaactgaccgagacgcagacgggtctggatgatgcccgaggggcagccggaggatgcgatcacgcctttggaataggtggcgagcacctccttatccatacgcggataacgcatgacgcgaccttcgaggttggccacggacgaagctttgatgaggttgaccaggccttcgtcgttttcagcccacatggtcaagtgggtgataagaccaccaccggagacgtcgtcacggcgctgggcttcagtgccccaatgcacgcgggatttgtcttgacgtgcggtttccggggtcacataagcttcgatgccgatgatgggcttgacgccattggccacgcagttggtgtacatctcgtaggcgccatgcatgttgccatggtcggtgatgccgaccgcaggcatgccaagttcggccgcacgcttggccaaatcagggatcttcgacgcaccatcgagcagcgaatagtgcgtgtggttatgcagttgcacaaagttgttcccgtaatcagccatgcgccccaccataccgtgtggtctgggcggctgttcagcattcccgtcggcactccgcgatgagggcggcgcacagcatgatgacctgggcgacgagattgaaccacaccagcgcgccgatcaacgccgcgaacggtgcgagcagcggattgcgggaggcgccggtcagcagtcgcgcgccgagcagctgcatcaccgaaaccgtcagggaacccgacgacgcgccgatcagcgtgaatcgtccggctttgatgtgcgcgaccacacgcaacagcagcatgaacaaggcgaagttcagcgcgacgccggtgcagaaaccggtcagctccagcagcagaatccccggcagcgagctgctggcgatgccgctccactgcaacacgcgccgcaccatgccaccggacaccgtaccggccgcggtcgaaagaatgaacagtattgcgatggcgatggcggcaagcgtatcgcgtaaccttgcgacgacgatattgagctcgtcgccgcagtcgtcgaacatggaccgtacggcgtggcgcagcgagttcatccagccggtcaccgtccaccagaacatggccaacgtggccagaccggtccatgtcaatgtgcttgacatggtgtttagtgcggaagacgtcagaaacgagtcggccacaccgggaatgacttcacgcaccgcgtcgatcagcatctgctgccaatcaatgttgccgaccatgataaggccgaacacgctcaccgcaatccagacgccggcaaaaaaggcgaacagcagaccatatgccagaccattcgccagcagggggccgcgccgcgacacataccggtcgagcacgcgcccaggcagcgaacgcgcccacgcgtccgctcccctgtcaatcgcactcttcaacccatgcatagttcaactgtagctgttgttaccattgtcccgaattcaatttgtaagtgcaacgctcgtcgggggggggtgacgttttgttggacttcgttgtctgtatggtcgttcgcaacgatagcacgcgcgttcaggcgacgagcccgagttcgatgcgtttgtccatgatgctcatgccgtattcgagtttgatgcgcttgtccctgtaccagaccatgcacccgtccaacaacgtgacgaactcgtcgatcgagacaccttggaagcttcgcttgtggaagaactcctgcttgcctgccgaagcccccggcggctgcgttgtccggcctgcggcccttcgcgcccatcgaccgcgtcaggccgtggctcccgcagacgcggatccattatgcacatctcggtaggaacaaaacaacgtcaatgaagaaacctgaagaatcgctggttgtcctgtcatctttagatgacaggacaaccagcgacaagagtaatcgcctcccgttgtctaaatgaaagtgcaacacccgttagattggagattgtccagataaccagtccgaagggatgtcgcacctatgggagaagtatattcgcacctgtcggaagaggaacgccaggtcatccagatcgaggtaggcaacggcgccagcatacgcgggatcggcgcgatgctgggccgcagcccgtccagcatcagccgggagatcaagcgcaacacatggttcccgtccaacgagaacgagtcgtaccgcccgtaccggccgaaaagactgaaggcggggccatggaccggccgctactacatcgccgggcccgcgcagcgcaaggccgaccgcaggagatccaagccacgaaagccctaccggctgtcgcacgaccgcctgtgggcgcaggtggccgaatggctgggccgcggctggtcgccgctgcccgtcagcggcaggccgcgcgtcctgtggccggacgatgcgctcatgcgcgtgtgcccggagaccatctaccgatgggtctactccagcaggccgcttcgggaacgctgggcgcggtgcctgccgcgagggcacaggcggcgccgcaggcacggcggcaggaggacgtcgcgcttcccgatccccggccgagtgcccatctccgaacgcccgccggaggccgacggcaggagcgcgttcggccattgggaggccgacagcgtcatcggagtgggatgcaacctgcacaccgaggtggagaggaggaccaggttcctcatggcccgcgtcgttccggacaagaccgccggcgagagcgtcggggcgcagctggacatgttctcgccgctgccggccggcgcgcgcgtcagcgtcacgcacgacaacggcaccgagttcgcccaccacgaaaggctgcgcgacgggctgggcatggccacgtacttcgccgacccgtactccagccggcggcggggaagcaacgagaaccgcaacggcatgatccgccggtatctgaccaaacgctgcgagatacggatggacatggcaaaggaggtcagggagatcgtcgacgagatcaacaaccgccccatgcgcgtgctcggctaccgcacgcccgccgaggcgttcgccgacgaactgttagaattgcaagaccaacaagggtgttgcacttctaaatagacatcggggtaggctccgcccgcaagtcacagtggtacaattttcaggtttgagactgtagcaagttgagtcgctttatcagtaagtctgtatttggaggtatcgatggcccatcgtccgcttatcggcgtggtcccgttgtgggacgacacactgaatagcctgtggatgctgcccggctatttcgacggcatcatcgaagccggcggcatcccggtgatgctgccgctgaccgacgacgagactacaatcgaacagctggtcagccaatgcgatgggttcctggtcaccggcggccacgacgtggatccagaacggtatggcgaggcggccggccccaagacggtcaaactatgcaaggcccgcgaccggatggaggagcgcctgatcccctccgtcatcgcggcggacaagccattgctgggcatctgccgcggcatccagagcctcaacgtcgccttgggtggcacgttgtggcaggatctgccggacgaacatcccagcccggtcgtgcatcatggcgacaagccgccgtatgacccggtggtccacgaagtgtcgatcgcgcccgattcgccgttggcccgcgcgttgtggccgctgggagacaacggcccgagtgaggcggaggccgatgaggtcgattccttcggcaggccgtatcatccgcgcgcctatacgctgggcgtcaacagttatcaccatcaggcgattcgcacgctgggccagggactggaaccgatggccactgcgccggacagcatcgtggaggcggtctggatgccggccaagcgtttcgtctgggccgtccaatggcatcctgagttctctcaccgcgccgatagcaaccaacgtcgcatcctcagcgccttcatcgacgcctgctgacgcaagctcccgccaatctcgacgaaacgtcttccaagaaatggcttgcccgcatccgcagccccctaccacgacatgagcgcccttgacaacgtcaccctcggcatgcgcttcacccgtgacagcaaacaggtcaggcagcgcaaggccaaggccatgctctcccggctcggactcggccatgtcgcgggagacaagatcatgaccctctccggcggtgaacagcagcgcgtcgccctcgcacgatgcatattgaagcccggggatttgatcctcgccgacgagcccaccggcgcgctcgaccgcgatctcgcccaacatgtcttcgacgaaatgctccgcctccagcacgaatacggcaagaccctcatcatcgtcacccacgatcttggcatcgccgcacaatgcgacaacaccatcgagctacaggcggtttgacggagatattccggcagctttggtctaccgaagtcacgtgttgcccttcaatctcctcggaaatctaggtggcccatttttcaaagaatgcgatcggacgtaacgccccgtaaggagacctgcaatatgaaacgttgaatcgtcatctaaagatgacgttttcgtagatcttccggaatcgccagtcatctgcgatccggatatggcaccggtccggctcgatcgagcccggacgaccatggagaaaacgaacgatcgaatccgaacgcgggtaaagagcctgcgcgacaccattgataaagccaaatttaagaaaacagatcagtatgcataagttttacatgccttcagcctcgtcaaccggcagcgggccccagaatccagtcacagctaggcagagcgtacaacatactgcgtagtacatggcgcgaatcccaatgaccaccatcgattgatgacggccacgaatactcgtactcagccttactgctttggctcatttctgttcacttcacgctggagtaccgagacacgttgagcggaaataccggtaattcacgtacggttaccgaccattggcctgaacggtactcagcatccgcagtcacttggggtatggtcatgacggagagccatcatgaccgatctctcattattctgggatgaatccggcgaggctggaactgaatctaaatattaaaacgcatgatgcacacgttgcggaattagtccaccagaacttcggcatgctcggcaggttcagcgggttcgatgtgacgggcacgcatggcatcgagggcggcggccaggtcggccgggtactgggaccggaccgtggtccagacgcgggtgcgaggatggcggaattcgagcttcatggcgtgcagccactgccggtcaagtcccaaagcttcagacagcaccggattggcaccatacatggggtcgccgcacagaggatgcccaatcgaggagaaatgcacgcgaatctgatgggtacgtccggtctccagattcacggataccagtgtggcctcatggccgaaacgctccaacacatcccaatgcgtaacggccggtttgccggccggagtcacgcagaagcggaaatcggacactttggcgcgcccgatcggtgcctcaatggtcgctttgttctctttaagaccgccctgcacgagcgcatgataggttttctttacctcatgctcggcgaactgccgacgcatctcggtgtacgcaaggtcggacttgcacaccaacatcaagccggaagtgcctacatcaaggcgagaaacaatgccttcacgcccggccgcgccataggaagcgatatgcacgccacgatcacgcaacgatcccaataccgtgggaccggtccagccaaccgaggcatgcgccgccacgcctacaggcttatcgactacgacgacatcatcatcttcgtagacaacagccatatcagttgcgataggctcaggcccggcctgttcctccgccaaatcaaattcgacggtctcccccgcctgcaacgtgctggaccgcgcaacttcacgccctaaaacgcgcgcctgtccggagtcaaccagatcggcggctttagatcgtgaaatacccagcattttggccacggctacgtcgaaacgcttacccaccaatgcatcgggagcagggaccattcgactcattacttggcgtccgcctccggctcagactgtagggattcgtcggattgctcgataagatccttgtgggagaacggctcccccataagaatcagaatcaccaggaccacaccggcgactaccagatagatatccgccacattgccaacggaccagccatagttaaggaaatccaccactttgccgttgaggaagccgtcagcgtacataacacggtcaatcaggttgcccagagcgcctgcaaacgcgaaagaaagcgccaccgaccatttcatggagatagtgcgcaccccagccacagcaagggccacgcaagccacaacggccaacagactgattacccaagtagcgcctgaccccatgcccaaggacgcgcccggattacgcaccaaggtgaaggacagcagtccgggaatcacgcgaatggtctgaccgttggataacgcggccatcgcccaagccttggtgagctgatcgacaatcagcgcagccgcggccacacatgcaaagacggccacgcgagtgcgcagccgtccctgttggttcgtcatacgacctgtacctgcctgcgctcagttggtcttggacgaggtctggtcgacgtagttgttcgactcggaaacctgcgatgccagctggccgaggtactcggtgaggcgggcgcggtattcagtctcgaactgcttgaggctctggatgttgccctcgacgaccttggactgagcctgaaggttgtcgcgcacctgctcggcatacgtatcggctgcagagcgggtgttcttgtcgtacgcatcagctgcggaacgagtgttcttgtcatactcggcggcacgctgctgcacttccttctcgtagttgtcagcgtcatcgtgctgagacttggagtagttgtccgcatcctgacgagtcttgacggagtatgcgtcggcctcagaacgggtgttctgggagtaggtctcggcatccgcgtgaatctggtcacggtaagcgtcggcctcggagcgggtacgatccgaataggtgtcggcgtcggaacgagtacgagtggagtagtcgtcggcctcggagcgggtacgctcggagtagttgttggccttggtgaccaaatcgttgtacttgttctggctggcctcggtgatttccttggccttgttcttgcccttctccacgtactgatcgtgcagctgcatagccagggtcagcatggcggtggcgcgctcgggctcggtgcccggcatggaagcgacgccagcgatcttctgcagagaaccggtctcagtgctcggctcgaccttggaaacctgggcacgaagctggttttcacgctgcttggcttcttcgagctgacgagacagttcagcgatctgagcggactgctgctgagcggcggaaccctcctgctgagcagcggcgagctgacgggacagctcctcgttggccgcgcggaactgatcacgttcctgctgaatggcggcgatctgctggccgacggcttcctggttaccggaggcctgagcggcctgggcggtgagctgatcgatttgagcgttcagctgatcgacctgacccttgagctgctcattctgggaggacagcgcgcggttggattcctcggcttcgctgagcttggcagaggcaagctgtgccgcctgatcattgccagcctgagcggcctgctgggcctgagccacagcgttcttcaaaccagcattctccgactggagttgctgcacctgaccggtaagatcggagatcttcgcattaaggttggtcacgtcagggcccagagactgagtggcctgaccgccggctaccgcctgacgtccaagagcctcgacggtttccgtgacctgatcaaggaagtcatcgacctcgtcgacatcataaccttccttgaatcgaacagtctggaaggtatgctccctaatatccttcggcgtcaacagagccataaatcttgcacctcgctttggggcattgcccgcacttacgttggtctcaagtcagaatgctatcacgaccccatcgtttcagaacattcaacgtgggtttttatgccagatatatgcctccggcgggtcaaaaacggcctcagaacactatcagaacaacactttctagtaccaccaacgcaaaatacagcacgatgaagctgacatcaagataaatcgagccgagcggcaatggacgaatatagcgacgtagccagcgcagagggggttcggtaatggaatacacaatgttgatcagctgggccaccacaccacgtggataccagtttcgtgcgagaacggagacccagtccagaatcatgcgcacgaacagaaccgtgatatacgcgttgatgagccatgcaagaatgcggccgatcagagagaacactaaggaaagcatgctgacagactaacaaccgcgcatgaaaagtttgctcggagcgcaataagaatcggccgactccttgctgggagtcggccgaataccgatataacgtcgaatgcgaaaactactgaaccggtcagtcagcgaacaaatcgtgggacgaggttggttttgtcggctcttcgaccttgatgttcacctgcgccgggctcaacaggaacacgcgcggagtgacacgctcgagggaaccacgcacgccgaacaccacgccggcggagaagtccacaatgcgatatgccacggcttcggccacaccggtgagattcagtacgaccggaacaccgtcacgcaatgcgcgaccgaccagctgagcatcctcatatgacttcggatggatggtggtgattctgttcacacggccaccggggaacggcttggtagtcgacgatgcggcaggcgcggtggttgacgccagcggcgtgaccgtatggtcggaatcaaatgcggacttcgaagccggcttctgctcctcgtcctcctcgatgtagtcgtcctcatcgtccacaacgtcactcatgcccagataggacatcgcgtttttcatgaacccagccatggatcaatcctttcagcgcaggaaatcaggaatgtcgagatcgccggcgggatcgttcacggcgatgttcggatgcgaggtagtcggatcgtcaaagggcagggatgcggagtcaccgatagccggtgtgaatgccggttgggcagtggcagcgggctgtgcagccggtgccggtgctggagctggctgtgccacgggagtcgcaggatcggcggcggttggcacaaccggcgtcaccgtgctctgagtgtcgtcatcttgagcggcgacggggtcaaaaccagcagcaataacagtgacacgcacttcatcgccataagcatcgtccagagcaagaccccaaataatctgggcttcagggtgaatcgccttgcgcaccagttcggtggcagcagaggcctcctgcaacttcaggtcggtcggaccggcgatgttgatcagcgcaccgtgtgcgccttcgatgctttcctcaagcagcggagagctgatggcgatttcggcggcctgcgtggcacgatcctctccccgtgcggaaccgataccaaacagcgcagtaccagcaccacgaagaatggagttcacatcgttgaagtcgacgtgaatataggagttcatcgaaatcaggtcagtgatgccctgaacaccggcaagcagtgcggtatcagcggtcttgaaggcctcaatgatgccgatggaacggtcggaaagctcgagcaggcgatcgttcggaatgacgatcagcgcgtcgacttccttgcgcaggttgtcgatgccgtattcggcggaagcggaacgctgagggccttcgaagctgaacggacgagtaacaaccgcgatggtgagagcaccctgttgatgagccgcacgagcgacgatcgggctggcgccagtaccggtgccaccgccctcgccgcaggtgacgaacaccatgtcggcacccctaagcgcctcttcgatatccgactggtggtcctgggccgccttggctccacgctccgggtcggcaccagcaccgagaccacgactggacttatcggaaagggaaatcttgacatccgcatcagagcgcagaagatccttcgcatcggtatttaccgccacaaattcaacattctgtaatccctcggcaatcatgcgattgacggcattaccgccggcaccgccgacgccaacaaccttgatgttggtcttgtcgttgaactcattctgcgcgatctcgctcacgtttggctcctgtcacttcacggttacacccaagagtagcgcaaacaggctactcttggagggaaattcacgcgcagaatggcgcgtgttgcgtgtattttcagtattttctcagtaactggcgtccattgggtcgtcaccgaagagcgcctcacgctcttcgtgggtggtggtacgcgattccaaccagccatacggcaagtgcaccttcttggcgaaacgcacgcggccgcgcggtttgtcgaccacgcgtggcgggtattcgatggtcgggtcgagcttgccgatctcgcggtccacatcggccaggctctcgcattccataaaggccttgcgggtggacccacccaccgggaaccctttcagataccaggcgatgtgcttgcgcagatcgtggacggccatcatctcatcgccctcatagaactcggtaagcagctcggcatgacggtgaatcacccggcagacctcgcccagattcgggttgagccgttcgggattgccctcgaaggcgtttttgatgttggcgaacagccacggccggccctgacatccgcggccgatggccacgccgtcgcagccggtctcgcgcaccatttcgagcgcgtcctcggcgccccagatatcgccattgccgaataccggaatgttgaggtgttccttgagctcgccgatgcgggaccagtcggaatgaccgccatagtattcggcggtggtgcgggcatgcagggttacggccttgcagccctcctcctgcgcgatgtgtccggcttcgaggaaggtctcatggttatggtcgatgccaacgcggatcttcgaggtgacggggatgcccgccggctcgcatacggcgaccacgcgctggatgagctcggtgaagatgtcggttttccatggcagggccgagcctcccccgcgacgggtgaccttgggtaccgggcaaccgaagttcaggtccacatggtcggtcatgttgccgtcgaccacgattttcgccgcctgttcggtgatggacggattcacgccatacaactgcagcgaacgaattttttcgcttttggcgaaatggcagagacgcagggctttcgggttgcgcgccacgagggcccgcgcggtgatcatctcggccacgtaaagaccatcgggaccgtattcctcgcagatcacgcggaacggccagttggtcacgcccgccatcggcgaaagcaccaccggggtcggcacggtaatgttgccgagctgcacgggggcgatgtataccggagtctcgggccgtgccggcgcgtccgtacgcgggtcgagattgttggtctcgtgagtagcggtgatggtggtttcggtttcagattctgccatgtggttcctgttctgaaatagttttggctcccctctttgagggggagctgccgccgtaggcgactgaggggagtcgcctcagcaagagccccccctcagtccacttcgtagacagctcccctcatagaggggagcctctatacagacccgtctttagtacagaccgccggcttcctgaacgccggactcaggccaagcctcgccgcccatttccacgggcttcaggggcacgcgggtgcgcttctcgccgatgcgggcggccacgtaatcggccaccttgtcaagagcgacgcgctcctgggccatggtgtcacgctcacggatggtcacggcgtggtcctcgagggtgtcgaagtccacggtgatgcacagcggggtgccgatctcgtcctgacgacggtaacgacgaccgatggcaccggactcgtcgtagtcgatcatccattcgttgaagcgcaggtcgtcggccaggttctgggccacggtctgcagttcaggcttcttgctcagcggcagcacggcggccttgaccggggccagacgcgggtcgagacgcagcacggtgcgcttgtcgacgccgcccttggtgttcggggcctcgtccacatcgtaggcgtccacgaggaagcacatcagggaacgggtcagaccggcggccggttcgatgacgtacggcacgtacttctcgccggtggcctggttgaagtagctcaggtcttcgccggagtgcttggagtgcgcgctcaaatcgtaatcggtacggttggcgatgccttcgagctcgccccagtcggaaccttggaagccgaacttgtattcgatgtccacggtgcgcttggagtagtgggagagcttctccttcgggtgctcgtagtggcgcaggttctctggcttgacgccgaggtcgatgtaccagcgggtgcgggcgtcgatccagtactggtgccattcctcatcggtgccgggcttgacgaagaactccatctccatctgctcgaactcacgggtgcggaagatgaagttgcccggggtgatctcgttacggaaggacttacccatgttggcgatgccgaacggcggcttggaacgggaggaggtcatcacgttcttgaagtcgacgaagatgccctgtgcagtctccggacgcaggtagtgcaggctgttctcgtcctcgaccgggccgaggtgggtgcgcagcatcatgttgaagtcgcgcggttcggtccactggccacgggtgccgcagttcgggcagacgatgtccttcatgccgttttccggcatcttgtcgccgtgcttctcggcgtaggattcctcgagcttgtcggcgcggttgcgcttgtggcagttgaggcactcgacgagcggatcgttgaacacgctcacgtggccggacgccacccacacttcgggcggcagaatgatggaggtgtcgacaccgacgacatcaggacgggtgacgaccatggagcgccaccattcacgcttgatattgtccttgagagcgacgccgagggggccgtaatcccaagcggaacgggtgccgccgtaaatttcgccggcggggaacacgaagccgcgacgcttcgcaagggatacgacttcatcgagtttggactgagccacaatgcaccttctggtttgaacggtttggggtctaataacaaccgcttcaggatagccgtatacggtgacaggtcaggcggcattgtccggtatatgttccgcgtctcacgagcggccgttcgcagcgattcctatatcgcaaacacctccatattgttcctgttgttttgcccttccccaatttgtaccactgacatcgcgttagcgtcacaaattcgggagatgttgctcggcggaggcgtccacatatcacgaatggacgggacgcgccagacctgacgacacgtatcgaacaaatccgtcacgataatgtccatgttggcgcatagcgtcggcactgtagtgcagggggactcgcatgtggttcgcgagttgagaaaggcctgagcctgacccttagaacctgttggttaagaccatcgtagggagcagtaaatgagcaatagtgcatcatcgtttgccgatgtgtccagcggttgtaccgccgggactccggttccagccgattcacccatccgcgacaatatcgccgatgccgttcgccgcgtacgcgagacgactccattggcccagtcattcaccaattttgtgaccatcaatttggtcgccaacgcgcaactggcggccggcggcactgcggccatgagtttcctgccggacgacgtgatcgaaaccgcgaaaatcgcgggcgcgaactacatcaacgtgggcacgctgctgccgttctataaggatgcgctgcccgaaatcgcccagcgactcaactacttggacaagccgtgggtgctcgacccggtggccgccggcatcggccacacccgcaccgccattcttcagaccttcaaggccgctcccccgaccatgattcgcgcgaacgcctccgaggtaatcgcgctggcgaacatgtgggggctcaataccgaaaccgtgggggacgcttccgagcaccgccccgccggagtggaatccgtcgacgacgtggagtccgcaaccggtgcggcggtggcgctggcacagtatctgaccgaacagcacgccaagcattcctcccatgacgcttccacccgctgtgcagtggctgtgtccggcatcgccgatctggtgaccgacggcgaaaccgtgtaccgactgccgggcggcagcgcgatgatgaccaagatcatcggtgcaggctgctcgctgggcggcgtggctgccacatatctggcggtttccgatccgttgaccgccgctctgtccgcatctctgctgtacaaccgcgcggcagagatagccgatacgacttcgcacgggccgggctcgttccaggtcgcgttccttgacgcgctgtggaatgttaccgccgaacaggtggcggaatccgagattttggtgcagtagtttcagttccctctgatgagggagctcataacagtttttcccaataagacttccacaagaaacaacaaaggtaggaataataatgagtaatgaatacccatacgcctccatgcgagacaacttcgacttgtccgcgtacttcgtggtggggccggaggactgcaaaggccgtccgctgaccgacgtggtggatcaggctctgcgcggcggcgcaaccttcatccaactgcgcgccaaggaggccgatgcctctgagctgaccgacatggcccgcgacatcgcgcagatcatcgaggacaatgagaagtccgattccgtggcctttgtgatcgacgaccgtgccgacgtggtgtggcaggcccgccgcaagggcatcaaggtggacggtgtgcatatcggccagaccgacatggagccgcgagaagcccgcgccctgctcggcgacgaggccatcgtgggtctgtcggctgagaccgaaagcctcgttcagctcattaacgagctgcccgacggctgcatcgactacattggcgccggccctctgcacgtctccaccaccaagcccgaggcttccgtgggcggcaacgacggctccggcaagacactggacgccgcccagatcaacaccatctgcgctgccagcgaattcccggtggtcgtgggcggcggcgtgaccgcagccgatatggccatgctcgccggcaccaaggccgccggctggttcgcggtctccgccatcgcgggtgccgagaacccggaagaggccgcgcgcaccatggtcgaaggctggaaggccgtccgcggcaacaagaagcacggctacgcgccgcgcgtcgtagcccacacccccgctgctgatactcaggctgctcaggaaggggccgcaaagcctggctccgaggccactgagaagaagttcaccaacgccaaggacgccaaggatgcccagaagctcgccaagcagcagcgcgtggacatcgccgcccgtggttccaagcagcgcgacaaggcgcacatccgcaagaccaagtccgtaccgttcacctatcagtatggttcctacgacctggaagtgccgtacaccgaaatcaagctgagcgacacgcccggcgtgggcccgaacccgccgttccacgactacaacaccgaaggccccaagtgcgacccgaaggaaggtttgaagcccctgcgtctcgactggatccgcgaccgcggcgacatcgaagactacgagggccgccgccgcaaccttgaggatgatggtaagcgcgccatcaagcgcggccgcgccaccaaggaatggcgtggacgcaagcatgagccgatgcgcgccaaggaccacccgatcacccagatgtggtacgcccgccacggcatcatcaccccggagatgcagtacgtggccacccgcgagaactgcgatgtggagctcgtgcgctccgagctggccgccggccgcgcggtgatgccctgcaacatcaaccaccccgaggccgagccgatgattatcggatccgccttcctgaccaagctcaacgccaacatgggcaactcggccgtcacctcctccatcgacgaggaagtggagaagctgacgtgggccaccaagtggggcgccgataccgtgatggacctgtccaccggtaacgacatccacaccacccgtgagtggattcttcgcaactcccccgtgccgatcggcaccgtgccgatgtaccaggccctcgaaaaggtcgaggatgatgcctccaagctgagctgggagctgttccgcgacaccgtgatcgaacagtgcgagcagggtgtggattacatgaccatccacgccggtgtgctgctgcgttacgtgccgctgaccgccaaccgcgtgaccggcatcgtctcccgcggtggctccatcatggccgactggtgcctgcgccaccaccaggagagcttcctgtacacgcacttcgacgagctgtgcgacatcttcgccaagtacgacgtggcgttctctctgggcgatggtctgcgccccggctccctggccgacgcgaacgacgccgcgcagctttccgagctcatgactctgggcgagctgaccgagcgcgcctgggccaaggacgtgcaggtgatgatcgagggcccgggccacgtgccgttcgacaccgtgcgtatgaacatcgagctggagaaggccgtgtgcaagggcgccccgttctacaccctcggaccgctgaccaccgataccgctccgggttacgaccacatcacctccgccatcggcgccaccgagatcggtcgttacggcaccgctatgctgtgctacgtgaccccgaaggaacacctcggcctgccgaacaaggatgatgtgaagcagggcgtgatcgcctacaagatcgcctgccacgccgcagacatcgccaagcaccacccgcacgcgatggatcgtgacaatgcgatttccaaggctcgcttcgagttccgttggctcgaccagttcaatctgtcctacgatccggacaccgccatcgccttccacgatgacaccctgcccgccgagccggccaagatggcgcacttctgctcgatgtgcggcccgaagttctgctcgatggccatctcccagaacatccgcaaggcattcggtggcgaggccgctcagcagcaaatcgtgaaggaggctgctgctggcatcgactccgaggcactggctaaggccaaggccaatgtcgataacgacgtggtgtccgccaacgtgctcagccccgaagaaatcctcgccggcatggatgcgatgagcgaaaagtacaccgcccaaggcggcaagctctactccaccgcccaggagtaaacctctctggctcccctctctgaggggagccaattattatgcccggtggtgtcttaattcgggacgacgctcgactcgctcgaaggcggtgacgaggtcggcagcacggatcgcgccgcggcggtccttggcggccaccagagcggcctcggtccagatggcgcacacttcggcgccgctccagccttcggtccgctgtgcgatatccaccaacggcagttcgccctcgattgacaacgaacgggcctgcacctgcagaatgcccaaacggtcgcgctcagacggcatcgggaaaggaatctgccagtcgaaacggcccggacgcaacaaagcgggatccacgtcctcaatacgattggtcgcagcgaccaccacaacattgcccttggactcgaaaccatccatcaacgtcagcaactgcgccaccaagcgcttgccgacgccattggtatcgttctcgcgcgaggacgcaatcgaatcgatctcatcaaagaagatgatggcgcgcttgtccgcctgcgcggcggcgaaaatcatgcgcagcgtttcctcactatcgcccacatacttgctcacgatggtcgggccggacaccagatagaactgcgcgtccgccacattggcgatgatgcgggccagatgcgttttgccggtgcccggagcaccggtgaagatcacgcccttgatgggcttggcaccgatcgcacgcatctgcgcactgttgcccagctgcgtttcgataagctccttggcgcgcgtgatcacctgctcataaccgccgaacgaatcgaaggtaagcgacggatcgctgcccggcgtgatgcggtactgcttgatgtcgtcatcgtgatcggattcgcctgggcggatggccgtgggccacagcactcgttcgatgccgaacaggtcggtgaactgcacggtgttgccgggcatgatcgaattcgggtaatcgccttcaagcagttcgaggccgtcggaagtctccaggaccacgccttcgttgagcgcacggcgcacgatgcccacacggggcttcaacggccacacatcatgcggcactttacgatagaaatccgtgccgacgagcaacacgtcgcccacatcgaacacctcctgacgcggaaatgtgagctgtgtggtgtgcccattaggcattacgccaaaatatgcggtgcgttcatcgtcaaaaccggtgatgcgtaccaagacgccgtcacggcgcagtacatcgttatcagccatgtcccctcccgaacatttcatgaatcaatcgcaatcagcaaaccctcccatctcaccacaggagcggcaaaacatcaaggaaaaccgctccgaaaaacatcatgggccccacttagaatgaacactatggcacagattgcaacatctacacttcccgctgttctcgcgatctccggctccgactcgtccggtggtgccggcatgcaggccgatctgaagaccatgctggcttgcggcgtgttcggcatgagcgccatcaccgcgctcaccgcacagaacaccaccggcgtgcgttccattcaggacaccaaaccggacattctcgccgaccagatcaacatggtgtttgaggatattccgccggtcgcggtgaaaatcggcatggtgtctgccactgacatcatcgacgtcattgctgaacgactcaccttccatcacgccacgaacatcgtgctcgacccggttatggtggccacttccggtgccaagctcatcagtgacgatgccattgcggccttgaccggcaagctgttcccgatggctacggtcgtgactccgaacattcccgaggccgaagtactgaccgatacgctgattcgcgatcaggaggatatggaggccgccgcccaccgcatcgtggagcgttacggctgtgccgcgctggtcaagggtggtcatggcgccgaggatgccaacgatgtgcttgccgagacggatggaaccgtgacctggtttgatggcgcgcgtatcaataatccgaacacgcacggcaccggatgcacgctgagctccgccatcgcctcgtatctggcgcttggcgacacgctgcccaaggccatcaagcatgcgaagaagtacctgaccggtgcgctgaagacccagctgaatctcggccacggctccggcccgatggatcatttctggaagtatcgctgacataagtgtggttgttaagctccccttgccaggggagcttaacactactgaaaaaggagaatcatggttcttgaccgtaatgccgttactcaggaagtgccgatcgacccggaaaccggcaaaccgtacctcaacaccgtggcagccatccaggtgtcggccaatggcgtgggctccgaggtttcaccatacgtggctcaggccgtcgaagtgattcgcgaatccgccctgccgcaggaaaccaacgccctgttcaccaacgtggaaggcaatctggacgacgtgctcaaggtggccggtgaggccgccaagaagctcgccgagcagggctaccgcacttctctggtgctgcacatggatatccgtcccggcttcaccggccagctgaccgaaaagcccaagctggtggatgagatcctcgccgacaagcaggcgaaatagcaaagcatcgcttccaccagcaagggcatgctttgttattacacgtttcatggggcggtaactcacccatagggcggtaaatatctcatggggcggtaaaaccctcatggggcggtaggcgaaaacggctctattctgcggaaaggcaaaatccgctaaccgccccatgggccaaataccgccccatgagtgttttaccgccccatgggaatcacggttctgccttctttcaacggggtaagagcgtaagtggggcatatataggagcgttacaaactctgttatcgttcacaatgtgaccgcaacgcggcgtgccacaagatcgaacctatagttaagccccatgtagtgagctatctcacaacgattggctcgctacgtggaattcaagacttggactgcaaacgtcgttcatcccacacaatgggagggcgaacggaacacgcagtccaatcaagagttcgctcgccgcaacatcattgagcagttgcacgcgggcaggtttgcaagaagagggctcaaatatgactgctgctgaacagcagatttccggcaatcccgcggctatggaaagcgcacaagcacgtaccaccgtgacggatcaagccaaggttcaggatattatctcgcgcgtggatcgcgcacatgaaaccccgatgttccatcgcatcgtggcgctggtcgccgctggcatgctgatggacagcatcgacgtatatattggcagcgccgttgcctccagcgcgttggccacacactggtccaccgttgcgcaaaattccacctttatgtccgcaggcttcctgggtctgctggtcggttcgctgctggccggcttcgtcggtgacctgaagggccgccgcgtggcttaccaaatcaacctgctgctgtttggcggcttcaccttcctcggcgcattcgccccgaacatggccgtgctgtccctgtgccgtctgggtgccggcctgggcctcggcgctgaaatcgtcaccggcttcgccatggtcaacgagttcgcaccgatgaaccgccgtggccactggtgcgcgattgtctcgctcgtggccaactgcggtgtgccgatcgctatgctgctgtgtgcatggatcatcccccgctggtcctggcgtccgctgttcgtggccatcggtctgggggccgccatcatctggtggctgcgccgcgacatccccgaatccccgcgttggctcgccgtgcacggccgttacgatgaggccgacgccatcgtcaagcagcttgaggccaacggctccgaactgatcgacgcagccgccaaggccgacaccagcgacacccgcaacgccggcggccgttcgctcggcatctgcctgcttgtagctgtggttgctgtggccgccacgaacgtgtgctcctacgccttcacttcttgggttccgacgattctggtcaagcgtggtattaacctgtccagctcgctgctcacctccacggcgatgatgctcggtgccccggtcggctgcctgattggctctctgcttatcgaccgcatcggccgcaagcgcacgattgtgccggccttcctgttcactggcgtgttcggtttaatgtatgccttccagacctctaccgtgagcgcaattatcgttggcttcctgctcatgatgtgcctgtacgtgcttatggcttccgtggtggctgtgtacgctccggaactgttcgccaccaaggttcgcttccgttgcgtcggcttcgcgaacgccgtggccaagctgctcaatgtgttgatgcctatggtggtgggttggatgcttacctcgcttggtgccacgtccatctttgtggccatcagcgcaattgctattgcatcgatgctgattgtcggcttctttggcgcggagactgcgcagaagtcggttgggtgatcggtttcctcacagtggaataactgctgataatgtccattcggcgtcttgcgtggtgatatgcagggcgccgttttgttgttctagtaattgtcggtaacggttgagaccggtaccggtggataggtccgcactgccatccgcatccgaatccgatgacgtgcgggccgtgtcgatgcaggcgatgcggacggtgtccagtccgatgccaatcgtcattacatagcccgcttccgggtcggcatgtttggcgatgttgccgtacagttcctccagcagcccggcgatcaggccactccgaccggctgcgccatgagcaccggaaataatcgtctgaccttcaaagccaagctctgataatcggcggtcaccattgctcgcaacatcacgaatttgctcggctagcgggcaatcagcgtctgtgatgccacatgcaatgccagaagcggcatcaacggtcgaatcatgcggagtcactgcactgtgcgccgcttctcccctgccttcaataacatcaatgacctgatgcgtgcgatccaatgcgcccatagccacgctacgcagttcgcgtaattcttcttcagaaggggtcttgccatcggcaatatccttgtcgaatcgcaaaatcaggtatgccaaatcattggatacgtaatcgtgaatgtcctgagctgtgcgttcctgctgacggcggtgagccaactccgctcgaaccaagctgcgttcgtgattccatcgcgccgccatgccaccaagcatgaagccaataaacaacacggccactggcatcacaccatagagggcaatcgcaccaagaatcacttgcccagtgcgatgctcggcagaagaaccgctcgattcataggcgcttccggtgaagtcgcttcccgactgccctgcgctgtcagacccactggatgaagagccaccatcagcagcgccaccatcagcaacactaccgtttagggcactactactcgccgcgccatccgcagaaccgctcatcgtgtctgagccgccatcaagccaaggaatggccacgccaccacgcgacaacatccacaccacaacggcaatgccggcaaccgccagcgccaatcgcttatcggcgtatccggcaatacccaccgccaataacacggcgagcattgcacccgacggcatccagatcggactcatgcacaacactatccaagccaccgctaccgccacgcatccggtgaccggacgaaacgccatccaccccacaatggcaacgaatatgaactccgcaaggcagtccgccgccgagacactgtcagcagccaagcccgccatggtttccatcgtgcatatcaaggcaacaaccagtacggcaatcaacagccatgcattgcgaacaccgctatccagctcggccaatcggtgtcgtaacgctttcatagcagttcctttcctaccatccatgccgttgcacataccgcccatgccaactcttaaatctcatgccgtttcacgcagatcgatatggcatgagcgcgactgcgagcgccgagtttggcgagtgcgcggcgttcaaaagtcgccacagtggccacgctgatgcccaatcgctcggcgatttccttggtggtcgacccatccgcatacatacgcagggtgtcgcgttctttgccggaaagcgcgccacggtgcgcgtatgacgtatcttcgagcaccgcgtaggcggttgcggcatccatgaaggacagcgaattaccgctcccctcatctcccagtaccagctcattggtcgacaatccttgggctgcattgcgaatagcgagcgcaatgccgttcaaatcggttttaccaaccaaggcctgcgccccgcagcgagccgcctcgtcgtgaaatgacgcgagcgcgtatgaggtgacacccaccagcccaacctcgggtgttttggtacgaatcgcacgacagacttcggtaccgggcacgtcgcccatagacatatccgtaaccagcacgtcaggccgcttggtggggctcaggcatcggctgatggccacggcacccaaatcgcaggtccatatcacggcaaaatcgctggacatgcgctcgattagcgcgccgaacactttcagcgcatacgggtcattgtccacaatgccgatgcgtatgttgcggttgcgcgcttctcccattacattcaccccttcagtgtgcccgacgccgaactgctccgtcctgacatgtcatggtcactatgacaactatcattccacatttcctgcgcgatttacgatggaatcatcatcaatccttgacaaggcggtaaaggaggactgcaatgaaccgtgcacaagcactcagcaagctcaacaggagcgatatgcgcaatgccgccgccgagcgcgggacgcaacgaatattcgcgtggaaccgcgcgcattggattggcatggttgtactgatagcggtgttgttgctgctgcagtggagctcatcaatgtatctcatgcccgacgaggtccttgacagggctgccaaaaacctgttcgtatggttccccggtatggttctgcactggccattggtgttgggaatcaccagcctgatactcggttcgatacgatccggcagtctgtctttcccattggcgagcgcaatcatcggaccgctggcattcggctgtaccaatcttcgcttacggccggggttcccataccgttcctgggctcagtggtggaagctaatgcacgctgaaagcggccatcagctattggttcattcgttgatcggctcggccatgctgttgatctgttatacggccgttgcgttcatctgctatgcaatcggacgctacggtctgcgcgaattgtttgtggatccgaatccgcagacggcgagcggacgactgctcacatggattcgtcaggatgcgattcgcttcggctgctggctggcgacggcaatcatgtacggcttgctattggcgctgaccttacggggcggcatggctgcgatggccgccgcgttgctaatcaattttgtgattccgcccgccttgctggtcatcaacggcatctacgcgctacgcccggcctcactgacgtatccgtggaaaagcctgctgttcccgttggcgtgcacactggtacctgcgccgatgctcatggcgctcatcacggtgtatgaagacacgtgcccgataggaagtacctgcacgctgatcggcgaccgatacctctcctggggctcgatggatcaggtcttgcatttcgtcatcgtgttcgccgtggcgagcttcctcggattcggcgtggtgtgggccgtgcggtggattgtggctcgtcgcacaaaataagagagaccaaaatatactggaatcaggggcttcgtgcaatgatgcacgagccgatccaagcaaaggggctgaccatgagtgagaaactgatggaacagtaccggttgcgcaaacaacgcaaacgccgtaacgcttgtatcgccgccatcgtgacagtagtgcttgtccttgccgtcgccggcggcgtatggtggacggccggcgatggcagcgcactggttcgcaatatgttcaagccgaaggccacgcctgccacacagccggtagtcgacagcaccgcagccttcgcctaccgcaccgcaccggaattcctggcgatgggagccggcgaccgagacaccggtaatgtgaactactcccctgcttcgatgtggatggcgttggccatcgccgcgcagggcgccaatggcacgacccgctcgcaactgaatgagctgctgggctccggttcgctggccgacagcgactaccaatcgctgctgagttcgatcaacgggcaatattcgggggcgaaatccgagatgagcgccgcgaactcgctgtggatcgataacgactactctcttgccagcgattaccaatccaccgtcaagaagatattcgaggccgaagtcaccacgctaccgttcgacgatcaggccgccgccaagatgtccgattggattgccaagcatacgaatggttcgctcaagccgaagatcacgctgcgtgaccgtgaagtcctgtccatcatcaacaccgtctatgcggatggccgctggaaggatccgttcgaagagcagtccaccggcgacggcaccttccacggcgaagccggagatgctcaggtgccgatgatgcaccggaccttcagccaaatgacttacagccatgatgagtacaacacttggcagcgggtggagattccattcgacaacagcggcaatctggccatcgtgctgccggccaaagggcatttcgacgagctggccggcaatgccgagaaactcggatgggcgttcggcacgtgttcgtcggcatcccctggcgaggacgcaatgggttgcaccgcggacagtctgcccggatggggcgtctccgtcaactcggccacggtgaacgtctcgctgccacgattcaccgtcgacagcatgttcgactcggaagccaccatcaaggcattcgaaaaactgggggtgaccgatgcgttcagtgcaggcgacgccgacttcaccaagatggtcgacaccgattcgcacggcgagaatctgtatatcggttcgattctgcaaggcacgcgcatcgaggtgaacgaggccggcgccaaggtcatgtccttcaccaaagccggcgcagacttcactagcgcgccggtggacaacatcgagttcacggtggatcgcccattcctgtattcgtacgtcaccccggacggcataccattattcatcggtgcggtgcgcaacctcggcggagtcggtggagaacactgatactttcccgacagtccgtcaattagggtgtatcgtttgacgcatggctacgatgaaggaaatcgcgaacaaggcgggggtttccgtctctacggtgtcgctggtgctcaacggacgcgacgaggggcgcgtaaagtccgaaattgcggacaatgtgcgcgccatcgccaccaagctcggctaccggtcgaatccgctggccagttcgctgcgtacaggcaagacgcacatcctcggtttcatcagtgaggaggtggccaccaccccgtacgccggcggtatgattctgggcgcgcagaccgccgcaagccagttcggctatatgctcatcaccgtgagcaccgacggtgagaacagcgagagcgaggaaatcgccgcactcaagcgatacggcaccgacggtttcctgtacgccaagatgtcgaaccgcatcacccatgcgccttcttcgctggccaagacgccactggtgttggtggatgccaccgactcgcttggcaaaatcccgagcgtggaaccggacgagttccaaatcggctacgacgccaccaccagattggttaaggccggatgcgcacgtatcgcctatgtgggttgctcggaaccgatgattgcgcaggatggtcgtttggaaggctatcaggcggcgctcagggacgcctgcctcgactatgacgatcgtctggtcgtcaatgtgctcaataacgggccggcactgaccgcagtcagcgatttgttcgacgccgagcatccggacggattcttctgcttcaacgatgcccgcgcctggtatgtgtacgaatgcgccgcacgccgaggactcacggtcggcaaggacatctccgtgatcggcgtggacaaccatcgcgtgttcgccgaaacgctggaaccgatgctcaccactgtggaactgccgcatttcgagatgggctactgggccgtggccaagctggtgtcaattatcgaaggacgctcgatggacgacgtctcacggccagcgaccaccgctcccctgccgccgatcgacgcgccgattccggcgaagatccactgcacgctgatcgaaaaggcctcggtgaagtaaccgaggcccac

SEQ ID NO: 2606 - DNA, 38374 bp, Unknown
  R222_15m  MAG No. k141_16673
ggatcgccacgaggccgattacctgctggcccccacccacgaggagatgttcacccttctggtcaaggacatgtactcctcttacaaagacctgcccgtcaccctgtaccagatccagaccaagtaccgcgacgagttccgtccgcgtgccggcctgatccgtggtcgtgaattcatcatgaaggacgcctactccttcaccatcgatgaagaaggcatgcgcaaggcctactatgacgagcgcggcgcctacgagcgcatcttccagcgtctcgacctgaagtacgtacctgtgttcgccatgtccggcccgatgggcggctccgcatccgaggaattcctggctccgatgccgatcggcgaagataccttcgcgctggcaccttccggcaaggcatggaatgtggaggccctgagcactccggagctgccggaaatcgatgcttccgccactcccgccgcttccaaggaagccaccccggatgccaagaccatcgataacatgattgagcgtgccaacgccgaccacccgcgtactgatggccgtgaatggcaggcttccgacatcctcaagaacgtggtgattaccgtcaagcaccctgaggatgaagagcatgacgagccgtggcgtgaagtgattgtcgtcggcgtgcccggcgaccgtacggtggatatgaagcgactggaagcccagttcgctcccgccgagcttgaggaggccactgaagaagacctgaagcagcaccccgaactggtgccaggctacatcggaccgatggtgcttggcccgcaggccgaggctgctggcgtgaagaacccggttcgctacctggtcgacgcgcacgtggtcaagggttccgcttggttcactggtgccgatgagaacgaggtcgactactacaacctggtgtacggccgtgacttcaaggccgacggcgtggtggaagccgttgaggttcgccacggcgacatgagcccggatggttccggtccgttgagcttcgagcgtggtgtggaaatcggtcaggtgttccagctgggtctcaagtactccaaggcgctggacctgaaggtgctcgaccagaacggtaaggccgtgccggtgtggatgggctgctatggcatcggtgtttcccgcgtgctggcctgcatcgccgaaacgcaccacgacgaagccggcttggcttggccgtccgtgattgccccggctgccgtgcacgtggtggccaccggtaaggacgccgtggcgtttgaaggtgccgagaagctggtcgccgagcttgaggccaagggccttgaggttatttacgatgaccgcaagaaggtgtctccgggcgtcaagttcaaggatgccgagctgatcggcgtgccgctggtcgccgtggtcggccgcgattacgtcaacgacggcaccatcgaactgcgcgaccgcaacggcgaaaacaaggtcgccgtgcccgccgccgaagccgccgacgcgctcgccgagcgcttcgccgccctcagctgagtcccacttactcagcctcggcgttaatcgcatcaagcgccattctgcccagtcgcagaatggcgctttgttgtggataaccgaaacttatccacattcttaaaatttcaactgcgtcacagtatccacatttgccagttgcccttgtgcacttcaaacgtcatgcctcacagtggaggtaccgctggggcgtgcaagccggcaatgaagccggagacaggctccggcggtccacatccaaacaacaggccagcaggccgaggaaaggaccgatcatggcaaatcaacaagcagcagtgaccgtcaccggctttgtggccggtgatccgacactaggcggaactgagagtttccgcgtgctgacattccgtatgggcagcacccgcagtcgactcaacccgactaccagacaatgggaggattacggaaccgcatgggtgggcgtcaaagcgttccgtgctttggccgtgaacgccgccagttcggttcgccgcggtgaccgcatcattgtggtcggttcactcatcaccgagcagtggaccaatgagcaaggcgaaccgcgcagcagaaccgttctcgaagccaccaacattgggcatgacctgaccttcggcaccacgtcgctgatcaagccacagcgtgccggtaatggtaacggaggcaatggtggcaacggtaacggcaatgccaacggtgccgccgaaggtatggatggcggaaacgggcaacgagcatcgtcgccgtacgttaggccaatgcaatatggcgcgggcggtgccgcatccggtgtgggtatggacccgtatgcgacctcgtcggaatctggccccgtcgaatttggggtcacctccgattccggccaatcaccgtcgccatcaaccgagtcagcggctgcgtccatggccgatgccgtcatgtcgcaaccggacgctggcgctaatcagccacagtccgcagcccaacaaacctatgtcgacggtttcgccgaatcttccgatcccggcgaatccgaattctgagtgccaaccatacatcatgaaaaaccgctgtgttcgcctgtaatcgaggcaagcacagcggttttctcttacataacggggattaccagatgcgtacacggtccttgggcgcgagccacatggcgtcgccttcggtcacgccaaaggcatcgtagaagaggtccacgttgctggcgatgccgttggtgcggaattcggctggagaatgcgggtcgatctgcaggtactgttcggccagctcgtcgcggttcttggtgcgccagatggaggcgtagctcaggaagaagcgctgcaggccggtgaatccgtccatttcgggggcggtatcgagcagtgccttgatggcggcgggggagccgtcttcttcggcgtcgggcttacctgccgccttgccgagcgcgaatgcatacgccttgagcgcgatgttcacgccgcccaaatcgccgatgttctcgccgatggtcagcgcgccgttcacgtgcggcgccttatcagactcgtcagcgtacttctctgccagctgcagcggcacaaagctgttgtactgggcgatcaatgcgccggtacgggcctcgaagttcttgcgatcctcgtcggtccaccagttgttgagcttgccgtcgccgtcatactgcgaaccctgatcgtcgaagccatggccgatctcgtgtccgatcactgcgccgataccgccataattcgccgcatcctcggccttcgggtcgaagaacgggggctgcagaatcgcggccgggaacacgatgacgttcatgctcggctcgtagtaggcgttcaccgtctgcggattcatcagccattcgtccttgtcgaccgccttgccgaccttggccagctggtagccggtctcgtacaggttcgcggccttggcgttctcggcgggcagcgcatccgcggagacactcagtgccgagtaatcgcgccagtggttggtgtagccgatctttggcgtgaacttggagatcttctccagagccttggccttggtgtcttcgcccagccaatcggaattggcgatggacacgcggtaggcgtcaatcagattggcgaccagctcttccatgcggcgcttcgagctttcggggaagtgcaggcgcacgtattcgcggcccacatcttcaccacaaacgccgttgaccaggctcaccgcgcgcttccaacgatcgcgctgcttcttggcaccggagagcaccttgccgtagaagtcaaagttggtggtgtcgaagtcgcgagacagggaggaggcgaagcccagaatcatgtgaacacgggcccacagcttaaggtcggccagatcggcctcggcccagaacgcatcaagaccagtgaggaagctcggctcgtgcacaatgacgcgcgcgaacacagacttgaaatcgatcggctgagccttggcggccttggtggcgtcataggcggtctgccaggcgtcgatccaggaaccgagatcgaagttcttcagcgtggcggccaaatcggcgtaatcggtggggttgtaggtcttcaccgaatcgcgcgtggccacattgtcccaatggttggcggcgattttcgtttccacggcaaggaagtgtcgggccatatcaagtgcggcttcgctgggaaccgtggtgggagcattgctctcgtcatcgccggtgttggccggcagttcatcgccaccgttggattcggcggcgggcgcgtacccggcgttcaccagctgggtggcgaccatcgccacgtatgcttcgcgcacggggacgtagtggtcctcacgatagtaggcttcgtccggcaggcaaaggccggcctgctcaaggtgggcgatattgcggtccgggtcgccggggtcgccgtaaacggccaaaccgaacaggtcggggccgccggctgggttgatggtgccgagcacgcgcgtgagagcggccttgtcgatggcggaatcgatgaggtcaagctcatcgcggatcgggtcaaggccggcggcctcgatggcgtcggtgttcaggaatgaatgatacagagcctgcgatttggtggccgggcagtcgtcggcgtcgaggatgtcgcgcacttggttttcggcgtcttcggcgagcttgtcgaaggagccgtagcgcgaacgatcgtcgggtaggcggtaggtgtcgatccatggaccattcacgtagcggaacaggtcattggtcggcttgatgacggaggagaacgatgccgggtcgatgcccgacgtcagcgtttcggtttcgttggtcatggccctaagcctaatcgcggcgggggagaagcgttggtgatgcagatattgcgttatgggtattgcgctgtcagtgaactagacggattgcctaactgtagtgatggttcaaattaggtaacttgcctaacatggtatgtggaacctgaatatggaccttgagttaaggagttacgatgagcaatccaaacgagggtcagtggaatggccagacgggccagcccaaccagagccagccgagccagccgaatccggcgggccaaccgggccaaccgcagtatggcgcgtatgacagcaatcatggcggccaatatcctccgcaaggtgcgccgggagcgcaagacactcagaatcagcaggcgcagaacggccagccacaaggcggaccgaaccagaacccatactacggcccgtacgcctacaatccgaactatggcccgaacggccagccagcatggggtccggacgatcggcggtatcaggcggacggccaatcgaatagccaagcggacgggcagccgaatggttcatggggcgatcaaagtcaacccggctggcagcagaccaactggtatgtcggcaatttcagtccattccacctgatcgaggaatggctgccggaaaaggccaagaccaagattcgcatcatttacggcgtggtgggcgtggctgccatcgccttgggcgctgcgctgttgttggtgccgaacaagacgctggctttggccgcattgttgctcggcgtgtatttcgtgatttccggcgtggtgcgcatcgtcagcgctctcgtggagccgggtctgccgggcggctggcgtgtgctggacgtgttcgtcggcattctgctgaccttcggaggcgtcgtagtcgtacgaaactacggtatgaccggtcagaccttggcattactcatcaccctgatggtcggtttcggttggattatggaaggcgtgatggctctagtcgaatcatggcgcatcccgcgctccggctgggccatcgcctatgccatcatctcgattatcgccggcttcgtggtgctgatgagcccgctgagctccgccgtattcatgattatcttcggcggatgcgccatggtggtgatggggattacttcggtgattcgcgcgttcacttttggcaagcgcaggaagtaatctcgcgctccagacaatcaatctccggacaatcaatccaaagcgcccgtgcaggttatgtatctgccgggcgctttttctcggccttggccgttgataggctactagcggaccctaggcagaccacgggtgatgctctggcggttgaccccgggctgggctagagttgagaacaagtctcaacaaggtagaaagaacctcatgatcgaattgaagacccctcgtgaaatcgaggagatgaagccggccggccgtttcgtcggcggcattctgaaggaactgcaggagaccaccaaggtgggcaccaatctgctcgaaatcgacgagttcgtccacaagaagatcgtggaccgcaagggcgccgaatcctgctatgttgactacgctcctgacttcggcaccggcccgttcgcccactacatctgcacctccgtcaacgacgccgtgctgcacggtgtgccgtacgattacagcctgaaggacggcgacctcgtctccctcgatctcgccatctccgtggatggctgggtggccgattccgccgtcagcttcgtggtcggcaaagacccggatcccgaagacctgcgcatcatcaagtgcactgaggaagcgctcgccgccgccatcgacgtggccaagcccggcaaccgtctcggcgacatctccaacaccattggcgacatcgcgcgcgaatacggctacccgatcaacctcgagttcggcggtcacggcgtgggccacatcatgcacggcgacccgcacgtaccgaacgacggccgcgcccaccacggctacaagctgcgcgaaggcctggtcatcgccatcgaaccatggttcctcaagaccaccgacgagatcttccaggatccgaaggacggctggaccctgcgtgcctccgacggctcgcgcggtgcccactccgagcacaccatcgccatcaccgagaacggcccgatcatcttcaccgatcgcaccaacctctgattggcgtttggtgtatggcgggtgcctgattggcctgtgatgggcgatcggcatctcatcaaccgtctatatgttcgcggttttcccgtgaattcgagacataacaagccgaagtgcgtttgctttgatagcatgagcgcacttcggctttcgtgtatcgaccggtgtctgccggcggtaacacagaagacataaagtaccgaacactagcgttcgcgaacgcgtgaacgttaatgtttggggtaagtggttcatgaagaggaaggtgcgcgaatggcaacggcacaacttgatgtcgattcgaacaagttcaacctgcccgtggtgaaggctagtgcggggccggatggcatcgtcgtttccaagctgcgtaatgacggctgggtaacgctcgaccccggattcctcaccaccgcacagtgcgaatcgaaaatcacctacatcgacggcaagcattcgatcctgcgctaccgtggctaccccatcgagcagttgtgcgagaactccgattttctggaagtggcgtggctgctgcgccacggcgagctgccgagcagggctgagtatgagcagttctgcgcggacatcaaccacaagacgatggttggcgaagacttccgtaccttcatgggttcgttcccgcgctccgctcatccgatgagcgtgcttgcctccgccatcaatgcgctggccacgttctatccggacaccaccgatatctccgacaccgaccagctcgatgaggccgccaagatcatcatggccaaggcccgcacgattgtgtcgtacatcttccgccgtcgtcgcgatgagccgatgctgtaccccgattacgcgcgcggctatgtagacgacttcctgcgcatgtgcttcgctgtgccgtacgagccgttcgaatctgacccgttgtatgtgcatgctttgggtcgtttgctgattattcatgccgatcacgagcagaactgctcgacctcggtggtgcgtatcgccggttccgcccacgccaatctgtattcggcggtggccgctggcgtcaatgccttgtccggaccgttgcacggtggcgcgaatgaggccgtactacgccaattgaaggcgattcgtgattccggtaagtctgtggccgagttcgtgcgtgatgccaaggaggatggccagaagatttccggccttggccaccgtgtatacaagtcgtatgatccgcgtgcggcgattgccaagaagtatcttgagaagatcatggagcgcgaggatacgcagaaactgccgtccgacgagcgtgcgttgttcgatgtggccaccgagcttgaggatattgcgttgaacgacgagtatttcgtatcgcgcaacctgtatccgaacgtcgatttctacacgggcttgatttatcgggcgatcggcttcgatccggccatgttcaccacgctgttcgcactgggccgcattcccggttggattgcgcagtaccgtgagatgctggccgacccgaacaccaagatcggccgcccacgccaggtctacaccggtccggtcgagcgcgatttcatgccgatggacgagcggtgattattggtttgagaaagcgcctcgctggagattccagtgaagcgctttctatatgtacagcgcaaaccagctatgctgcgacggctgcataagaacgagcagggctagttctgaaattgaaataatgtgtgcggtatcgaagcgcaccgagggaaggcgtacggaagtacgtcgaccgaggagcaacgaagataacgctccattatttcaatttcagttcttgtgcagcttggcgttgagctcaattcccaccttgcggtagcgggcttcgatacgtccattcaccgagttgcggatgaacaggatgttgtctttgccggagagctcagcacccttgacgacttcgagcggctcgccggctgcggccttggccttgtcccagatgctgatcttggtgccggcggtgatgtacagaccggcttcgacggtgcagttatcgccgagggagatgccgataccggcgttggcgccgagcagcgagtgctcgccgatggagttgcgcagcttgccgccgccggagagggtgcccatgatggaggcaccgccgccgatatcggaaccgtcgcccacgaccacaccttgcgaaacgcggccttcgaccatggagacgccgagcgtgccggcattgaagttcacgaatccggcgtgcatcacggtggtgccggaagataggtaagcaccgaggcgcacacggtcggcgtcgccgatacgcacgccggtgggcactacgtaatcgatcatgcgcgggaatttatccacaccgaacacgttgacggtggtggcaggagctgcggcaggcagtccggcctgagcagcgaaagcgagagcggcttcggtggaggcgcgttcgacatcggccttgcgtagtgtgaagtcctcaacggcgaaaggaccgtagttggtccacaccacattggcgagttgggcgaagatgccgtcaaggttcagcgtgttcggcttggccatgcgcatgctcatcagatggagtttcaggtaagcgtccgcggcgttgctgatcggctcgtccaactggctgacgacgaataccggcacgcggcggatgccacgggcgtcggcttcatcgtgagccagagtgccgaaattgtggtttggacgatcggcctcggccggtgcctcaccgagattcagttcggggtaccagacgtccagggtggtgccggcggcgtctacgctggccagaccccatccccatgcggtacgctcttcgctcatagttgctccttacatatcgttgcgtttgcgttgcatgtgcatcgcggcatgtgatggttccaccttagcgtcaagtacggctaggcgggggccatagttcgtggaatggcttgaaatcgagttgttcggtaaaaaattaccgaacgtgattggcgatgggatgataggttctccggtgaaattcgctggtgaacaactcggcaaggaggtgtgcgatgtgatgctgcatcattcgggagcataggctgtggccatgcgacgcccggcatcatagagtttgcgcttgagcgaatcgggctcaagaatcactacgcggccatcccaggaatactgcaatgcccaccagaacacggcgcgttcgggagcatcgacgatgacttcgaactgtgtgccgtccggcgaatgtttgatctgagggtcgtcgaaccattcgaacacattgttgagcatggattcgtctcgtacggccatgcggatgcgaatcggggcatcggctacgggatacgggcggtgacgcatgaagttcactgcgtcaaaatcagccggcgctggtttttccagtggaactgtgccgttcctgcctttggcgctgacgttggcgattcggttgaccacgaaaatgcggagattatcctcgccatgtagatggcagatgaggtaataccgtccgttcttgtacaccatctggtaagggtcggcggtgtaggtaattcgacctgcgcccgtacggcttttatgcggtatcagggtgccgtccgggccgtaatcacggtattggaaggttacgccgtggccttcttcaatggcctgattcagttggtcgatggtggataggaactcgccgttgatatgcgtgtaggtggccacgtgctcaaggtaacctactgcttgcccagcggcacctgcgagttcgcggattttaccgatgagatcgtccatggtgtcgaggctgatgcgagacaaggtgaggctgtcgagtagcagtcgcatttcagcggtggataggaatgcgtcaagataccagccgggttgtggattcttgcattcgatgccggcaaggtcgctttcggtgagatgcccgatatgtctgccgagaaattccgtggcggtaagctttttgagctgatttcgtatggttttctcggtcggcagctcgcttggatcttccagctggtgtttacgggcaagttcatcgagtatttgccgcacggtcaggccatgtccaaagtagctgtgacgccacagcacctcgaagatttcgagggtggtgttccctgcataggatttgcgttgcgccggcttgtctgcatccatacattaaggctaccgcgcgcctcgtctaggatagaagtgttggactgaaatgcattcgctggaaaggaggctcgcccatgagcaaagggtatggtgtatttggccatgttcccgataatgcggatgacgatgacctcctgccttatgaggatgatgattccggcgtttcctggggccatgcgttgcgccgtcgcaatccttggaaaaggggaggcgacgaaggtgccgattacgacgatgatcggtatggcgcagatgacacagatgacactaatgaggacaggggtctctttgccggcaagagcagcggtataggcggtatctctggcgaggcagatggaatgcttggtggcgcaggcgctgccggcagtagagccgtaacgtttggtggaacggacagtttgtccgccgccgatgcggttatgccctatcgtttcaggcaaggacgttccgtatggttcgaagatgaggacgaaggccatttcgccggggctgcgaagcgtgccgaagcccatgccgtccctatccttgcgttacgcaacgatgtggaatcgtcatcgtcgaatgccgtgctcgctcgtgcccgtagcattgcgcgcaaagcggccaccatggttatcaatccggtatacagcgaaaatcatcgaaccgggtatgccgagcttgacggtattctacgtggcaccaccagcccatcgagtaggtatcgtaccagcgtgcaattcgacctcgatacgggagaagccgtcggtggcaagtgctcatgcccggcttacggccgtggctatggcatgtgcaagcacatgattgcgctcgccttcatattctgcgatgatccgcagcgttttgaagggtaccgtgccggggctgtgaggccgtctcggacgctgattgactatatggagcacgtcgataggcaagatgctcaagccaaagcgcgtcgccgcaatgcgctcatgcgccgattcgatactgcaaaaagacgaaatggcgcaggtggacgacgtacgaatagcggatacggctctcgtgccggcacccgaggcggcgggtatcagggcgatagtgagactgtgggcttggggcaggtgcagcttgttccgatattgagtttcatcgatggcgtgtggagcgtggagttcaagatcggatcgacttccaatgggtccagctatgtactgaaatcgattccgcaatttgtgcttaccatggcgaacggcgactatacggattatgggcagaagcttgcctttacccatacgccggatatgttcgacgatgattcgcgcccactgctgggcttccttgacgacgcgatggccgtgcgtcgtgcggccgagcagcaggaccggtattacgggcatatcgccatcgatcgtcacctgacactttcagcaccggaagtggcccggttgctgtccgtacgtgagggcagaggcgtacagctcgtgttgaacacatggttctccgggcagcctgcatcggtgccggttgatggtggcgagccagattttcttatgcgcattgcgcggcgtgatttcaatacgtatggtccggatgccggatacctgcttgccggagtgccggcggtggaaaccgtgattgatggtggcaaggatgtatggctgttgctcgcctccactaatccggccggtgcggtatccgccatgatggcgggctctcagcgtaaaagcgcagcgggatgccgattcgtccgttgcccgaaacgattgattccgttgcgaggactattgggagacctgtttgaacccgatggcgaggggcaggtcattgccggtgatgacatcgccctgttcgcacgcacgctattgcctcagctggttggtgccggactgttggaggccagtgagattcctcgcgagctggctgaattaagtcctacggaatgcagcctccagttttatctggatcgtgatgagcatggtgtgcaatgcgaggtcaaggcacactacggcgatgccattgtcccgttgctacccgatggcccgacggtgcatgctagggatgagcgttccatccccttgtctcggggcgtgattgggcgtgatttcgacgctgagcatcttgcgattgatgtagtgtgtgaattctttaccatgcctgaccagcgcaagtgcgttgcggccgccactcatcagacggtgaatgggttccgaacgccggccgcgcgaaagaccgccaaacaattcgtgtctgatgcggccactatcgatcgcgatgacaccacgcagattgttcgtctttttgacgagggattgcccgcactgaaggaagtaggggaggtcttcaccacaccggcttttgaccggctgatcgcgcccaagccgccaagcgtcaaagtcggattgtccatcaaaggcaatttggtggagatatcgcccctcgctgatgaagtaccgccggacgaagtgggtgccttgctgtcttcgtatcgtcggcgtcaacgattccatcagttgaaggacggcacgctggtcaaactcagcggcgcgaatctcagcacgttggaccgattggccagcgaccttgatctgagcgagcagcagctcaactccgggctgatcgagttgccgggcggtcgagcattcctactggatggtgagctgccggatgacggctccgatgtagtcaaggacgcttcgttcaccgaatacatcgacgatctcaagatcatcgaccctaagtcgtatgaagtgccggatagtctcaagcatattctgcgcccttatcaggtcgaaggcttccaatggctgaacacgttgtgcgacaagggttttggcggcattttggccgacgagatgggtttgggcaaatccgtgcagcttatcgccctgttgctgtcgcgataccacaacgaatctagtggcatgccgaccgctcaaggcatggatgccggtaatgctgttaatagtgaatcagccgtaaccggtcatattactttcgattccgaagatggcgggccgcatccatcattgatcgtgtgcccggcgtccttggtgtacaactggggtgccgaattcgccaagttcgccccgagcttcaacgccgtggtggtggccggtaccaaagccgagcgccgcaccgccatcggccgcgcgttccgggcggatgaacccaccgtgctcatcacctcatacgacctgctgcgccgggatgtcgatgattacaccgccaatgagcaacgtttcaatgtcatggcgctggatgaagcccagtacatcaagaatcacaccacgaagatagccaaagcggtcaaggccgtggccgccgaccatcgtttcgccttgaccggcacgccgatcgagaaccgactctccgaactgtggagcatcttcgacttcctgatgccgggactattgggctcatacaagcgattccatgagcgctacgagttgcccatctccaacgcccgggctgcagatggcagcacggccgaaggtcgggccgccgcacaggtcaatcctgaggccgcccgggtgtctcgccaattgcagtcgttggtgggcgtgttcatcaagcgcaggttgaagtcccaagtgctgaccgatttgccggacaagttggagaccacgctgaccgtgcagcttgccggcgaacagcgcaaactgtatgcggcccacgagcagcggctcagaatgcagctcgaacacagcgaagaagccgatttcaacacgtcgaagattcgcatcctcgccgagctgaccaagttgcgccagatctgctgtgatccaaggctgctgtatgccgatgccaaggatcagtcggccaagcttgccgccatcaccgaactggtggaaacctgcgtgaatgaaggcaagaaggcgctgatcttctcccagttcaccagcttccttgatctgatcgccgaacgtttcgacgcgcaaggactacgctactacaccatcaccggatccacgcctaaaaagaagcgtctcgaactcgtcgaccagttcaatgcggacgatacgcccgccttcctgatttcattgaaggccggcaacaccggactgaacctgaccggtgccagcgtggtcatccacgccgatccatggtggaacgctgccgcgcaggatcaggccaccgaccgagcacatcgtatcggccagaccgaagacgtcaacgtgtatcaggtggtggccaaggacaccatcgaagaacgcatcttggagcttcagcataccaagagcgagctcgcccgccagttcaccgatgcttccttgcttgccgacgaagccggcaccggcgccagcgccctcaccgaagctcccgcctccatcgccaccctcaccaaggacgatctcctcaatctgctgggatgagaagatcctgctcggtgctcttgagcttgggaggcggaaacagtctgggctttgtggacccgttcgctaagccgagaccggagtcgatagcggtgtggcatggtgcgtgcgtggggagcgtgattcagttgttggctgaggcgattcggacgctgtcgttttgtgctttgttttgccgttgaccaattgaaatgctcgttggtaggagacccccaataaagctccgatttgtcgatacgtgagtccctcgttgcgtagggcccgtgcggcgagtcgggattcggcagccgcttgtgcgttggctttttttgctatttcgcgctgccggaacatttctgttacgtgttgtttggcttgtttcggcaacacaaacgtcaccttgagctccggattgtcgtcgtcgttcatgacagtgatgagatctttagccattggctcgatatcgtcaagtcctttggcctgggtcgaccgttcgatagctggtacctgaacgtaccaatatcggccatcgggttgcacaagcacgtcatagttgctcattgccaccacccctttccgagtttctgctcgctctcgttgatgatatccagcgtggttcgttctgagacttcattatggcgggggatgggtatcctcaacccgtccaggcggtaaacctcatgtctgctgccttgccgtaacaaatagaaatcgagccctcgctgctttgccgcttgccgaagtttcttgatgatgagttttcttcgtgtcatcataactctcaatctcgcactagacaaaatgcgtatgccgaattgccgggtgggagttgtgggtaaacgtagagatgttcattggtccttctttctgttgtctgacgcgtcgttgcgtgcgggtgcatctgacggtatgggatgaggtttctgattggcaagctgaacgggggtatgtggttctagcttccgagttatccacattgataaagtgcttttttaaagtgactttcccgtgttggtcgtggatgctgcgagcaaggcaagaacggtcgatcacgtcgcgatgtgtgtgggtgaatggtgaaagtgattttcgatatttttatattgatattcgatatattatgatggtgacatacggggcagggcaggttcatccattgatattggattaaggagcatagccatgaacgctggtatcgcattcatctctcgcaaatctcgcaaagcagacgtcgcttggcgctatgccattgcacttggtcggtggcgggggagtcggcgttatgttcgacgtcagtgccgtcattggcagatggcgcaaccgccacgaacacaggggtctgatcgttggccagaatcgccttcaattcctcgtccgtgtatttcttgacaccgcctttgaacagatccggtcggccggcatgatgcacttcgagcacctgccgcagcagttcgtcgatttggggaatatcggccgccgtggccctatgaatcatcatgtcatccatttgattcggtctaatcgtgcagtctcgaccggcagatgatcattgcccgcgataagagacacggacgggcaagatgggtgattgttcgttcaggctttcatcctcgccgcaatgtcacggtagtctggagtgcgtgaatcgcaagaaacagccagtggagaagtatgagcggggcacccgttcgtacacgatgtcgcatattcgtggcaaagacaccaaaatcgaggtgctggtacgcagctatctgtttcgcaagggtttgcgattccgcaagaacgacaagcgttaccccggccacccggatgtagtactgccgaaataccacaccatcgtgttcatcaacggctgtttctggcatatgcatgaaggctgttccaaacattcgatgccgaaatcgaatgtggaattctggcagacgaagctactgcgcaatcacaatcgagacatcgcgcagcgggctgaactggaggccgccggctggcgtgtaattaccgtatgggagtgcgaattaacgaaagccgtgcgtgacgaacgcctcgcacggctgtatgagcagattgttgaaggagatgcagattcagcggaataatttcagctcccctctggaggggagctgaaatcagacctcaaacgggaacttcaggccccaacggtcgcgaatcgcatccatcagctccatgatgcggatggtgtcggcgtgcggcatcgcctcgcattcgatcttgccatccagcagcgcgttggctgcatcggccacctcatactcataaccggtcaactgcgacggcaccgcaacactgcgcacgggcttgtgatcgttgttgtagatatcgatggactcgggattgttgatattggtgaccaccaaatacccttcggtgccccacacgtagccgccgcgatcggaggaaaccagcatcgaactggtggacacggccatcgtgccatcatcgtaatacaacgtggtggaattctgtgcatccacaccggtttcggcggccatcatcgacgtatcgaaatgatccagcgtgcggccatggtcggcaccgatcgccatatccaggaagttcagcggatacacgcccacatcgagcagcgcgccaccggcacaggccggatcggtcatacgtgccttgccggacaccggatagcacaggttggcgctcgccgctttcacctcgccgatctcgccggactcgataacttcgttgatgagcttgcggctgggcatgtagcgcgtccagatggcctccgtgcacagcatgccggtttcctcggccacggccagcgcctcacgtgcctgcccggcgttcgcggtgaacgacttctccaccagcacgttcttgccggctttcatacacaggatcgcctgttcggcgtgcagactgtgcggggtggcgatatacaccagatccacatccgggtccgccgtcaactcctcatacgatccataagccttgtcaaaatgccattggtcggcaaaagcctgcgcgcgcgtaatatcacgggccgctaccgcatacgggtgaatccatgaggaatacagtgaaccttcagccatctgggtcagggtgtcggccatggtgtgagctatgcggcccgcacccagaatcgcgacgttgatcttttcgccgctggcctcgaactcggcgcgtttgccattgaatcgactcattattcctccttgaatacgggttggtacactcaatcgacctacagtgattatagaagaagaaaccttgtcccgtgaggcggatagaaccgaaatatggaaaacgaagcagcgcagcagccccaatctccggccgtgtctccagtcatgtcccgccgagcgcgtgaggccaatcccttccgtgccatggtattcggcgaacaagcagacaagatgatcgcccaaggtatcagcgtcatcaaattaagccttggcgagcccgatttcggcgcgccgcccgccgtacgcgacgccatgcgcgaacagtacgacggccgggccctgccgtacaccgccgccatgggcctacctgaactgcgccaagccatcgccgacttctaccgcgagcgtcatgaccttgacatcgaccccaagcgtatctgcgtgaccgccggcggttcggccgccctgctgttggccaccgcgctgaccgtggaccccggtgacgatgtgattgtggccgacccctcctacccgtgcaaccgcgaacttgtgcgctcctttgaggggcgggtcatcgacgttccgacctcggccgccacccgcttccacctgaccgccgacctgtgcagccagtactggacaagcaagaccaaggccgtaatgatcacgtcgccgtccaaccccaccggcaccaccatcgacttcaacgtattggacgaggtgtgcaagctggccgccagccgcggcgcatggcgcatcgtggacgaaacctaccttgatttggccgaccgtgagccggacggcaccgaagtcaagtccgtactggcctgcgatcccggtgccatcgtgtgcaacagcttctccaagttcttcggcatgaccggctggcgtctcggctgggctattctgcccgacgaccccaccgtgctggaagcggtcgacgacctggccaccaactactacctgtgcgcccacacgcccacccagcatgcggcgctcgcctgttttacgccggagagtttggccgaatgtgaagctcgtcgtcaggaattgcttgcccgtcgccgcattgtgattgacgggctcaagcgcatcggtttgccggttgaggtggagccgaatggcgcgttctacgcctacttcaacatctcccgtactggtctggatgcctggacgttctgcgaacgcgcgctggatgaagcccatgtggctctgactcctggccgcgacttcggtgcggccacagcggatacgcatgtgcgcctgagctatgccgcctcacgtgaggccctgaccgaggggctggaacgtctcggaacgttcgtcgaatcgttgtgaacggcgcggcgtccggtgtgattgttgtacggtagtcgagtttgtgtgatgttcggctggcctcgcggtgttggttgccggccgaacgactcgccatggtggcgcacggctggctgattgcgatggtcggcccgttgttcggccatcacgggttgggtaaggtcaggaatagggatcatggtcaatctgcgttcacgcaccatgcgacttggtgtgcttgatatcggttcgaacactatccacatgcttatcgtcgacgccgctcccggcgctcgccctgaccccgaggccagcaccaaatccacagtgcgcctgatgaagtatttaaaggatgacggctcaatcaagaagtccggcatcgaggcgattctggaagccgtgtcccagtgtatgcggctggccgaggaatacgaaatcacccaaccgccacggtagccaacaacgccgcatgatcggagccctcgactttgaccaccttgcattgcccggccttcatgccctgatcaagcaccacgtggtcaataccggcgaacatcggcatatacacgcggttcgtaggccacgaaaacgtaaacccatgtccggattcacgtgcggcatccacgaaccggtcgccaagaaaatcacggaatggcgtgtgatcgtaagtggcattgaaatcgcccatgaaaatataccgtgtatccgtatgcccgcgcatcggacccaactcatccagcgatcgcttccactgccgccaatagccgggtacgggagcggtggtgtgcacggatacgaatcgaatctgctgaccacccatatccaccgtgccgccgggcatgaatgaggcgctggaattcacgtcatcgtcggccggatcggcaagtggcgtggccgaccagaggccgttaccgaatacgccgtcagacgatgagacctgcgcatacggcagatagtgctcaatgccagcctcgttgagttttttgacgaaatcctcggtggtctcctgcaaagcgagcacttcgacgcgctgatcgcggactagttcgacgatggcttgtgggtcggcctgccccttgtatacattgaaggtcatgacgcgcgcgtaggcatcgctggtgttgggggaggccgcagccacggcgttctgcgcggcttgggggagtgggtcggtcgagtagaagaacggatattgccaatagccattgcatgcgattgcggcgatggcgattagtgcggcaaggatacgccgcgacacgatggccaacagtagggcaatcaggccaagcaacgtgaaccagggcgttgccgataccacaatcggcacaaatggcagttcctgtaaatcggcaggcagcgcgcgggcggcagtgccggcaagggcaagaagcgcgaacatcgtggcgagaaaaccaagcagacgatgccgtttgtgtggcttcacggcagacttggatactgggcgtgccgtggctttggcagagcgtggcttggcagcggcgcgagctcgtacgcttgcacctgtggtagtactccgtgcctttgccatgctgccctttcctccggcttgtttactgttaccttgcttttcgtgcgatttgccactgtaccgtgtgcggcttgtctttcagtgtcttttcgtcgtgcgcaagagcagttcgcaccaaaccagcacgaaaaccggccatgccttggtggcgggttctgccaggtagcttacacagactgccatgcgtcttatgtaggctgccacgcgaacatgatgcgactgggcgtgcggccgtgtacaatgaaacgtcgttgcccgagtagctcagtggatagagcaccgctctcctaaagcgggtgtcgtcggttcgaatccgatctcgggcacttggcttcggaaacatgacggtatctcagcctctattcatcggtgatgagccataggcattaggcatgtgtaaacgtataggttccaccatccatcatcccgtcatgtgaaactatgcaaagacatgtggggcttcacggttatcgtgagggtccatggctatcgaatacacggaagagaagcggtttactgtcgaacaggttgaggcgctgttcaagtcggttggttgggaatcggcgcagtggcccgaacggttgttcaaggcattgcagcattcggatacggtaatcagcgcatgggatggcggctatttggtcggcttggttcgcgtgctcgacgatacgggagggggcgaaagtggcggagtgtgctgatcgggggcaacgtacgtagtcattgacggttatcccgtagtaatgttcacgatacgaccccttgtccatacagtgaaaataacggctggcgtccgacgcggctgcgctatgactagagaccatgagtgaagacaaacagtatgacttctatgtggccggtccgttcttcgatcctgaacaaacggcaagtatggaacgtttggaaaagatactggaagatcatggcaaggtattgttcaagccgcggtttgtcagccagatcgaagaagtcggccctgaaggatgttttgcggatgatatccatggcattaatgctgctaaagccgtggtcgccaatcttatggacgaggacccgggcacgatgttcgaaatcggatatgcgcatgcgctgggaatcccggtgtacggctatttcgaaaaccttacgccaatggatcgtgtcaatctgatgattgcgcaagcggtcgaactggttttcgccggtcctgatgatgtggcgaaatacttggaaaccggcgaacatacggaagtcgattacattcagttctaagcagctctaacaggttctcagcaaacaggggtggcggcgttctcgtacatagtcatgtacgggaacgccgcagtggtatagggatattccaataagcggcataatggagtcgtgggaaaccagtcggatacaagtgaagtgtccgaatttcgtaaggagtgccgttgtgagtagccacaatcccatgaatattgccaccgactttgccaaggccacgggaggaaccgctcgcaaagttgttgctttgaccgataaaggtccgttgaatggctttaagaaattcctgtcgcgcggatcgatgattgatatggcggtaggtgtggtgatgggctctgccgttaccgctgtggtcaattccatcgtcgacaatctcatcagtccattaatcggcatgattggcggcgtaccggatctttccggactgctgaccatcacgttcaacaactcgactgtttcatttggtgcgattcttaacgcgctgattagcttcctgcttgttggcgtggcggtgtatttctgtgtgattttgccgattaataagcttcgtgatctcactgctgcccaggatgaggctgacgctgaagaacaggggcctagcgttgaagagcagactctcgccacgctgcaggagattcgcgacgagctgaaaaaggccaatgactccgccgagtaatctgctgaatgtacggtgcgacagatttacctggtttgcccgaaataacggattgccggggccatttggtctggacaatccgttgtttcgcgcgtgttttgtagcatccgtggagttacatggggagtatgactgaaaacatcgctgataaggccataaacgatactcgtatcgtcaagcagttcaccaatcccgtcaaggagccgattgacagcgacatcaacctgttcgatttgctcgatgagcgagccaagcgcgatcccgatggcgccatgatcgaatataaaactgaggatggcacctggcagccgtacagcgcccaggtcttccgcgacatggtcatcgatctggccaaaggcctgattggtctgggcgtcaacaagggcgactccgtggccatcgtgtctcgcacgcgttgggagtggaccgctctggatatggcgatcatgtccatcggcgcactcaccgtgccggtatatgagaccaactccgccagccaggtcagctggattttcaacgattccaaggtcacgctcgccatcgccgaggatgacggtcagcgcgacaagattgaatccgtgcgcagcgaggtgcccaccctgcgcaacgtgttcgtcatcgaagcaggcggcctgaacgccatcaagacctatggcgaaagcgtcaccgatgccgaattctgggaatacaagagcgcctcccacggcgacgaccgcgccaccatcgtttacacgtccggctccaccggcaccccgaaaggcgtggagctcacccaccgcaacttcgcgttcctggtgcgctccggcctgcagtacatgcctcgtgccggcgcatggcccaaccgccgtctgctgctgttcctgcccctgagccatgtgttcgcccgattcctggaattcttcagttttggcggcaccatttctctggccctgagctccaatatgaagaccatggtcaaggacttcgagaccttcggccccacgctgctgcttgccgtgccgcgtgtgtacgaaaaggtctacaacgccgcctcccagcgtgccggcagcggttttgcgggcaagatgttcatgcgcgccgccgaaaacgcgcgcgaatggtccaaggccgagcagaagggcgagaagctgccgcttcccggtcgtattgctcacgctttctacgagcaggtggtgtacaagaagattcgtaccatctttggcccgaacgccgactttgccgtcaccggtggagccccgatggattccgagctctcccacttcttcaacggcatcggcatgccggtgctggaaggctacggcatgacggaaacctgtggtccggtgtgcgtgagcttgccggaagacaatcgcatcggcaccatcggcatgccgatgtgcggcatcaccgccggcatcgccgaggatggcgagctggtgatcaagggaccgctggtgtgcaagggataccacaacaaccctgaggtcaccacccagcagattaccgatggctggctgcataccggtgatttgggtgatatctccgaagacggattcatttccatcactggccgtaagaaggacctcatcatcaccgccggcggcaagaacgtgtcgccgggtctgcttgaggcttccgtgatgacctcgcccgtggtcaaccagtgcttggttattggcgataagaagccgttcgtggccgctctggtcacgctggatctggcggatgccaacaactggttggaatcccaaggcgccaaaccggaacccgatctggcctcgctggccaagaacgccatcgttcatgccgaggtagagcgtgcggtgaacgccgccaacgagggcgtttcccgcgccgagtcgattcgtaagttcgagattctgccagacgaattcaccgaggccaacggcatgctgaccccgagcctgaagacccgtcgcgcgcaaatcgttgagcactatcgcgagctcattgacgacgtgatctacgtgccgttgaagaagtagctatcaactccctctgatccaaaaaataagctctctctgacgagggagctgtcagccgcaggctgactgggagagaccgcggctagcccgcgaaacaacaaggccgggtgcgacttgcacccggcctcagcttattcagtccaaaatcgccgaaacataatcggcggcggcctgatccagctccgcatcgccgatggtggcggtgccctgcaccaggaacggctcagcatagttcatgccgatcttgtacgccacgacctcaaacgggctcagcagctcctccatggtgtggttgtactcgccatccttgcggtacttggcggcgtcggaaccagtggtgaccaccagcttgagctccttgcccttgagtgcgtggcctccaccgtaggcccagcctgcggtgatgacctcgtcttcccattccttgagtagcgcgggggaggagtaccagtagaacgggaactggaggattacgcggtcggcggcctccagtagctcgtgctccttgtcggcgttgacggagaagttcgggtattcggcgtattcgtcgcgtacgatgatgtcgtcctcgccttgtgcggcgagttcggcaagcagacgggcgttcactcgcgagccgtccttcaggtgcggatggaatacaagaatcagcgttgacatgggatttcccttctataactgctaccaatgtggcctaatcaccactatcgtatgccgggaagcggaactcagtccagtccggattcaggtgcgagccgcgggatgccgcggatgagtaattgacgcgggaaaggatgctgactgatgatttggcgctgaagcttcagtgggccgcatatacgagtcctaaagcggataggatgggatatgacgcggatatcgtcggtggactgaataacgggaggcgcacatgaccatgaaccgcatgctgatgtgccgtacccatccggtaatggagttcgagtatttcgaacgcggcggatacgccctgagggcaggggagatctacgacgagtcccgaatcccgatcggcatgtatgtggacggcaaacctgagcccaccggtgagtcgattaccgggtggtggcgttctcgcggcattcccatgacccgtgacggtatgcgttccgtatttgccggttcgggtatcgcttcgacgaacgatctgctggaccgttccttgggactcagcctgtcggaccagtattgggtgcggcctctcgaccggcccgatctgacgtgggaaaaactgaactttttccacaacgattttgacgaacgacttgggcaggccttattcttcggtaattcgtcgcgcatcggcaacgtgaacaccccggatgtcaccagtgccggtgacctgccgaaacgttggattatcggtcccgatggcgtccgcagcctgatcaagggagggcgcaccggtcaggagccggacaacgagcgcatcgcctggcatacggcacgactgttcggcatcgaccatgtcgaataccgcatcggccgcgccaagggcatccgggtctccgtctgcgatgaaatgctcgaagacacgcaagagctgattcccgcagggcaggttatgcgcatcttccgacgcggcgacaacaccgaacgcaagatgatatggctggacgcatgtcagcaactcggcgtaagtcatgatacggcaaatgcggcgaccaacgattttctgttccttgattttcttctgcgcaacaccgaccggcattacaacaacttcggtctcatccgtgacgtcgaatcattcgagattcgcccggccccgatttttgacagcggcgccagcctgtggaacggcatggaccccgaagccatcaccaacgaagactacccggcgaagccgttctgggtcgacgactacggcgatgcggacaacgcctactggcagttgggacttatcgacgattgggaccgttatgatttggggatgctcgacgaggtgcctgaactgatacgggcacagctcgccaccaaccgccggctgtccgctgatgtgattgacgccatctgctccgccatgcaggagcgcatcggcatcatccgcaagcttgcacgatgatgccgcgccgggaggcaactcagtcgaggttggactgcgtgcctgcggtggcttcgttggcggcttgctcggcttgtgcctggtcgagcttggctcgtacgtcgttgagcaggccctgggcgcgcttggccaaggcctcgccgatttcccattgacgcatcgactggtcaagattgaggccgccggtttccagtgcctggacagcctgaatcagcttgtcgcgcgcctcctcatatggcatctgggcgatgagctcgcgttccttgtccgtcagggacgaggcgggggtgttcttgtcggtgggtgtggtgttctcggtcattttgttctccttatatatacggtatatatgcgtgaatgcatatggtgcattacgcggttgcggttgcggatgtggcggtggcggtaatgacgccctttttcagggtgacggtgatgtcatccccggtactgacccgcgaagcgtcatccagcacatggccatcggcggactgcaccaccgcatagcctcggttcagcgtggattgggggctgagtgcggtcagtgaggcatgggcgcgttcgacggtgagctgggcatcatccacgatacgccgcaggccgatgtcaagccgctgcagggaatcgtcgatcagccgctgatgcggttcgagcatggtatgcggttgggtcaggctcgggcggttcgcatatccctcgataagtcgaatctcgttctccacgcgcgaacggacccgcagtcgcatacggtcgatggcaccttcgatgagctgcgactgctcacgcacatccggcaccacgcgcttggccgcatcggtgggggtggaggctctaagatcggcgaccagatccagcaacgtccagtcatcctcatgcccgatggaggagattaatggtgtggtgcaggcatacgccgcacgaaccacacgctcatccgagaaaccgatgagatcctcaaacgagccgccgccacgggccacgatgatcacatccacgctcgggtcggcatcgagttgtgcaatggcctgaaccacttcggccgggcattgctcgccctgaacatgcacatggaccaccttgaaggttacggaaggccaacgaaggttcacattggtgatcacatcgccttccgcacgtgcctgaggtgcgcaaatcaggccaatagtcttcggaaactccgggagaggcagtttgtgatcggcatcgaacaggccctcgcccttaagctgcttgcgcaattcgtcgatcatggccttgaggctgccaccggctccgaccttgagaatcgtgtccccgcgcaacgacagcgaagtgcgcttcatccacaggttcggtttgccatgaatcaccacgcggtcgccctgaacgaactggctggccgcggccgcgaacctgccgaagccattgacttccatggcgatatcctcgaagtcgtcgcgcagcgtgatgtaggccgagccggcgcgacgggtattgatctgcgtgatctggccggtgacccacgcggacggccatcgttccacggcaccgtagaacttctggctcagcacacttaccggccacggattttgcgcgctggtttcagcggcgcgtgcaggcagctgatcgatagggcgaggctcattcggcagattgatggtgccctgatcaggcgcgaaagtgccttgacccggctcaaagccagccgaggccagtgaagcggcggtcggtggacggccggtagatgggtagcccattgcagtagtcatgcactccactataagtgcgttggttgatgacggtaaatatttaccgtcgcctgaaaacggtgtgatgatgaatgcgagaaccgtacgaagcgatgtatcagccgatgatggagatggtctggtgcatcagaagaaaggagtcattatggcgaagaaacgggtgctatgaagaggagtgagatatgcgttgcgctgacgattgagagtcgttagtgagctcgctgtgcgacacgcgagcagaaaacagttacgctaatcacacacttgtggttttggcggaaaatagccgaaaaccctataaatagttcgacacaccactgttgagcactagatatagtggtggggatgccgtattcttctagaggttcaaaaaacgacatcaatgtaatttcgtgtggcccacgtcgagtgcggccaaaatgcggaactcaggagagtgttcgccttataggaaaggggtgcccgatgggcgcacaggtgttggaggaaatcgtcaccgataacgagaccaaggtggccgccaaggcctccaccgtgctcgttgagaagcgtgatggtcgtgtggtcgacttcgaccccattaacatcatctctgcggtcaagtctgctttcggtgacctgaacaaggaagtcggccccgaagaagatgccatgatccgtggtttcgccaaccaagtcgaaggcgaaatcaaggggcgttacgccggccccgccaagatcgaggacatccagaacctcgtggagcacgccctcattgacgcccacctgtacgatgtggctcgcgcctacaccaactaccgtctcgacaaggacattcagcgtgccaaggccactgatgtcaacgaggccgtttcccgcttcatcaaccacgacccgaccctgattcacgagaacgcgaacaaggattccaacgtctactccacccagcgtgatctgctggccggtgccgtgtccaaggccgccgcgttcaacatgctgccgccggcggtgtccaacgcccacatgaagggcgacattcacttccacgatgccgactactcgccgttcactgcccagtccaactgctccttgccgaacttctgggacatgttggccaatggcttcactcttggcaacgctccgatggcttccccgaagtccatcgccattgcggccacccagattacccagatcatgaaggacgtggcctccagccagtatggtggccagaccgccaaccgtgccgacgagcatcttgcccagtatgccaagaaggattacgagaagttcctcgaggaagctcgtgagaccatccccgacggcatgccggttgaattcgcccgtcgtcaggtcgagagcgccaagaggaacgagcccgccaagctgcatttcggttcccgcgaaccgctgccgatggacaccccgttccacaccgacgttgacgaacttgagcaggagcgtgaaatcctcgccaagattcgtacccgcaaggccatctatgatgccatgcagaccatggaataccagatcaactccaaccgtgtgtccaacggccagaccccgttcgtgactgtcggctttggtctcggcaccgactggttctcccgcgaggtgcagcgcgcgatcctgctgaaccgtattcgtggcctcggcaaggaacaccacaccgccatcttcccgaagctcgtctttactgtgcagcacggcgtgaacgccgacccgggtgacccgaactacgatttgaagcagctcgccctcgagtccgccaccaagcgcatgtacccggatgtggtgttctacgagaacatcgtcaagatcacaggctccttcaaggctccgatgggttgccgctccttcctgcagggttggatcaacccggagaccggcaaggacgaggaggatggccgtatgaacctcggcgtggtcaccgtcaatgtgccgcgtatcgccatcgaatcccacggtgacaaggctcgcttctggaagctgttcgaggagcgtatggaagtcgcccatcaggccctccagttccgcatcatgcgctgcaaggaagccaccccggtcaacgccccgaccctgttccgcttcggtgcgttcggtcgtctcggtgccaacgacaacgtggaccagctgttcaagaacgagcgtgccaccgtgtcgctcggctacatcggccttgccgagaccaccgcggtcttctacggcaagaactggattcgcgaccacggctgggatccggaaggcaaggagttcgcgctgtccatcgtcaagcgcatgaacgagctgtgcaagcagtggagcaaagcggagggctaccactattccgtgtactccactccggctgaatccctgaccgaccgcttcaaccgcatggaccgtgaaaagttcggccgtatcgaaggcgtgactgaccacgacttctacaccaactccttccactacccggtgtggttgcagcccaccccgatggagaagctcagctacgagaaggacttcccgtactacgcttccggcggcttcatcaactactgcgagtacccgtgcctgcaggacaacccgaaggcgctcgaagccgtgtgggattacgcctacaacatcggcatcggctacctgggcaccaacaccccgatcgaccactgcttcgtgtgcggcttccagggcgacttcgagccgaccgaggaaggcttcaagtgcccggagtgcggtaactccaacccggacaagtgcaacgtcaccaagcgcacctgcggctacctcggcagcccggtccagcgcccgatggtgcacggccgtcacgaggagatcgcccaccgagtcaagcacatgagcggcgaaaccggtcgtgtgacgctggatgacggcaccacccgcgagtggttcgaagaggccaagtagggttattcgtgagtaggctcccctctctgaggggagctgtcagcaaagctgactgaggggagtccgaagagctattccgaagctcccctcagtcgcctacgacgacagctccccctcaaagaggggagctaatgctttccgcaaggagggaatcatgccggagttgcatacgaccaagcccgaacccaagcgccatgactttgcggccagcgagaccgggcgtggcccctccgtaccctccaacggtcttgccaacgatccgaaagccggtcaatgggatggccggcgcatgtccaagcggatgatcgccgactacaaaaccttcatcgtcaccgacggagaaggcgtgcgcaactccctttacgtctccgggtgtcccttccactgcgtcgactgcttcaacgcctccatctgggacttccaagcaggccacgaatacacgcaaaaacttgaagacaagatcatcgaagacctgaaagcgccatgggtgcaaggcattacgttccttggcggcgagccattcctcaacactcccgtgctggtgccgctcgcacaacgtatccgccaggaattcggtcataccaaagatatctggtcgtggaccggctacacatgggaagagctcatgcgcctcggagaaacaccagacaagcttgaattgctgcatcttatcgacatcctcgtcgacggccgctacctcaaagaccagaaggactcgctgctgcaattccgtggctccagaaaccagcgcatcctcgatgtgtccaagtccctagaagccggcgaaccggtcatctgggccaagctccacgatcaagaacgagatatccccgaaatctatttgagagaccgcgaagccggcgaaggccaacaggcctcgtagtagcaggtccggaatgccgcactcagcaatatcgtcggaactgttggggaacgcccttcccgtgagcgaaatcaccatgcccggcgtcacgttgggcaggtggtcggactaatattccagaagaagtagccgggcgaagccgtccgcaggtatctgccagccgtcccgaaacggctcatgatgcctgaaggcgcacatacccggaagtcggaattaagaggaacacatggttgacatcgtcactgacgcgagcgtaaagcccgcttcacacccgaagcccctgcgtgtgggattggacatcggttccaccaccgtcaaggccgtggtgcttgatcagtccgattccctgaaagacaccctcttctccgattaccgacgccaccacgccaacgtgcgtgccaccgtggccggcctgttggtcgacatccgtaaagagctcgtggaactaggtcgaggcgatgagccgattcgcctgtctatcaccggttccggcggtctggcgcttgctgacaatctgcatgtgcctttcattcaggaggtcatcgccgaaaccgaggcgatcgacaaggaatacccgcaggccgacgtcatcatcgagctcggcggcgaggacgccaagatcacctacctgaagcccacgcccgaacagcgtatgaatggttcgtgcgcaggcggtaccggcgcgttcatcgaccagatgtccacgctgcttgacaccgacgccgcaggcctcaacgagatggccaagagctacgagaacctgtatccgatcgcctcgcgttgcggcgtgttcgccaaaaccgatctgcagccgctgatcaacgacggcgcggccaagcctgatctcgccgcctccatcttcaccgcagtggccacgcagaccattgccggtctggctgctggccgcccgatccacggtaccgtcatcttcctcggtggcccgctgttcttcatgtccgaactgcgcgccgccttccagcgtgcccttgaaggcaaggtcgacgagttcatcgtgccgaccgacgcccacctgtatgtggcctacggttcggcattgcaggccgacatggattccgacgatcagggccaccatttcgaggcccacacctgcgatgagatcctcaagcgtctggacgagctgaagaacctgccctccaacacgcccaccatgccgccgctgttccccaccgaggccgaccgcgaggacttcaacaagcgccaccacaaggaacacatccacatcggcaccctcgaaggcgcgcatggcccgcacttcctgggcatcgacgccggttccaccaccatcaaggccacgctcgtcaatgacgaccgtgaaatcgtctggtccagctacgccaacaacgaaggcagcccgctgaccgccgccatcaacatcgtcaagaagatccaatccgagctgcccgaaggcgcatggatcgcacgctcctgcgccaccggttacggcgaaggccttatcaccaccggcctgcacctggacgagggcgtggtggagaccatggcccactatcgtggtgccgaaatggtcagccccggcgtcaccgccgtcatcgacatcggcggccaggatatgaaatatctggccatcactgacggcgtcatcgactcgatcgccgtcaacgaagcctgctcgtccggctgcggctcgttcctgcagaccttcgccatgtccatgggcctgacgattcaggaattcacgcaaaaggctctggcttccacccatccggtggacctcggttcgcgttgcaccgtgttcatgaactcctcggtcaagcaggcgcagaaggaaggcgcctccatcgaggacatcgctgccggcctgtgctactccgtggtgcgcaacgccctgtacaaggtcatcaagttgcgtgattccggcgaactcggcgacactgtggtggtccagggcggtacgttcctcaacgacgccgtgctgcgcgccttcgagctgctcaccgaacgtcaggtcacccgcccgaacatcgccggcctcatgggcgcgtttggcgccgccctgaccgcccgcatgcactatcaggatgaggccgaccacttggacgtggtggttaaggccgatgggtccgaggaacagtccgaggccgagtccgcacccaagttcgagcccaaggccgcagccttcaagaagaccgagccggccaagcccgaagcccatgtcgttgtcgtggacggtgtgactcacaccgccagctccattctgaccggcgaagcgctcgacaacatgagcatgaccgccgagcgtgacgtgtgcaagctgtgccagaaccactgcaagctcaccatcaccacattctccgacggctcgcgcttcgtgaccggcaaccgctgcgaacgcggcggcgacgccaagaagaagcgttccgaccgtccgaacctgtacgactacaagtacaagcgttgcttcgcctaccgccgtttgaccgacaagaaggccactcgtggcgagatcggcattccgcgcgccctcaatatgtacgagaactacccgttctggttcacgctgctcaccacgctgggcttcaaggtgatgatctccggccgcagctctcacgagctgttcgagaccggcatcgaatccatcgcctccgaaaacatctgctacccggccaagctggtgcacggccatatcaagtggctgatcaacaagggcatcaagaccatcttctacccgtgcgtgagctacgaggagaacctcgtgcccaacacggacaatcattacaactgcccggttgtggccaactatccgctcgtcgtcggcgccaacatgcccgaactgcgcaaggacggcgtgcgctacatgcacccgtacttcaacctcgccaaccacgagctcatggtcgaccgcatcctcgaagagttcgcctgggccgacgtcacccgtgaggaagtcgaaaccgcagtcaaggccgcatacgccgaagacaaggtcttcaagcacgacgtgcagcaggagggcctgaccgcgctcgcctacatgaaggagcacaactgccgcggcatcgtgctcgccggccgcccctaccacatcgaccccgaaatcaaccacggcatccccgaaaccatctgctcgctcggcatggtggtgctctccgaggattccatctgcgaactgcagccgggggagaagctcaacctcaccgaattcctctcggaaggcgaagccgacccgcgctccaagaacgccgccggattccgccacgtgggagaccgcacagtcaccaagatgccgttgcgcgtcaccaaccagtgggcctaccactcccgtctgtacgcggccgcacacttcgtggcctcctacccgggcctcgaactcgtgcagctcaattccttcggctgtggccttgacgccatcaccaccgatcaggtggccgaaatcctggcagacaaggcggacgtgtacacgctgctgaagattgacgaggtctccaacctgggtgccgccaagattcgactgcgctcgctcaaggccgccgtcgaggaacgcgaagccaacaaggcccgcgaagccgccgcggccaaggccgtgcaaggccccaagtccgccggattccgcaagaccggctccaccgcgccaacccccggccgccagattctgcttgacagcaccatggccgccaacccgaagctcaccaaggccatgcgcgccgcctccaagcgtgccgccgaacgcgacctgcaggccgcagtcgccagcaagaacggcacttcggacggcaccaccggcgtgacgaacgccaagaacgccaagaagtccggccacaacaacgccaccatgtcccgatacgcgcatcgcgagaagttcgtcaaggacatgaagaagaactatacgattgttggccctcagatgagcccgatccacatgtccttggtcgaagcggtgattcgttccggtgggtacaagttcgacatcctgaagcacgcgagccgtggcgatgtggaaaccggcctcaaatacgtgaacaacgacgcctgctacccggccatcatggtcgtcggccagctcatcgacgcgattctggaaggcaaatacgatcccgaccatgtagcgctcgccatcacccagaccggcggcatgtgccgtgcgaccaactacttcggcctgatccgcaaggctttggtcgatgccggctatccgcagattccggtcatcgccatttctacccaggggctcgaagataaccccggcttcaaggccaccctgcccctgctgcaccgtgccatcaaggcgctgattctgggcgacttgctcatgaagtgcctctaccgcgtacgcccgtatgaggtggagaaaggttcggccaacaagctgtacgagctgtgggacaccatcgtgcgtgagaccatcgagcatcacggctattccaagaccgcagccaaggcgccgagcatcaagaagggctatctgccgtataacgtgctggccaaggagatcgtgaaatcctttgatgcattgccgctgcgcgacatcccgcgcaaggtgcgtgtcggcgtggtcggcgagattcttgtcaagtaccagccggacgcgaacaaccacgtggtcgacgtcatcgaatcccaggattgcgaggccgtggtgcccggcatcatggaattcatgaccacccgcccctacatcaccgactggaacgagaagaacctcggcatgggcggcaacaagacggtttacgccctgatgcgcaagggcctcgacctgtacaacgcgccgatcaaggccgcgctggccacatcgaacggcaagttcaagcaggacgagccgatgcccgaactggtcaagaaggctgctgaagtcacctccatcggcgtgcaggccggtgaaggctggctgctgacggccgagattctggaactcatcgaacagggttgcccgaacgtgatctgcgcgcagccgttcgcctgcctgcccaaccatgtgaccggccgcggcatgttcggcaagatccgccgcctgcatccggaagccaacatcgtctccatcgattacgatccgggtgcctccgaggcgaaccagctcaatcgtatcaagctgatgatcgccgccgccaagaaggctcacaacgccaagttcgccgaggccggcgagccgcagggcttcacctccgcggactgatttatgctctggctcgtccgcaattaaggacgagcttcgctcgcgacatgctggttcgcctatcggctcaccctcgcctacggacagtccactgggctgtccgctttacggctcggcctctgtgaggggagctgtcgcgcagcgactgaggggagtctctagagcgagaaaccgggccggagcctgctatcggtttttcgtatagcgtattacgggctttcgggcacgcgcaccggccggctcgaatacgatacaaagcatggttactccccgaatcagttacgcgcacctgctcgccaagccgaaccccaagcacgtcgaaagcctgctcaagttctttgagaa

SEQ ID NO: 2607 - DNA, 44240 bp, Unknown
  R222_15m  MAG No. k141_17067
gcatagcacatcacggctgccacaccgaggatttcccgtcgggggctagatatatgcttccggagcatatactttccggaaacctacaggtcaatccgtgaaaatccgcgattccggacacactttttgacccttaaccctgttcggcgatgccgatcccagccagctgaagtctctcgccaccctgagcaacgccaaggtattcgacggccgctccggcgacctcgccgccgtcttccgccaagtcaagggcttcaactgatgctccaggtaatctgtggattcgttgtcggactgctgctcgccgggctcggtttcggactggtcggcggcggagtgcccggcctgatcgtggccgtggtactggccgcacttgggtatatcgccgcctccacgctcaccgagccggagcgacgcatcggcaaaatgctggtttccgccttgcccaacggtcagaagaccgccgatacgatcgacgcggcgaacgctcaactcaactcgatcgccatgctcaccaagcaagtacgtgacccagccgtcaaagccgaagccaacgacttcatcgccgctaccaaagattgagtgcaatacgtgacccgagacacctccgcctacccgacgttgcgccactacatcaccgtgtacggcgagcagaccgagaaactgttgcgctcctacgtggacgtggaaagttccggcgcacgcgatcagatagccacggtacgaatcgaaaccatcgaggcgctgcaagtgctcgaacagaccgccgccggcgaactcagccgggcggtaagcgccaagacgttgggcattacggccgactccgacgccatccaacggttggcccgcatggatggatacgacgacgtcgcaccttcgcctgtgccttcctcggctgctgatgaaggacggcatgcacccagtcagactccatctggcggcccggctcaccagtcggaccagaaaacggacgcacaatgaaactctccaaatcaaaaatcatcggactgatcgccctgcttgcggtagtgggcgtggtctgcggcacgctggtgtggcggcaatcgcaaccagcgccggccgaaccgaccgaacaggtgagcatcaccggctacctgggcggcgagaaaatcggcctgttcgatgacgccaagttcaaggcgcttgccgccaagcaaggcatcgccatcgactatcgcaaggccggatcgctggccatgatggatgcggaccggaaaggcatggattacctgttcccctcctcgcgcgcggccgtcgaatacggcaatgcgaaaggcgtcaaggccacccaaagcgacatcgtcttcaactcaccgattgtgctgtacacgcacaaggccgtggcggacgggctcgtgaacggcggacttatggccaaggacgattcgggcgcgtaccacatggatatggccaaagccgtggacgcgatggtcgccaacacaacctgggccgacgtcggatacacggcaggctacgggcagttccgcatcgactcgaccgatccggtgaagtcgaactcaggcaacgaatacgcggcgctgctcgccacggtgctcaatggcgggcagccggccacggtcgattcggtggcgcgcgacggcaagaccatcgcctccatcttcgccaaatccggttggatggagacctcttccgaggattcgttcaaccagttcctgaccttgggcgtgggctccaagccgatgatggtgggctacgaatcgcagctgcttgatttggccgtgaaccaaccggatgcgttcaagcagatcaaggacgacgtggtcatcgtctacccgacgccgaccgtgtggagcacccacacgctgatggctttggacgagaaaggcggcacactgctgaacctgttgaaaacaccggcggtgcagaagctggcgtgggagcgccacggcttccgcgcggccaacttcgccggcaccgattcgatcagccgattcggcgtgcccggcacgctcgaccagatccccgccgtatccgaactgcccaacaacgacgccatgcaacaactcatcgccaccctccaatccacgcaatagctcttttgccagcccccaatcggtgtttttattaaccccctctgacgagctgagtcgtatagcaaacagcccagtgggctgtttgcagacgaaggcgagcgagagcgagcaaataagaaatcggctgtaggccgtccttaattgcgttcgggctcccggcaaagccgggtggggggagagacccaaacataactatcaaaaaaggaaccagaatgccccaaaacatcaccctcgcagacctcgccaaaagctccgcaacccccatcaccaacccgttactcaacaccaaccaagccgccgcggccctgaccccggaccagcagatcgccaaattgcccgaagccgaccatgccacggtcaaccagatggccggccagatcgacttcactcgcgacggcatcgaatccagctacggcaaggacgcccagcgcgccacctccgccttcgccgacgaaatcctctccgacacccgctccaaagacaccggcgaggcgggcgaactactgaacaccatgctggtcaccattgacgaggctgacctcggcggcttccgcaccattccgatcatcggccaggtggccgtcagcgtggataagctgcgccgccgctatcagaaagtcgacgcgcaaatcgacgaaatcatcgtgcgtctcgaatccgcgcaagccaaactcgtggccgacatctccatgtacgacacgatgtacacgcagaacgcccagcaataccgcgagctgaaaatgaccgtactggccggcaagaaggcgctcgccgacttcaacgccaaccagctgccagcgctggaggccgaggccgccgccagtggcgacgccatgcaggcgcaagtgctgaaggacttcaagtccaagctcgaccgttttgccaagcgactcgacgacctcgaccgcatcagcgtggtcaccttgcagaccgcgccgcagatcaaaatcatccagaacgcggaccagaccatcgtggacaagatcgacaccaccatctccaccacgattccggtgtggaagagccagatggtgatcgcgctgggcctgtccaaccagcgcaaggccctcgacctgcagaacaaggccgacgatgtgaccaacaagctgctggcgcgtaacgcggccgccctgcacaagggtgcggtggacgcggaaaaggccaaccagcgttccgtggtggaaatcgacacgctggagaagatcaacgtcgaactcatcgccaccctgaaggagaccgtgcagatccagaaggaaggcaaagccaaccgcgaggccgcccaggtcaagatgcgccaaatcgagtccgacctcaaaaacgccttgctcgaaaacgcccggcagatgtgagccgttcgcgcgccagcatgctcccgttggcagaggtatatgagtacgcctactggtgtgcgtatatatgctcccgctggcgggagctggcagccgtaagactggctgagggtggtcacggcgctcggctcggccggcttaccggcaaccattccccgctgcaatttctctgtgggcataatcccggaatgattgccgcgctcgggaattgggtgaagtgaaggttaaaggttgagagcccgggagggttccggaaccggccacgataaccgctgctagccccgcgatacgggttggcggccggcatccaagccgattctctcctaatcaaggagtaccgattatggcaatgtttccggctttgatgaatgacacgatgttctcggatctgttcgatgatccgttctttgagggttggcgcaacacggacaacacgatgagtgccgcaatgcctgccaacatgatgaccaccgatgtgcgcgagaccgacaagggttacgacgtcgacatcgatatgcctggctttaagaaggaagatatcaaccttgagctcaacaacggctatctgaccgtgtccgcctcgcgttgcagcgagcatgaggacaaggctccggccgctgagggcgaggcttccgacagcaagtgcgcttgcgcgtccgattcgggcaagtggctgcgtcgcgaacgctacatgggctcctgctcgcgtagtttctacgttggcgaggacgtgaaggagtccgacatccacgccagctaccggaacggcacgctgtgcatccaggttccgaagatgcaggcccagccgcaagtcgagtccaagcaccaaatcgcgattgagggctgacgatacttgattcgtcccgaagtcccgcttcgagtagctttgccccctctgacgagggagctcccgcgaagcgggtgggggagagataaatcgtaaccaaaccatgcttcccacgccgcctgccctacgctttcaacgccgactaacctgacagacggcgggaaacatagccaatgcaaatgccgagtagggatttaccctacccggcattttgctgtttcaatcaccgaaccccaccctgttcgcgcgccggtcgtgtgccgttctgcagctgtacacatccgatgagtagaatgccttcgaaacgaggcaagagaggcggacatatggcgaacggcgcacagaacgcaagcggcacgccggccccggcggcaagccgttccggcggccacgtcgtatccgcgcgcgccacgaccatcggcctgatggcgatcctgctgtggagcttcatggccggcaccgtgcgcatcgtctccgaaaacttcggtgccacgcttggttcggccctgatctacacggtcggcggcatcctgctgctgatgttccggcgcccggtcccgattcgcgagttccccaagaaatacttgattatcggcggcctgttgttcgtattttacgaatcgtcgatatccctctcgctgggtctggcctctaccgacgcatcctcggtggaagtgagcctggtcaactatctgtggcccacgatgatggtgctgctgtcggcgggcgtatcccatcgcaagcacgcggtcgtcaaggtgctgccgggcgcgattgtggccactgccggcgtggtgctggcggtcggcggtaattccgggctcgactggcatgcggccgtgcagcatatcgccgccaaccctttgccctatgcgctggcgttcgcgggcgcgctcgcttggtcggtgtacgcggtgttcacgccagccatgagtcatggggtggacggcacttcattgttcttcccctgcgtggccgtggcgttgtggattatccacttcgcgtccgggcaggggtggccggccgagccgccgagtctggtcgcatggctgtttgtgttgattgccgcggcggcgattggcggcggttatgcctgctggggctatggcattctgcatgggtctatggagcggctggctattgcgtcctatgccacgccggtgctgtccaccggggccggtgcggtgctgctgggtttggcgctgtcgctgccgttttggtgtggcgcgctgctggtggccgccggatcggtgctcaattacttggtcagtgcgcgcaaatagcggggtggctttgctcatggggcggtaataatcccatggggcggtaaaaccctcatggggcggtatcccaaaatggctttattctgccgtttcacaatttcttcaaaccgccccatgggccttttaccgccccatgggtaaattaccgcccgatgggcagcagcaacttactcgccgcggcgctcggacgggcggcgaatcgggtcaagcagcgtattcggatcggagatgccgaacatgctgcgcccgccggtggattcagggtgcttggcgagaacggccagcgaaatcgcccccggaatcataatgatcaccgaaagggccgccaatccccagttcacgaagaatccgagccccagtacgatggccaccacaaccaccaccgtgacgataatcgtcaacagtgctcgacgtgggttggtttccctggtccaagaggtgctggctgcgggttttgctgttgaactggccgcggcgtttgtggctgttgtgccatcagccgtgccggtcgtgggccttgccgccgcgctcgtcgcggggtcagtaggggcgtcagacacgttatcggcgacattgccggtcgctgctggacgttgttcgtttgcgtgagtcatatccaccaacatattccctgcttccggctaaagctgggacaagcctgcgcaccgctaatccagcgccgacactggccttgagctgcggacgtccaggccggatgtgaacaggagctgaacggagtctggggaaaccatgagaactcgcgacaatttttgtgaaattgggtgacgctctatgaatcgcgcgctagtattgcgtgagcttacaagacgaggagcctggagcgcggggacgaaggatgaagaactccgtttggaagacgttcatggaattgtcgctggtccgcggaatcgtgccgtggaccgtgttcggactgaccgcgatcgcggcaatcatactgattgttgggctggcattgagcaagaagcgcggcccggcagcagacggcctggcgccggacggcgaatcgtcggcccaatcgcccgtcgacccagataaccagccggccaaccagcctacgaacgcggctgctacggcgtcatccgcagcttcgacggaagagacgtttatttcccatggcctgcgtacgccgcaacgtcgtcacttgcatccgctggccgccgcgctggccgccgccgtgctcgccggcgcgggcggactactggccacatggctgatgtccgacgtgttcatggtgttcggcgtatcgttgggctggccggtgatcctcaccgtcgcgggaggcttcgcgggcctcggcttcgtgctggccgccgccgtgacgttacggggggcccgtcgcgcgctggccgtcgtgctggtgccgctggtgctggcgtccaccgcgctcggcgtggactcgatctacggcgaataccagaccatcggcagtctcgtcggctatacgccataccccccgctcggttcggtcaccgtgcgcaaagcctcgatgagcgtcggcgagtggcgcgacaaggcgcgcaaggacgctctgccatccatgcccgactcgggcagggtgttcgtcgtcagcatcccgaacaccgaatccaagttcaaggcgcgcaaggcgatggtctacctgccgcccgccgcgctgtccgaccgcccgccggccctgccggtgatggagctgctcgccggtcagccgggcagtcccggtcgcctcatcgacgccggcaacatcgccgccacgatgaacgcttacgccgtcgaacatgacgggctggcgccgatcgtgctcgcacccgaccagaacggttcggccatgcacaacagcctgtgcgccgacaccacccgaggcaacgccgaaacctacctcaccaaagacgtggtgaactgggccagggcgacgctgccggtagccaagtcggcccgtatgtgggcgatgggcggattctcgcaaggcggcacctgcaccacgcagctggtgccgcgtcaccccgacatctacggtgcgatgctgccggtggatggcgagcttgagccgaccgatggcagcgtcgagacgatggttcggcgatatttcgccggcgaccgcaaggcctacgacgggcaggtgccggtcaacgccatcgccgccaccggcacggccggccaggcgctgttcgccggcgccggcaaaggggatcggaagtcggtcgccaacatgcgcaccatcgccgcggccgcgcgcgcggccggcatgcagaccaccgaactggtcgtgcccggcgccgaccatgactggcatgcggtgcaggcggtctggaaccccggtctcgactggttcggcgcgcgaaccgggctgggcgaaatgacgaaatcgttggaggaatacccacaagtggaggtgttgcaatgagcgaagaacaacagcatgggaacgcgcggccggcggccatgccgcagacgcggcggcccctgcgggacgcggaaccctcgcggacgaagcccgccacgacctcccgcgccaccaaaccgcatacggcaaggtccagccatgcggcggaaagctggcgtgaactggccggtgacgtgcggcagtgggcggacgatcaccggttggccgtcaccgccacggcgacgctggtggcgctgaatctggtggcgtggctggtggccgcgatggccggattcgcgtttccgctgcggctcagcaccagcatggccgcattcaacgccggcaaactcatctgctcgctgttcctggcgcgcggcgtcatccaactcatggtcgacgccgtcctgtggctcgtcatgctgtcgatagccgaaccatggctcggccgtgtgcgcaccgtcgtcaccgcgctcgcctgcgcggccggcggcgtgctggcgggcctgaccctgtgcgcggcggccggatggatgttccaggactccctgttcgtctcccgcatgcggttcgcattgagcccgctggtgttgccggtcggcgcgctcatggcggccagcgcgttctgcagccacctatggcgcaggcgcatccgactcgtcggctatgtggcgatcctggtcacgttgctctacagcggcaaccccagcggctactgcatactcgccgccgcgctgatcggccatgccgccggccgtgtgatggccggtccgcccgcgcacgtcgaagccgaatggcactggctgcgcagcacctccttcgaggcgcggcgcatattcgcggccatcgccgtggtactggccctggggccggtcatcgccatcacctcccataaccatgcgggcccgctcagcacgatcggcctgctcatgagcccggtttccgtcgacaacggcatgctggccaaatgcctggccggtgacacgcacggcggatgcttcctgcagttcgatctgttgcgggcctcgatgcccggcgcggtgctgcgctcgttgctgcccaccgccgtgaccctggtgctggcgtggggcctgtatcgcggacgtcggttcgcggccatctgcaccgtggccatcaacctgttcacggtggccatcgccgtcgcctactatctggtcgtgccgctgagcttcgcgccggacggcatggcctccctgctgcagcacggcgcgatcgtggcctgcgtggcgaacgtcctgcccccgctgctgttcgccatcgccctgctggcggcgatgaaacacttcccgatccgcatcggctggtgcaggctggtcggcggcatcggcgccatcgtgctggcctggctggcgtgcgccgccatatacctgatatacggcatcgcccaacccgccaccttctcgccacgcgctacggcctcgtcgctgctggccgagctgccgggacgcttcctgcccatcggcttcctgagccatatgaagctgtcgttcgtgccgcgcactccgatggcctcgatcgtgtaccaaggcgtcggcctggtgttctggatcgtggtgctggccgtggtgatccactggatgggcgacgtgagcgaatcgaacgagcgagcccgggcgcgcgccgaacgtctggtcgaaaccggcggcgaatcgatgagcttcatgaccacgtgggaaggcaacagctactggctgtcccccacgggcagatcggccgtggcgtatcgcgtgctcaacggcatcgccctgacctgcaccggaccgttcggcgatccggcggaatggatggacgatctgaacggtttctcccagcactgtgcggaacgttcgctgtcgccggtgttctacggcgtgcatcgggaacagcgcgacgcgttgctggaagccggctggaactccatcgaggtcggcagcgaaatggtggtcgacccgcgcggctggaagacgaccggcaagaaatggcaggacgtgcgcaccgccatcaacaaggccaagcgcgacggcgtgaccgacgtgcagtccacattcctggaagcgtcgctcgatgtgcgcgaacagatcgaggacatctccgaggagtgggcgcagctcaaggcgctgccggaaatgaagttcacgctcggcggcgtcgaggaactgcgcgacccgcgcgtgcggctgctttacgccatcgacgcggacgggcgcgtgctgggcgtcaccagctggttgcccacctggcgcgacgggcgcatcgtcggctggacgttggatttcatgcgccatcgcaccgacagccccaacggcatcatggagttcctgatcgcgcgcatggccgagcggctgcgtgacgagggcgaagccgatcccacgcacgccgtggagttcatgagcctgtccgcggcgcccctggccggcatgaatcccgatcgggacaacgccggggaggacggggcaccggccagcgaaggcacgcaggtgctccaacacgcgctgcagatcgtggccgactggatggaacccgcctacggcttccactcgctgttcaacttcaagcgcaagttccagcccaccgaagcgccggtctacgtgtgctacccggacccggcggcgttgccgcagatcgggctcgcggtggtgcgcgcctacgtgcccagcgtgacgcccgccgaagtggccggcatgctcagcacgctgcggtcgtgaaggtgtgcacacgggtacgcaggttagccgattcgagcctgagacggggtatctgctttcagagaggtacatttggccccttgcggacaactaactgccttcaaagaggtgcctgaactctgaaatctcgagtatgagcgttgcaatgacaacgtttgtactcggggtttcccgtattcggtgcctctttgaacgaagatagcattctgcagaagcccgaatgtacctctttgaacggagaaagcctgacaaggagggcgcggcaagcgctatctccgtttcgaggggctgatttggtctctcccggaggtctactcccgtttcgaggggctgatgccgaagtattcacgctccaaaatcggcggaatggcgttggcgcggatgggtttttacatgcggtctagcggccgaccagccccttgaaacgggagtagacctccggcgggggtcaaatcagcccctcgaaagcggttttgccggtgcagaggtgtcgttgactgcatcgcgagccgtctcgacgtagtaacgtggggcgtatgagcgaacgtaacgaacacaatgacggaaatacgcaaaccgcatacttcgccggcggctgcttctggggtctggagcgctacttccagaacgtcgacggcgtcacggacaccacggtcggctacgcgcaatccaccgtcgaatcgccgacctacgagcaggtatgcgcgggcggcaccgatgcggccgaaaccgtgaaagtcgagtttgacccggcacaggtcagcctgcggacgctgacattgctgttcctggaggtcatcgacccgttctccgtggaccagcagggcgaggaccgcggccggcagtaccgcaccggcatgttctacacggacgagacgcagcgcgccgtgtatgtggcggctctggagcagctggtcgaccgccagccgcagcgcccggccgtactggtcgaaccgctgcgcaacttctacccggccgaggcacaccatcaggactatctggtgaacaaccccggcggctactgccatgtaccgatcgccgcaattgcgaacgtgaaacgccgtcagaagtacgtggaacgcatctgggatctgacgctcgaacagttcgccgtcacgcagaacgccgccaccgagcgcccgttcgtcaacgagtacgacgagaaattcgagcccggcatctacgtggacatcgtcagcggcgagccgctgttctcgtcgcaagacaagttcgattccggctgcggctggcccgcgttctcccgcccgattgccggtgacttgctgaccgagcatgaggaccaccgcattccgggccgcgaccgcatcgaagtgcgcacgtcggacacacagattcacttgggccacgtgttcaccgacggcccggccgaccgcggcggcctgcgctactgcatgaattccgccgccctgcgcttcgtgccgcgctcgcgcatggccgaggaaggctacggcgactggattgcggttgtggatggggacgatcaggcatgagcatggagaatatcgcgggcgctcgcaagcccgccaagcgtgaggatgagcacacggtcgccggcgagcatcgcatgatgcgccgtgcggaccgcgaggtgaccgatcccgagcggatcgccgcgatcatcgccgcctgcgacatcgttgaagtggcctatgcggatgccgagggcctgactatcgtgccgctgaatttcggctttgattacgacgaggcgactggcaagctgacgctctggttccactccgcgccgcgcggccgcaagctcgacgcgattcgcgccgccgccggtggccgactgcccgtggctttcaccatgcagaccgactgcgaggtggtggcgggccgcaccacgtgcaattggggtgaggcgttcaagtcgatcgtcggcaatggcacggcgtcactggtcgaggatctggatgaatgccgccacggcttgcagacgctgatggcgcagcaggcgcatatgccgaatgtggaattcactgatgcgcaggtccgcagcgtcacggtgtggaagattgagtccgactacttcaccaccaaagtccgcaccaaacccgtgcccgcacacatgcatcagcgttagccggggatagcgcgccacctccccactggcgggaggcagcgcgcagcgccggtggatggcccacgtccggacccgatagacttgccgccatggcagcagtgacagtggtaattaccagctacaatcagggcccgttgattcacgaggcagtcgagtcgtcattggccccagacggttcgtccggaacggatcatcatcgtgaacgatgggtccgatgaccacgcatccgtcgagatgctgaacgccactctcgacgattgccggcacggggcgatggatgcgaatggtgtggccatcgacctcatcggccaggcaaacgccggtccttccgccgcgcgcaaccgtggcatcgccgccgccgaaacgccgttcgtagtggtgttggatggcgatgaccgtttgcggccggccttcattgagcgcacgttgtcgatgttgtccgccgacaaaacgatggtcgccgcattcggctggctgcagactttcggtgtcctggaatcagtggtccagccgactggtggcaatgccgccgcgttcgtgtcgcataattgctgcccggccacgtgcatgattcgccgtgtcgcgtgggagtgctgcggcggctacgacgagtcgatgcgcggcggcttcgaggactgggacttcttcctgtcgttgttggagtgcggattgacggtggaaaacgatatctgcggtgctggggttactggcggtactgagcatgtcggaggttttgggagtgcctgggatacagagaatcccgcaaaagacgcggcccatatcggcatcgcccccgagccgctgatcgagtaccgcacggccccggcctcctcaaacgtgaccagcatgaccaagcgcctcgatctcatgcgcttcctgatcgccaagcaccgcgatctctacgccgcgcacatcgccgacgccatcctcggcgttgaagccatctccatgagccgcttaaccatgtgggaatcgttgatgtgcggtgacacctccgccagccaagccttcatgacccaccccacctatggcgacggtggaatggccgccgccgtccgattgcggagctgatggtcagccgggccagctcaaatcggtgtccccactgtcgtcaacctgccaggttttggccggcaaacgccgctgagagccttttggcggcgtcaagttgccagcgcttggcccattagcgtcgttgccgtggttgcttgcggtggtctacgaaaggacgcggtccgtggacactgcagatagtcaggaacatgtgagcggtagtcatcacgtgctgaatattcctggtacgctcttttttggaccatccgctgacagagagtattcattgaaggaatgaggatgacgtgagcgttataccgattattgacctgttcgcaggccccggagggcttggcgagggtttttcgtcgctcaaggatccggccggtaatccaattttccagatttgtatgtcggtggaaatggaaaagaacgcacatgacactttacggttgcgctcgttcgtacgtaaaatcatgaagtctgatgggcagttgccgaaaagctacctgaactatcttgataatccatcagcttacaatttccaagccatgcagctggaatatccggataagtgggctgcggctgatgaagaagctgttcaaggtactttggtggaaggtgatgacacctttgtgaatatggccaaggacaagttgaaggctcgttgcggtgataactacaatggcccacttgtacttatcggcggaccaccttgtcaagcatattctcttgtgggacgtgcacggagaacgcggaacaaagaggccttggataatgatgttaagcagacgctttacaagtgttacctccgattcatcgaggaactacatcctacaatcttcgttatggagaatgtgaaaggtatcctttctgctcagcaccgtcatcagggcgtatttgcacatatcgaacaagatatgcaggatgccggttacacgttgcactctctagtggttgatgagcctgagacccccaaggatttcatcgtaagggctgaatgttatggcattcctcaggctcgtcatcgcgtaattcttcttggtgttcgtaatgatgaggaacgtggcaagccccgtaccttgcagaagaggcagggcgtatcggtttctgatgcgttggccggtattcctaaggtacggagtggattcacttctaaggggaaacctgattgcgattgggatgaatatgtacgtcgtgctgcaaaagcaattctcgccactgatgagggccgtgatctatcggacgtattgcaaccagtactaagtggagccctccctccttcgcaggatgcgagtcgtgtagaaaagggcgtcattaatgtttaccgtggctggtaccgcggacatctcaagcatcgtacggtattggtgaaccatcatgcccgcaaccatatggcggctgatctagagcgttatctattctgttcagcgtttgccgcgaaacataataagccggctaaactgtatgattttcccaaatcgctgttgccggatcacgataatgcaaaaggcgtcgctaagggggaaaaagttatctttgctgatcgtttccgcgtgcagatgccggatcgatgctcgacgacaattacttcgcatatttgcaaagatggtcattactttatccatccagattgcacgcaatgccgcagtctgactgtgcgtgaagttgcccgtttgcagacattcccggacgattactactttatggggaacagaactgcgcaatatcaacaggttggtaatgccgtgccccctcttttggcacagcaaatcgccaaagtggtggctgaatatcttgatcgcgacgcaagaggatatttcgactaatacgtacctggtcgtggtgcgaattggctagcggggaatcctttgtcgatcatcttttgccgccatgtccagagatatcgggtctgctcttcagttaatcgaatatgtttgtcaatttttgcgatgtcagccagtgcctcattggttaaaatatgtcgatatcgagcccattcgaggattgtgcgccaagtgtcggcggtgatcgcagcgaggaagtctctttgataatcgatcatgtgatcaaaactcgtcgggaaactgtgtgtgggttctgatttcggcagaggagaatcccctattgcctccttggccgctgttggcttttcgcttggcggattgtattggaatccgcattcggtggcccgcgatagaagataattcagagcgttggtgttgatgccagctgatatgtcatcaatgagcgccactagtgaagtttctgatttaggactgagtatgccttgctctttagcgaaagtgtgtagctcacgaaggaatccagctggtgctgttgtccaatcatctatgcgtgcatcttctgtttgctctgatgctttgtgccgcggtacggatgaggacaccggagcagaagcagaaatgggattttcggttttcacgatggtttgttgggcttcgacgagcgcactttcttccgtgtctgggacagcatccgtctcagacactgttgaggtcaaggactgcaccgcatagagacaagacggttgtcgccgcagtgcatcccagcaggcttcttttttcgcccactcgccgatattttgggtggaacgattcgagtcgttcaaaacattactagcctgttcagcggccttcataaggcgtccgagggcggtatcgttgatgcgctgtgcgcgccaaatcgtctcaaaatcgaaatcagcgtggaaccgtttcagatcgagtgcatattttgcgacggcatattccgcgatattgccttggtaggcccccttataccaatccgccatcttgatgtgcttgtacacggtgtcgaagagaatccgcttgcacaccagctgtttgaagaactcggcgtcgagcgctttcacgctttcttgccctttctttgattcattttcgacgaatcgagcgaaacatttctgtgatccaaggctggcgatgtggggatacccgtcccaacacatgagatattttggtgcatcaatcatcttgatacgctgcttggaaggattgagcttttcgaattgcttgcgatcagcagtgtccctacggtttcgttcactatcatactgaccgcgggtgcgctcgtaataccaatgcgtcgggtttttgccgggtaacggaggcgtgagaacttgctgagagagctgggatagtttgacctggtactcgctgttagatgagaaatcggtctcggcgaccttgttttgactgttggtgtatcgggaaatgtacgggacaagttctcgggcaatatcctcacgtaccacaacgagcttgaccgggactacgactgcggacaagtcgagattgtctttcttttggctgtaaaaaatagatgccgtagtctggccgccgttgacaatctgcaagtcatggattgccgtaatgtttcctcgttcgttcatatcgactcgactggcggtcgcagataagccgttgttataagcgacaaatcgatcaggttctgtgcttaatgtgttgcggataccgcggttgacctttccacgcaaggacaagaacgaacggacgttggcctccataagtttggagccatgttttttgtaccagctggaaagcgtttggccggacaagaacataagataggtgtccatattgttaccagcctcgggtgccttgacggctggaatgccttcggccccgaggcttactgtgaggtgttcgagcggggccgcagcttgtgatgcttccatgaggtggcgcaaatcccatacatgggcttcgaggctgaccttatgctcatcctcacctttggagtaaaagtcagtggggtccttgatgctggagtcgcgcccggtgtattcccggtcggtaataaaataaagacggaatcgagagatgcccctcttgtgctcgtgaatgaatgaggcgaattcccaggctgcgctgctctcctctgcctgttcaaggaaggaaccatcaaaggcggctttgatgtaacgacgcatggctttgatgtatcgcatgcaatctttggcttgaatggtatttacctgttcgtctccaacacggttggaatagtcatcacatgcaatgacgacgatggattcgtccatatcgaatgcagattgatcgtatccatctaccgccatgaatcggttcgtaccctcaccaaatcgatatcccggttcaatgggctggtagtcagcgatggcctcgctgtcgcgtaacatttcacagacgacttggaagaatgcctcttggtcgagaagcccttcgtctatggccatctcttggactcttgtgacgagttcgcgtctgtagtctgctagctccatcacttctccaatgcgctaggtgccttgccgtttgtgattgcgaatggctcgatcgattcctgttcaactgtgtatgtcaggttagttactccgttaggcaacatcgatggggtgactcgcgggaacctgtctttgacgtcgtagaccctaactgggccaacttcaaacatcgtatgcatggctatgtctgaacgtatatcaagccccagcgcattgagcccattgtcgatgcactgaccgatcaagtaagggtcgtctgccaactgccgaagtcgttctataatccggggtaatgagattagctgcttatcatcgttgttagtaggtgtgtctagaacgatggtgatcaaactgatctgtttgtcggcgatgttgagctgttcgggagaagaaatagtgattcggcgtgcggaactgtgtactgtcttgatctcccaatatcggtgttcagcatcgaacgaataatcctgaggtgctccataggggccggtccatgcttgcatcacggtctccaatggtctgcctgacagcctcatgactttctccgcggcaagaagttcaccgcacacaccacgtaaaatagcttgacggttcgtgtgtgtgatgcttttcaagagtcgatgccactggtctacagttgagtaaatctcacgtagtgcagagtttcttgaagatgcagtgcggatacgatctgcaaaagcgagacagatttcggcgaatgcgtgtagtaggctccaatcccgtaggatgaacgttagcgaccagttttcgccaatcggtgacgtgcgtgagcccacctgcacatcgatggcttctaatccgtttattggccaaggccgcttttgggataaaatcatgatgtagggacgggcatctggtgtacatccaatgatcaacggtacttgtagcgtcagatccaactcccggttctcgcggccgggccgctcggccatgcggcgccaaagctcttcgactgaagccgcattctggtagttggtcattgctcgtcattctcctcttcttgcctctcaagactttcgtatgtcaggcgagtggcgacagtgttgctatagtaggttacgcttgtccttcgctttcccctatcaatgtagtcgacagttggaatgataatttttgctcccagtaggccatgtccttcggatgggatgtatttctcagcttgtgaatcgggatgtcttgttttcacatggacacgatagagcataagcacagggtcgtcgccgaaatactttgtcaaatagtattccctttccgacttgttccccggatagacattctttggatggagtatatcggcgaccttgcgatagtccgtggagccggcaagacggagcttgtcgccgctgatcttccagtacatatggtcatcatcgtagaaatcgctggtgcggactacctccttccaggtaaaagggacgttcccggaaacgatggcgccttcgccgttgatgaacgcaatagtccaagtggtgccggggatgttactttgccgtgttctggcgaactgagccatcatggtggtgttagattccaatggctctcgattcttgtagcgcatcagtgttgggccaaagtatgtgtcgttgtagcccgcgcggtaagccgatagaaaatcgattatggtcttgctgggcacgttctggaaaatctttgtcgtgccttgttcgggacgacttgcagtgatgtgttcattggatatgcagtctgtgatcagaatatcgagtgccttgttattggtctcgttacgttccgggtcaacgtcaagcctaactgattcgatgatctggtttgccagatcgaatgtctcgagcgggccgttggtcttagtagcgtttcgcatcttattggcactggtgatacgcactccgcgacttggattgccttggatggaaataccgagttgctgtggtgtcattccgtactcggacattttgttggctgtatctttgatatcttcgacaatggagcatgcgtagcggaaatcgtcgatggaccgccttagcagccagattcgttgcagagcgtcgtagccaggacggtatccaaaccatcgtcccatctgcaggagtgtgtccgcagatgtcacattgcggtaaaagacgctgcagacaagcccgtccaaggtcatgccgcgagaaatttgatttcctcccacatagatggtgcattcattgggtgtgagtttgcttggaaccgagcgagcgagattccagtccttggcgtcggagttgacgagcctaaccagtagtcgtccgcttccggccagagattgcattcgtcgacagagtatgttccatgttatgccgtgtgtggatgcatatcctgcatattcggacttatacgcgcgacggagcgcaataatacgttcgtcggcttcattttggagatgatattgcagcacattggtcatattgtccaagtaatcattgaccatgtcggctatttgctgctgaacagcagtgaaccgcgacaagtgaagtagcattgattgacgtttgcgttcgctgtttgctctgagtgcgcaggcgatgaggaagcagtccacagcatattcaatttgtggatccagcttattcgtagtgaatttatactccttcttatgcgtcagtggcagccatttatcaagatctctttttctgccccactccaattcgtggatacagctgctgtctgttgctggcgtgtcaagatctccaaacagcttcttggctccgatgtaggctgccggcgttggtagaatatggatgaaatctttggggaataagtcatcttctaactcatcgtcgatgaacacgttggcgaatggcgtggcagttactgccacgtacgaggtccgtttgctgatcctacagagtttgcatatcaacgagttgattcttgtaggcgagtcttcggctttggcggagttgactgatgcatagtcgctctcatcgtcgatgacgagtacaggtaggtctttgggaaattcagggttgtcgagccatttgttgaatttatccagaacttggccattcttcttcattactgcgacgagaggagctcggtcccacgtaggacgtggatgggtcttgaatgcgctactttgagccttgataaagtcgtcgtcgttggtcaacggcgtcaccgtcactgcctctttcccgagatattcgccgattccggtgacctttcgcgcgaagtcgaatccgatgaagtcggagttgattcgcttctgcgtctgtccccggagactctcgtcagaactggtgagcacgacgatcagtttgtacccgcagtccacggccttgttcatcaatgccatgtacgtgcgggtcttgccggattgcacatcgccaagtacaagacctttgcgttggactggtggatgatctctgcgggggtctgcaagcaggccgaggattcgttctgtggacctgcctaaggtttggagctggatatagtccgccccttgtttcttctggagatattgatagtaggcgagccatcgggggaaggaaagttcggatgctttcatctcgggaagccactcttcccaaactgtcttttcgttatcagtgagagttgtcccttcaggaactttatcaagaagctggctacgcaattcgcggaatgcctgttcgaactctttgccgttcgaactgagcctctgcatctttgcggcttgtttcagcatctggacgatatcgccttcatcgggtgtcttctctacgctagcgtagaatatcgttaccatttgtttggcgctggaccagctaccgggcatgagatacctccttaaggatcgactctccgttatggcatagtgagataggttcgacgtttctgaatctgctgacgaattgttgtggggataacccgccaatgctgttcaaaagccacatctgctctgcaaaaactcttgcctgctcatccgtgacactaaaagattctggacgtttgtccattgcaaatcttgattgcatatcctcataggggatcgtcattgacagcacattaactatgttaataaatgcaccttgctgttctggggacagagaatccagaaacgacgcgatatatgggttgttccggttgatttcgtagcggaatgcgccatcgcggtcatctacgacatcccacacaggagctaaggggtcatcgttcttcctgcgacctcggaattgttgggctctgcgacttggttttgccaaacgatctacatatcgtttcatgacgtcactgatgattttcggtggcgtggcccgtgactttttgatgtcaagagtccactcagcatctaagctatttggaatatccacttgcacgcgactcagcttagtggcctgttttttgggaagcatacggaaccagctaccccaagtgattagtcggtaagcgcggtatacataaaaaccttgagtgtcggtcagtgttttgcctcgttgctcgctgagatccaaaagctttttgtcttcgtcacgcagacggttttgatacggcaatgtatagccgcgcagcgtggctcctaaattgccgatgcgctgcactccggtggtttgtactgccggattatcgcgaaggaatgggtctcgttgcggaatcggatatccgttaatgtcgatgacgatctgtcggatatcatcgtcgggataggggtgcgtaaaccggtgaaataccaatgcaaggtatccggtgagttcatccatagccttgtcgatctctctgagagatctgcccgtaagagtctcaagcttgtcgagattgcgccacaggatacaagtaccgtgtgagacaggcatggcgtcgtggactctttggggcaacgccgacagagtctctttctcgttcaattgttccaacgtccattcgcctgcgcgtgctacagcgtccaaatcccagcgcagtgtggtacgtgctccgtcctgaagcgttgtcatgagtaaagatcgcgcttgagagagggaagcggttttcaggccaagcccaaaccggcccagatcattcgatgcacggttctcattcaggctattgccggcaagctgcatagcttcgaatgcggtttgatcatccatgccatcgccgtcatccacaatagcaatgtatggttcctcgccctgcccgaagtacagaatactgattttagtggcattcgcagctatcgaattatcgatgatatcggctatcgcagtattcaagtcatacccaacagaacgcatggactccagcaggttgggatttggcgcacatgttcgttctctcacagtgatacctcgatgtgcttaaagttgcttgcaaaatctaatgtaacggacgttaagaacggttttcggataatcaattaagattggcggctagtataagcatctttctaattactgtactcaatacgcaagctggggtctgtctcgtatgtgtcaataatcttgttgtaagaggtgaccaaatcagtgagcattgttttgcgttcatcttggctaaaatgaccatgctcatggacattggttgacaggaatgactgaatatcccagacctccaatcgttcagcgaagcccatatccgctgccaaatcccaagcagttttcactcggtctttcaccgtgataatgattggatgaaggccattcttgatattgcgctggcatttctccataagcaacgtggctggagcggtagtgcagtgtatggcggtatctccgatattgaagtcgccgcctcgcccggtggggtcatctgctactgaagctccgttgatttccacttccggcatgataatagacagctttgctgccacgagctgctgcagcaccgtgccctcgtacatggtaccgggattctctttttgccgcttcttggcctgctctaacagattgcctactgctgcggtgattgagagtgactcatcggcctctagcctgaatggcttgctattgaagaacttgcgtatacgatcaatccaaaaacgctctatctcgctgaaatctttgctggacggccgctcttcattaatgagcgctgcataatctttcattatgcccataaggccgcggctagttcgaccaccttcggacgcgagcaccctcttgatgtggtactcctctaaaatgctttggcagttcgcaccactcagtcctttgacctgtccttctttacccgtgagataatcatcgggattgattggcaatgtatctttcgagaaggcgcggttgagctgcagtatgccggctaggttgcctttggtgttaatgccgtggctctttcgaaactcctcgatggcgtcaatacccatgctcgctctccttcgacgactatcaagctgaccgtagctcgtgttgctgctttgccttgtccaatgtaccgcgaagtgctggcatgaagtagtgctcgccaagccattcgactacaggtactgccactgcgtcaccgaagccgaacaaggcttggttggtgcgcagaccattaaggttgtaatgagatgcgcccataagtgccgcgtactcctttggagtcatccagcgcactgccgtcgaccccttgccgagtcgtaccacggcttgtcttgaagaacccccgcgagctgttcgtagacatcccgaaatgtcatccgctcggacttcccacgtgggtttcccgttccgagtgcgcctgtatgccgttcgataagagatgaacggattgtccttcagcttcatcactctctctgattgcacagcggacagtgagtcaagaaatgccgttagcttgcccttaggccaccatcgggaatcatcgtctgacatctcttcggcgtacatgccaaagcccgccataagtggttccggcggttccggcagaactgccctgtgcatacgcagggaggtatcggcaaacacctgttgcaaccaatctggccgtagtggggaattggcttgcgagccctcaggaggattggttaggccgaccaagaacagtctggggcgggactggggcacaaaacgccgagcgtcgattgacagcgcgtcaactgaatatcccagttggttgaatgcgcttactgctgctgctatatcctcgcctgagtgagacgtagcaagacctgcgacattctcaagtacggctacaggtggcctattgttgcccatctcttccaggaggcggatatactgccagaaagcgctggactgtttgccgttcaaccctgtacgggttccagccagagatatatcggtacaaggggaggagccccaagcaatggagatattgtgaggcaagtcagagccatgtagctcacccatgtccccctcgatcagggtatgttcctgctcattgttgccgaactggttcctatacatctggcatttggcgtgatctatatcgttcgaccacgccacgtggaagccagcctcttcgaggcctaggcgggcaagccctatgccggcaaagaactcaagcgcttgtggtgcggttgagccgatacgggtagccccgctggatgcaccagtcatgccctgttcctttccgatttctgacattcactggtactagtgtacgtgctgcttgctatgaaatcgtatgcgtattcgctgtggcgcgctcctcctatgacatctaccagcattttttggcggcgaaacacgcatttgattacgcaatcgcgtggattgaagatgtcgggaaaggcgctctcgactattgtggtagccaagagaagcgatccgtttccgaggtgagattcgggaacggtccgactctcggcagtgatttatctacgcagacaagccaaaggagcctcgccatgatcctcgtcaccaccaccccgtccgtcgacggatacaccatcaccaattaccagggcatcgtcttcggcgaagtggtgtccggtgtgaacatgttcaaggatcttggtgcgggcctgcgcaacatgttcggcggccgcagccagggctatgaggaagagctgatgcgcgcccgtaacgaggccatcgccgaaatgcaacaacgcgcggaggcgatgggtgcgcacgccgtggtcggcgtggacatcgactacgaggtgctcggcgccgacaacggtatgctgatggtcaccgcgtccggcaccgccgtgcagatcgcgcgtacggcctgagcctgccgagcttgggcccgagctcgtccaccgagccgggctttgtcggttatcgtgacgcattacactgacgctcatgaccatacgaatcgaagcatacgaccggttgcccgacgcggcccgcgccatccgcgagcaggtgttcatccgcgaacgcgactggcggtcggaattcgatgaatgggatgccgcgtccgtgcatctgctggcgttcgattcggataatgatgcgcccaatcgccccggctcgtccgcgcaattggcctcacgcagccagcccattcagcccagccagaatcaccccgtggcgacttgccggttctatgcggaccccgaccatcccgaccaacccgggcgatacatcatcgcgcgcctggcggtactgcccgaggcacaaggccggcatatcggctcgcggctgctggccgacgccgaacgccgcatcgcgcaagccggcggaaccatggccgccgtgcactcggaaaacgaccactacaagttctatgagcagtgcggctaccggctcaccgatgaagtctatgaaggcggccgtcacggctggctgatcaaggacttgattcttggctccgagaattaagggccgctgtctgtcccgcgccgtgttcaaatcgctgcaatacagcgagttcgaagcatcctgtatgaattgctggacgactacagcgcgcagacaatcagataaatcgccacgacgtggcaggcgtacccgatgaccgtgcccaagtgaaacacctcgtggaactcgaaccagccgagaacggggttcggcttgcgcagcgcaaaacacacggcgccggcgatgtacgcggcgcctccgcatgcgatgagtatggtcgcagccggacccactgcgggagccgtccatagctgcggaataagcgtcaccggcgccaatcccagcacaacatacacagtggtgaacacccagttcggggtgcgcagccagacgatatgcagtatcgtgccgatcgccgcggtcgtccagattaccgtgagatatggccggcgaatcgccgggctgagcgcgaacagcacgggtgtgttggtgccggcgatgatgaggaagatgttcgaataatcgatgccgcacagcacgcgagtcaccttcgcgctgcgccatggcacgacgtgcagcagcgcgctgttgccgaacagcagcatggccgaggcaccgtacactgcgcaggccgccttgacgggaccggccggcgcgatacaaatgagcacgatggacgccgcgatgcacagcggcagggtggcgaggtgcagccatccgcgaaggcggggcttgcgtatgccgaatgcgtccacggggacgatctggcgcttgatcgccttcagtgcggccttggcttggcggtagcgcgattgcgcggccctgtatcgggccgatgcacggtccagtgcggtggggttggcgtttgcgctggatttttgactcgcggttgcggaaggcgcaactgttgcggcggaagccatggttcgtccagatggcgtgctgatggaaacgctcatactgatcacctcgctatggccggcgacgctctcccgaccactaacctacgctaccgtaacctagtataggcccgcgcaataatcaaggttgatttcgtaatgcttacagttcttccgtggtgcggtattcggtggtgcggttgcggaatacatcgccgagtctgtgaactcgtattatgcgtgtctgctgggtccgacttgtgtcggttcctgatttcggattgctgcgaatgatgctcccgacgccgccccgccagttgccggattcgtacggctcggccgttcggccgagctggtcgtcggtgactccagatacttcgttggtttcgtctcggttcatgatgttatgtaatgctagtttatggcggatggaaagttgaggaaagttaaatctgcttcatgggcttctctctgatctgtatttgtcccggttcatatgtcaatcgtttgacctgtcgaccggggcagaatccgctgtcccggtcggcgatttcggcttgttttcgtgaaccgggacactccggtttcctcaactcatatcgtctggcagacggaatcggcggaataaggccgattctggaattggcacgttgtcccggttttcgcataaatcgattgacatttataccggggcaacaaaaattgtcccggtttgcaaagatcgcccgaaatcgcgaaccgggacagcggattctggcctggcttgaacgtcaaacgattgatgcaggtaccgggacattttccgccacgaaagttgggccataagccttaagtcttaaagcccccctgaaaaacggcgcttgcccggataaagcaaaagagccggaaccttccgattccagccctttagttgctggtgcgagtggggggagttgaacccccacgagcatacactcactgccacctgaagacagcgcgtctaccattccgccacactcgcagacaatcgactaacttacacccggctgggtaatcatgcaatcttcggcgtgtcgcatgggaggcagggatatatcgcttgtgggtctcctgcgggcgccgtgatctttgagggtggcggcactcccctcagtcacttcgtgacagctcgtccgcaattaaggacgggccttgcctgcaacctgctggttcgactatcgtctcaccttcgactacaaacagcccactgggctgtttgcttaacgtctcagcctcagcgaggggagcagagagaagttcagcacaagccgcaacgaaggagaaaaactcacaaccctggccggcgctcgccgttgccgtagaagtgggccagcgcttcgtcgcggaactcatcaaagtatccgccgtcgatcgaggcgcggatgtcgtctagcagcttcacgaagaaatgctcgttatggatcgtggccaacgtaaacccgttgaactcgcgggcgcgcagcaggtggtcgacgtacgcgcgcgaataatgctggcatgtgtagcagtcgcatccctcctccagcggcccgaaatcgaacttatgctgggcgcgcttgatgttgtaccggccggcgcgcgtgtagatcgcgccgttgcgggcgcagcgcgcgggggccacgcagtcgaaggtgtcgccgccgttctccacgcacgcgaagatatcgtccacggaggcgatgcccagcacatggcgcgggcggttctccggcatcgcgtcgcagatccacgcgcaggtgtctccaatgatgcgcttctcgattgcgccgccgattcccacgccgtcgaagtccagcgaggcgatctgcgaggccgcgcgccggcgtagatcctcgtaattcgcgccctgcaccacgccatacagcgcctgatagggcttgcccagccgctcagccgtcagccgctggtgctcgtccacgcatcggcgggcccagcggaaggtgcgctccaccgagtcctcctggtaggagcgggtgttcatcagcgtggtgagttcgtcgaacgcgaacatgatgtctgcgccgattttgtgctggatgcccatcgaaatctcagcggagaaacgatgtgcgtcaccattcaaaggcgacttgaacgtcacgccgtcctcatccacccaggccatgcgctccttgcccttggcgatgatgtcgtccgacttcatgccggtcacgtccattgccagcgtcttcttgaagccgacgcccagcgacatcacttggaaaccgccagaatcggtgaacgtgggcccatcccagttcatgaaacgcgccaagccgccggccgcgtccagcacgtcctcgcccgggcgctcgaacaggtggaaggcgttggccagcaggcactgtgcgcctagatccttcatctgctcgggcaacacggccttcatcgcggcttgcgtgcccaccggcacgaaggcaggcgtgcgaatatcgccgtggggcgtgtgaatgatgccggtgcggccgtatcgggcaccgtctcgcccaagcccgctggccgtggatggcaggcgggtgatcgtttcgaaatggaaggcgctgcggtcgccgggctgtccgggctgtgcgcccaacggatgttcaagaaggctgatcgtcatatgttcactttaggcagaagggccagaaaagggccggaaattgtgaagaactcggtttcgaggggcggatttcgccgctcccgaacgtctacttccgcttcaaggggctcccggtcaagtaggccggctgcaaaaatggcggaatggcgttaaatgagggcccttgatactcggaattgaccgcgcgaacagccccttgaagtgcaagtagatgttcccgaaacaggaaatcagcccctcgaagccgagatgcccataagactctgcgatgattacgcatagactttcaatcaacgttcagaaaacctccagattgactgcctttactactgaggtagcacacgagaagtggcaatgggcaagtgcccgaatagccgccgaacagacgtgataggaatttaggaaaaggagcagcaatggctgacgaatttaacccgcagggcgtcgaccagaccccgcggaataacgaaaaccccaatagtactgccgataccggcaacgccgagccgaagaacccgtttgtgggtggcgactcggttgatgccggcaacgccagcgattccagcgagcagcaagccccggtttcctcggccgccctcgctgccgatcagcagcctacgcaagccgctaccgacactgccgccaccgagcccatcccggactacgcctccgccaagggcgagagcacggtggtctcctcctcgccggcttctccggcagcaccggccgcaggccagacctcggccacaactccgctgtatcgtccggccccggaatatggcgcttatggtccgaccccgactcaggcacagggccagcagggcggccaggccggcagcaatgcccagcccacgcagcaattcccgttcggtcagcctgcacagcaaaccccacagggccagcagggcaaccgcaatccctactacaccaataacccgcagccgcagggcaacggcaatccgttcaatccgcccacgcagccgcagcagaacaacggcaacccgtttgccagccagtccggtcagaatggccggaatggccagcagccccagcagggcggtctgttcggtttcggcactcccggtaccggtacgccgaacggtcaaggcccggcccagccgggacagcccggtcagcccggccccgccaagcagggcatgtccaagacggcgagcaacatcctcatcgccgtggtcgccgccgttctggctgcggccctctgcctgggcctcggttacggcgccctcaccagcggcctgatcaccttgccgaccagcaattcgctgtccaacgtcagctcgaataagtccggctccgggtccgccaccgccaagagcggcgaagcccccgactggcagactgtcgccagcgatgtctccggctccgtggtctccatccagaccgcgttgagcaacggcaccgccaagggctccggcgccatcatcgacaccgaaggccacatcatcaccaacaaccacgtgatctccggtgcccagcagattcaggtgacgcttgccaacggcaacatgtattccgccacgctcgtcggcaccgacaccaccaccgatcttgcggtcatcaagctcgacaacccgccgagcgacctcaaggccgtgaaattcgccgattccgacaagctcgccgtcggcgagaacgtgatggccatcggcaacccgctcggctacgacgacaccgccaccaccggcatcgtctccgccctgaaccgcccggtgaccgtgaccgacgataacaacaacgagatcgtcaccaacgccgtccagatcgacgcggccatcaaccccggcaactccggcggcccgaccttcaacgcggccggccaggtgatcggcatcaactcgtccatcgcctcgaccgccacctcatccgactccgcgggttcgatcggcatcggcttcgccatcccgtccaacctcgtcaagcgtgtggccgacgaaatcatcaaggacggcaaggtcaagcacgttgccctcggcgtggtcatcaagtccgacacggttgaagccgacggcgtgacccgcggcggcgcgaccatcaccaagtccagcgccaccggcagcgcggtcgtctccggcggcccggccgacaaggccggcctcaaggagggcgacaccatcgtggctttcaacggcaacgcggtgaacaacaactactcgctgcttggttacgttcgtgccgcggctttgggagacaaggtgacgctgaccatcgtgcgcgacggcaagaccatggatgtggacgtgacgctcgatcaggaggagtcgtcggtgaacggttcgtccagctccgattccaacggtaacagccagaataagcagaacaaccagaacggaaacggccggaatggttacggcaatggcaacggcaacaacgatggcggcaccggtgatggcggcggcttctccgacccattcggcctgtggtaaagccgactcgacaacgtcacacggcgttgagcggtaaccgttgaacaccgtgtcagacaagcaaaggcccgtggcagtgagcaaactcctgccacgggcttttcgtatgcgctattgtgccctgcgcccatgccgccaacgtagtttcgatatccggcatgtcgcgcagcgctcgctgatagggtaggccaagcactgagttcgggcgacgttccgaacacagcgcatatttcaatacaaaactgaatacatttctttacgccgtgtatcggaaggtcgcgcgggagccgagcaaagcgaagccccaggcaaagccgccggtgggttaacaaggcgtgaccgcagcgccgattgcgcgggccacgcttgccgtaccgcaatcgactccgtatacaagcgtaaggagcaatgatgagcagactcatcagattcttcaccaaaattctcgacatctgcaagcttgtgccgatgcttccggtcgtcgtcatcgccgcagttccgctggctttactaggcgattggcgtccgtggggcaatgcgatggcgattccggtacttggcaatccgggcttcggccagtggctggttatcgcactggtgctgattatcgtgattgacactgtgcgcggcatgattgacgatttgcgccacgggcaggtcggagtcgatgtgctggccgtggtcgcgatcctctccaccgtggccgtcgccgaatactgggcaagttgggcggtgacgctgatgatcacgtccggcgaggccattgaggaatacgctcaagccaaggccgagcgcagtctgaccgcgcttatggaagccgcgccgcagaccgcgcacgtcgtcaacctgcctggtgtggggcgtgggtttgctgccgataaaggcgattcgtccgatggcttccggcgtgtgggcttggcgtcgactgccgccgccgcgcaccgcttcgacacggtgccggtcgagcaggtgcagctgggcgacgtacttatggtgctgccgggcgaaaccgtgccggtggacggcgagctgctgtccggcacggccacgctcgacctgagcaatatcaatggcgagccggtgccgcgtgaagtgttcgccggcgcccgcgtgatgtccggcgcggtgaacggctcgaccgcattgaccatgcgtgccacccaagtggccgccgattcgcagtaccagcgcatcctcgagctcgtggcctccgcgcaggaatcgcggccagccgtggtgaaaaccgcagaccgcttggccgtgccctttaccgtgctctcgctggtgatcgccggcatcgcatgggcgatgtccggcattcccacgcgattcgcccaggtgctggtgctggccacgccctgcccactgctcatcgccgcaccggttgcgtacatcgccggaacaggacgcctcgccgcagccggcgtgcttatcaaagcgcaggacgtgctggaaaaccttggccgcgtcacgcaggtgttcttcgacaagaccggtacgctcaccgtcaagcagccgcaggtcgtgcgcgtcgagatgctgcccggtgccgcaacccgtctcaacgaagaccatgtgctgatgatggccggcgtggtggaaagctactcggtgcacatcctgtccaaaggcatcgccaaggccggaacggaggcgatggcccgattgcgccagcggttcgaggatggtcagcggctctgccccgagccggaggccagctggcccggccatggacgggagtatccggtcatcaagaatatcaatgaagatgccggcaaaggcgtttccggcgaggtgaacggacatgcggtgcgcgttggccggctgtctttcgcggccgccggggaggaaggattcttggcggtcgatcggaccgcccccagtcggtctgaggatgacctgcgcacacgatttgggctgcttcagccggacgaaatggcgtcgtatgtgtctgttgatggtcagctgatcgcgcgcatcgtgctgcgcgatgtgccgcgcgccaacgccaaggcagcgctcgccaaactgcatgagttgggcgtcaccaagctcgccatgcttaccggtgacaagcgggcttccgccaatatcattgccagcgaagtcggcattgacgaggttcacgccgaactgttcccggaggataaggtagccgcagtcaaggccgctacaggagccggcaaaaccgtcacgatgatggtcggtgatggtgtgaacgatgccccggtgctcgccgtcgccgatatcggtgtggccatgaccgacggcacatccaccgccgcttccgaaagcgctcaggtggtcattatgaatgacaatatcgccgccgtgccgcgcgccatcgccattgcacgccgcaccaagcgcgtgatgcttcaagccgtaatcgcgggccttgtgcttgccaccatcggcatgattgccgccgcgttcgatctcattccggtcgtcgtcggcgcattcctccaggaggccatcgacgtggtgagcatcctctgggctctcactgctttgattgatcgggactgattaagataaaccggaattgattggagccgcatccggattatgtgcaatataacaatttgatatcaatattttgtgtgtgcttaccggatgcgggtgccgtaggtggcagtctattagactaaaggctgtttgcagcatcatttaggggcattgaggcctttgccagaggagtcgatatgtcagagggtgaggaagagctcaatgtgggcgcagtccgtttggaggaagtggcatcggcggctaatgtatcgctgtccactgcgtccaaggccttgcgtggaaagcctcacgtcagcgagaaaacccgtattcgagtgattgatgctgcgcggaggttgggttatagcgccgcagaagctatggcatcgatggcaaggttaagcgtcagggattctcacggcatgcaggattttcgcgttggcatcattggcgttgatatgaaaggcgtcttttctccgaccattcttattggagcggagaatgcgtttcaagcgcgctcagccgcagcgctactgttcaatgcgtcaggcaatgaggcattgttccacagtggtattgaacgaatgttggtgcaaggagtgtcgggactgttgattatcagcaggtgtacggatccggtgccatactacgtggattctccggtacctgtggtctacgcctatggcccgtcccgtgatcccgatgattgttccgtggcacaagacaatgtggaatcagggtgtttggccgttcgccaccttctttcctgcgggcgcactcgtattgcgattattgctggcgactccgagtactcggttacacatgaacggatgcggggtgcgctcaaggccttgcatgatgctggattacagttggctggcgaagcgcggttcggtccatgggaagcggaatgggggcgcgccgctgcccgtctgctgctcaatgacggtgctgcattcgacgcagtgatatgccaaaacgatgtgctggctcgtggctgcatcgaggaattggaacgtaacggatgtcgcgtgccgcaagacgtagcggttatcgggcacgacaacagtccggattatgtgtcgtacgcgcatccgttgcttacttctattgatgacaacaacgaaatgctggggcgtcaagctgccctatgcctactggatgcgattgcggggcatcctcaccatggtgtggagcgtgtgccggtgaagctaatccaacgcgagtcaacgttgccgttggattgataacgtcaccggataggcggcagcagccggttcacatcttgcgtggcatcatccagacctttgcgaatatcattgatgccggaatcctgtacaaggccgtgaacgtcgatgttgctttgttcgctcaacgcttggccgcgtacgcgcatgctatggataaatcgtccgaccttgcgtgcgtagtcgggcagcttgtcggggcctaccagcactaaagcgatgacaagaatcaccatgagttccgtgcccgaaatgccgaacaacatattattctccttctgcagttattgttgcaggggcttcctgtttgccggtgcgcttggctttgcgcgccgcgcgaaatggtaacgcggcgcgcattttatgtaaaagtttgagaagtttgggttcttcgcccgccgcgcgcatgactttccatagctggatgtgctcgtatactgcgcatacggctatggctgcgaaatagattgcgatgatgggcaaagcgagtgcgcataatgttcctgggtcgccggttggcgtggccacggccgcgaagataaacgctatgaccgttgcgagacgccactgcttcaaccatgttcgtgtttcgaccgcattcatcatcgtcaatgccgccataactacgggtagcaggaatgagaggccgaaagcgactgtcatgcgcagaatgaaatcaaaatagacgtcggcgctgagcaatgtggcggtgtttgcgggggcaaagccggtaaggatcgccaccgcttggggcagcagataccatgccagtccggctccggtgaggaacagcggcactgaggctccgatgaatgtaaccgcggtccagcgctctttgcgcttcaaccctggattaatgaatgcccacacttggtatgaccaccacgggcaggaggccgtcagaccaaggaagaacgcaatctccagctttacgttgaatgcggagaccacgccattgaatgtgatgctcatcagtccctgttgctgcccggccgccgtcaggaacggttgttgcaggatacgaaacacctgatcgctgaacatccatcccactatcgacatgatgatgatgccggcaatggcccgaacaaagcgtttgcgaaattcgacaagatgatcggccagaggcatcaccgcatcgggattgcggggcttgcgcgttttggacttgcgccctacaccccgcttccaccggcgtgtagggtgttgcgcacccgcgctggcctgctgcgtggcctcgtgtgagtgatcgatgagatcgtcgaggtcaagatgtgtatcccgatcgccgggatgcatcgccggtgcaaggggtgccggaagcgcggggtttccgggaaccgtgctcatcgctgttcggctccggttgctgtagtcggggcggcggtggcgttcatcgtgacggcttggggtacggcgggagcgggagccggtgctgccgccggagctggggcaggggcgtcgctgactgtattgacggtttgttgtgttgccgggtcatcggtcttggtctcggcacggaaaatcttcatcgattggccaatgcttttggctagctcagggagcttcttcgcgccaaacagcagcacgatgataagtagaatgataatgagctcggtggggcgaagattaggcatgatagtatgtccttccaatttctgtgttgtgacaggggaagggtatacctcattaacgcaccaatttatcagtatagcgaggaatggtgtgttgttcaagttgaagtgcggtgttgcgtttgagctgcttgtgagagttgctcgggaacatgttaatttgaatgcatttactgtgttattggtgagcatatgtgtttgggttcgttggttttcgcaagaggaaaacaaaaggaaaattacgaaaatagcatggttggaaatgctgataaagactgattttcattggtattgtgcgctacgaaaaccagagaaaaaatgagtgagtcgctttctttgacgcatggtgagaatcgtctgtttgagttattgtgaacgcgcacaacgaagacaagcggcatggagggcgcgcaaaaactcgaataatcgcatatggtaactgtttgctttaccgtcatctctcccatacatacatgacgacggggacgcaccacaatgatgtgatggtaaaacgggcagtaccagacgattccgagtatgtgtgtgccatccactgacgcatcttacctgcgtcgtcgggccattgaatggattaagtgcattgaatggttgcgaatgcggcagagtgtcttcgtccgtcatgcctcgcaatgaacgcgcggcagtccaacgaaggagcaagatgagttcaacggaagcaacaaacggcatctctcgccgtgctgtgctcgcaggcgcggccgccatcggcggcaccatcgccgtggcgagtgcattgggtacaggagtgacaacggtgcaggcagcgccatccgtcgctggcacggcaggtgcaacgggcgcgaacggcgcgggcggcgtggccgttcccgcagcgcagcgcaccacgaaaagcgcgaagaccattaccgacgcgcccgctctgccgggctggaaggtagctccgttccctctgcggaacgtcgccatcacctcgaacagcgtgttcgatcgtgccaaggaagggatgctcgactatgcacgcaactatccggtagaccgctggctgggagaacttccccagcggctcgctagacaaggctgttgaacagcaatggggcgatgccgaatacacgcgtggccagaacaagaacggtgctgatggtctgttgcgcggccactttgccggacatgcattgcacatgctctcccaagcgtatgccgaaacgggggaggaagcgattctcaacaagatcaacgagttcgtctccggcctgaaggaatgccgagattccctgcgcgagatgaagtataacggcaaagcccgctacagccaccccggcttccttgccgcctatggcgagtggcagttcaaggcattggaggaatatgctccctatggcgagatttgggcaccgtggtacacggagcacaagattcttgccggtctgattgccgcttacgagtttgccggtaatgccgacgcgctcgacctggctgaaggcatcggacattggacctatgcgcgtctgagcaaatgcaccaaaacccagctgcagaagatgtgggacatctacatcggtggtgaatacggcggcatgaatgattcgctggtggatttgtacaacgtctccaaggacaaggaccgtagcgaatttcttaaggcctccgcatttttcgacactgacaagctcattgacaactgtggtgctggtgtcgatatcctcaacaacttgcacgccaaccagcacattccacagttcgtcggttacgccaaagacgcggccatgggcgacgcggatatcgatgctgatgctcgtgcgcgttatctcaaggccgttgaggggtactggggcatgattgtgcccggccgtatgtatgctcacggtggtactggcgaaggcgagatgtgggggccggcacatactgtggccggcgatatcggcaagcgcaacgcggaatcctgcgcggcatacaacatgctcaaggtggctcgctatctgttctttatcgaacaaaaacctgcctacatggactattatgagcgcacgattctcaaccatattctcggaggtaagtcccgtgacctcgattccggcacggccctcacgccgggcaactgctacatgtacccagtgaatccggctacgcagaaggaatatggtgatggcaacatcggcacttgctgtggcggcaccgctttggaaagccactcgaagtaccaggattccatctacttccactcgacggacaacaaggaactgtacgtcaatctgttcacagcttccacactcgactggaccgacaccggcctgaagctcgcacaggaaaccaactatccggaggaggagacctcgacgatttccattacggccgcgccgaagagcgccgtcaccttccgcatccgcatccccgcgtggagcaaaggtgcgaagatcgaggtgaacggcaaggctatagatggcgtcaccgctggcgaatacgccaccgtggccggcagctggaaggtcggggacaagatcgtcgtcaccatcccgctgcagctgcgcaccgagtcgactgatgaccgcaaggacatccagacgctgttctacggtcccacggtgctcaacgcgctcaacccatccaccaagttcatccaacgcggcttctacgagcgcaacggcttggatggcaccatcaaactgggcgtacagaagaaggaaggcacgaagaactacttcatcattgacggcgacgagttcgagcccgcctacaacggcgacaacaccccgtaccacatgtacttccagcgcaaggacgagtatgtgggcttcgcaggcaagctcaccgatgtgctgaacccgaagcgcccggctgcacaggaccgtagcgagagcacgctgatggatgacatctgggcgggcgcgccgttcaaggaccgtgccgccttcatcaagaaggtgcaggaggtcacgaagacctatcaagacgaggggctgctttccagtcgtgatcgtcaggtggttctgcttgcctccgctcgcgccaagatgagctgacgttttcctgcgaccaaaccgtctcccgtagtgcacgacacggcgggagatgagtgatacaaaccataacgcctaacagaaagaatattatgaccatcgaaagcactacttcggccgtgaagggcggtgtggcgaaacgattcgccgcactgttcgtagctgcggccacgctgctggctggcggtgtcttctccgtatcggccgcgccgagtgcactggcggacgacgctgaaacgaatgttgcgctcaatgcagaaaaaggcaacgacaatgcaccagacgttcaggtcagctatgtcactggctggaacagcactgctgccatcaatgacgatagcttggacggcaacgccagctatggcggttggggcacttggggcaacaccagtgccagcgaaactgccacttacacatggaatcgcgccgtgaccacgtccaagtctgtgggctactactggacgaacgtcaagaccggtgatggtggcgtgccgctgcccaaggatgtctcgattgagtatctcaatgctgattccggccagtacgagaccgtgccgaacctgaaggtggacaagacattccccgccgacgacgagctcgacgccaccaacccggtgtatggtccgtatacctacaccttcgaccaggtcaccaccaagtccatgaagcttgtggtgaacaagaaggccaatgacaacaagggtattaccgtcactgagtggcaggtgtttggtaccagcgctgcactaccagtggatccgggcgacccaggtgctttcttagacgtgcagcaagttgccgtgcgcaccacgccgggcgtggacccgacctcgaagttgcctgcagaagtgtgggcgacacctcaagatggtcccagcattaaggttccagtgacttgggaaaccgttccggccgacgcttatgctacagctggtactaccgccgaagtcaagggcactactgctgccggtacctatgacaacatcaaagttgcggccggtcaggcgacggccactattggtgtctacgaccagctcaacaccgaggtgaccgacgcggagtacgtctccaccatcaccgttcccggtgtcaagccggtattgcaggataccgtggcgctgacctacgctgacggctcggtcgagtcgggtcacaaagtgacttgggacagtatcccggccgccgagtatgctgaagccgaacaggtcggcttcgtggaaggctctatcgagggtgtcggcaatatcaaggcggaaggcacgttcttcgtcgtcgcgccttccgacccgaaagcccagccgattgttgctatcgatttcgactccgcggcccccggctccggctggtacaccactgccccgaagttcaccatcaccgcgcagcgcggcgtctccaccgtgccgataaagacgatcgagtacaagatcggcaagggcgagtggaccagtggcaagggcccgatcagcgtgaccgcgcagggttccgtgaccatttccgcccgtgccaccgatgaaaacgacaacagccgcgaggtctcccagaccatcaaggtcgacaccaacgtgccggtggtcaccgctaagcaggagagcaagaacggcaacgatgtggtcgtctctctcaccgctgatgacggtgccgcaggctccggcgtgacccgtgtgctgtactccaccggcccgtccagcaacccgaagtccaacgagaacacgatgtggggcacctacaccgacgaggacaaggtgaaggtgcagctctccgctgaccacgacacttacgtgcacttctatgcgcaggatgccgccggaaatgagtccgactacgccaacatcaatctcggcaagggcgaagccgtgaccccgaccccgactccgtctgtggattccgttgccgtctccggtgatggtgtcaaggatggcaagctggcgctggtcgctggtgatactgcccagttgtcggccgaggtgaaggtgaccggtgatgcggccaagaccgtggcctggaagtcctccgacgcgaaggtcgctactgtggacaaggatggcaaggtgaccgccgttgccgaaggtacggcgaccatcaccgccacctccacggttgacgagaacaagtccgcgtccgtcgaagtcacggtaactaagcccgaggctccggttccgcctgccaccgatgaggagcgcaagcctcttgccgacaagatcgccgctgttgagagtgagaagctcaaccagaacgactacacggctgattcgtggaaggcatatgcggatgcacttgctgccgcaaagcaggtagtcaaggatccggccgcaaccgcaccgcaggtgaccgctgcgctcaacaaactcactgccgcacacgatggtctcgccaagaaggatagcggcgaaaagcctgaaccgcagaagcccggtcagcagaagcctgggcaaaaccagaagcctgaccagcagcagaagaacgctactaccactgcccccacgggtagtgcggtggctgccgttgctgcggccgtagttgtgctcggcgcggctggcgccggtctggttatctggcgcaagcgccgtgcctgacgtgaggctattgcccctaggctaataacaacccaataattgaatacaggtcttatacctgaagttgatctgcgtcgcactggcttgaacccgaatcgatgttcgggctaagcctgtgcggcgcatttcgttgcggctgtgttgctcataatccggtatcggagttattcattaggtcggtttgacgtttattaggtcggtccttggtcggagcggcccttgaaaccccgccgttccaagggatggcttcagcaccctccgacctaatgaacgaagaaatgacctaatgaatgcaatcgaggtcgtaaagagccgttggaggtgacatcttcagtgtcatcaaggcccgaattcaatttgtaagtgcaacacccgtctttgggtggcttgtcttcgagagtaccttgccgagctcgcggtaccaaacctcgttgggcgtttcccggtccaggaccttcatgggggtgtcgttgatctcgtccatgatggcc

SEQ ID NO: 2608 - DNA, 38388 bp, Unknown
  R222_15m  MAG No. k141_17238
aagccgaccacgaaacaggacgcccagccctctacgacaacgctatcgacaccgactacacccactcaatcggcattcaaaaaggccaaatctaacccccgcgacacgccgagccagacacacattttgacccttaacccgccgaacatgatggagaagatcggcagatcacggccgcgcgacttataggcgctttcgaattcgtcctgatgatcggagttggagcggccgtcggtcatgagcacgatggcggtggtgtattgcgaggcttccgactcgctgggcagctcgtcgagcgcgctcagcaggccttcatagatatcggtgccgccgctggcatcggtggcatcggcctcatgcagcaggtcgctggtgcttgtgccagtggccttgaccgggcggtgggcctcggtttcaaacgggatgagaatgttcacgtcgccgctggcgggctcgatgtacgacttcttggcctggtccgggtcgagcgccgcgttcaggcctttgaccacgccgttcttgccctctccagacatcgaaccggagtaatcgaccacccaaatggtccagctgggcttcctgagcgcggtctggtagacgttgagcgcgctgtcgatcaccgtggcggaggtcatggagaacgtgagtttgccgtcgctgaccgcggcgaggatgtccgcggtggagacgggcttggtggcgccggagtcgtcagcccagccgagtttgacggccttggatttggcgatgccgaacacgatcggcgtggtggaggtgctggccgcgtctttgacgatgtgcttggtgtctcccatcgaaatccacatcgaggaggcaggccagacggcgtcgtgatcctggccgccggccttgagcgcgttcataatctccagcgaacccatgtagtgcatcgtcacggctacgttggattggtcggccgctttctggatggcagtggcgacttccttgttctcggagccggaggcaatgctcagggtggcggtcggtttgccgccggacggctggaaggtctgcgtggtggcggacgtgccgttgccgtccgctgtgccgtcatcggaattattgaacgccgtgcaaccggtcaacgcgagcacgccggcacatgccgcggccgcaaccgcggcggcgcggcggcggagagaagacattatgcccataattccatggctctcccgccatctaaagcgggccgggccacaaggtgaccgcacggtgaacaatgggtgaagagctacatcagtacgcggcgcaggcaatcatggggtcgtcgtagaagccgaggatcttttcgaggtagggcttgtaagtgctgttgggcatggagaagatttcgtggcgcgattcggggaagcgcacgatgttcgcctcgccgccgccgtccttgaccagttggacgaagtgattctgcggcttattgagtacccagatgtcgcgtccggactggaagagcagcaccggcgtctccacttcggcgcaggcggacggattcagtatggcccggttgagcttcaacgcctggcgcacccattcgaacgccgcgcagtaggtctggtattcgctattctcgcaacgcagcttgaagtaccagcgttcacgcgcctcggaagcgccctcgttgccttccatcgagaactccggcgtgaagtccgactgcccgaacacacgcttcttgccgaagccgagtccgcacagcgcgccgaccagcacacgggccacgcccagcggcatgccggtggcgggggcgaccatcggggcggagagcaccgctttgtcgaacagggtggggtatcgctccaacacggccgcgccgatgccgccgcccatcgaatggcagaacaggttcagcggcatgccggccgcgtactgctggccgatggtttcggcgaagccggccagatcggccacgtagcgctgccagtcatcaatccacaccatgcagcggttgtccacgtcgcgcgcggacttgccgtggccgcgatgctcgagtacacacaccgagtagccggcaagcaggaagtaccagacgagctcgtcgtacttttcggcgaactcggtgaagccgtggctgatgacgatggccccgcggaaggtggcggtggcgccttgctcgcgaatcgcgtcgaatttggcggagtcgtagcacaggtagtgcagctggcccgagcggccgccggtgtccataatgccggacagcggctcgatcccggccgaacgttcggcggcggacggatcgaaccagccctcctcgcagcattgttcgagcgcgggcagcaccacgtcggtcatcgtttcggcgtacttgttttcgtcgatcatcgtcacctgcatggctcccatcttaggacaagcctcacgcccacacctcgcacccacaccacgacacattcccgggaatgcgtcgcaagcctgcgcgccactgaccgcacaggcgcgtaggttgtgaggtatgagcgaaaccaatgatgtcaatgacgcaatcaagcatttcccacgcctccgggcgcgcacgctgcgcttcggctgcggcgcaccgcgctccgcacagaccgtgggcgacggctcgcgggccctgttcctgcgctccgacggccccgaggatctggtgaccgcactgtggctgagctggttcgacgagtccggcgaacaccatgagaccaagctggccgacccgcgcgaactgctgggcgcaaccgccgacagcgaggacgtgccggccgaggagaaggcccgccgcgagcgtgcgcgcgaaggcggcaccggcatcgtcggatactccgcagatgacgacggcaatcgcatcgtgttcaccatcaacggccgcctgttcctgaccgacatcgattggaatgacgagaccggcgcacccgagccgcacacccgtgaactggccggcgaatggctcgatgaggacccggcgatgtacacgccggtgctgaacccgcgcatcgccccggatggcgaacatgtgctgtacaccacgggcagctacctgatgctggtcgatatcggcggcgaactaggtgaccgcatcaccgccgtctacggcgtgagcgtggaggatgaggacggcaatccggccgaaaacacgtggaaaatcggtctggccgagttcgtggccggcgaagaaatggaccggtacgacggtttctggtgggccccggattcgcagcatgtgctgttcgagtctttcgacaccgccgacgagccgacctggtacatcagcgatccggccgaccccgagaagccggacgccggccgccgctacccgcgcgcgctgacccgcaacgccgacgtgtacctgaccgtgatcacgctggcgttcgatgagaacgaccggtacgcgggcatcaccggcaacgccgatgtggattgggatcgcgaggcgtacgagtatgtggccgccgtgaactggcgtcgcggccacgatccgctggtgctggtgcagaaccgccgccagacccgcgatcaggtgcttgaggtggcagtcgcggcggatggggccgcgctgggtgccacgcgtgtgcttgaggagcacgcgaacgagcagtggatcgacctggttcacggcacgcccgcctacacgccggatggtcgtctggtgtgctcgctcaacgatatggccacggacaccaaccgtctgacaatggacggccgcccgttcacgccggctggctggaacgtgcgcacggtgctcgccgtgaccgacgaggatgtgctggccgtggtgcagcgcgcgcccgaaatcgcgcctgaggtgccggacgcttgggccgatgcggccgccaccgagtccgtattcggcgaccacgacgcccgcagtttcgacgtggtgagtatcgattacaacggcacgatcacgccggtcacgaccgatcccggccagtggaccgcctcgcgcggcgagcgcggcatcgtggtctccggccgcgatatgcgttccgcccgcgcccagatgcggcatattctgggagaacagagcgccactatcgcgtccacggcggccgaacccggctttacaccgaacgtcacgtttacgcgactgggcgagcaccagctgtacacggcgatcatcgcgccgagcccggaaagcccgtacgcgcacgccgagaagctgccggtgctgatgaagccgtacggcgggcccggcttccagcaggtcatcgcctcgcagtccttctactgggagggccagtggtgggccgaccaaggcttcctggtggtcacggcagacggccgtggcaccaccggccgcggcccggcatgggaccgcgagatcttcgaggatatgaaggacgtaacactggccgatcaggtcgaggccgtcaacgccctgcccgaggccgtcgcccggctcaacgccgatgtggaatcacgtgcggcacagccggctgcgggcgatcaggcagacgccgagaaccacccaccggcgcttcgcgccacctcccgccagcgggaggcgattcccatgccggacctcgacaaggtgtgtatgatcggctggtcgtacggcggcttcctgtccgcactggccgtgctggacgcgccgaacgtgttcaaggccgcatgcgccggcgccccgcccaccgactggacgctgtacgacacgcactacaccgagcgctatctgggcctcgacccggatgtctactaccgaaacggcatcgtgcaggacgcaccgaaactcgagcgcccgcttatgctgatccacggtttcgccgacgacaacgtcaccatcgcccacagcctgcgcctctcgcaagccctgatggcggcgggtcgcccgcacaccttcctgtcgttgacgggcatcacccatatgaccaatgacgagaccgtggccgaaaacctgctcaccctccagcgcgatttcctgcgcgacgcgctggcctgacaaatcgataacacgcgcatcccacccgaggtgctccaccggtaaagcacctcgggtggtgcgccgcacccatttccgccctgaatttttggatattttgcactcatcgtcacgtgaaagaccggttttttgtctcatattcccatcaccgcgtaggatgggtgaagattagaaagggaggactatgagcgttctcgaccgttttgaaaaaagcgtggagggtgcagtcaacggagtattcgccaagtttggctccaaagacctgcagcctgtcgatctttccagcgccttggagcgcgagattgacgccgaggccatgcccgtgggccgtgaccgcacggtggccccgaatgaataccgtttcaagctcagtactcctgacttcgaccgtatcgaggcatggggtagcgagaccctggccaacgaactggccgataacctcaccgagtacgcgaagagccagcattacgccttcgtgggcccggtgatcgtgatcttcgaggaagaccttgacctgtccaagggcaacttcaacctcacctccgaatccgtgcagggcaatgccgtgccggtcaccaccgatgcgcagaccgaggatagcccggtgctcgaggtgaacggcaaccagtacctgctcaccaaagacaagacggtaatcggccgcggttccggttgcgatatcgtcatcgacgatccgggcatctcccgcaagcacctggaaatcgacatcacggataacggcgtgatcgcccgcgacctgggttcgaccaacggcacgtacgtggagggccaccaagtgcccgccgccacgctgctcgacggcaacaccatcaccatcggccgtacccgcatcctgtactgggcctccgcccaagcccaggagtagtcgagcacacgcccgaaagtcgtccacttatgaccgaactgacattcgccctgctcaagtatggattcctgatcctgctgtggatattcatctggctggccgtacgttcgctgcgcaaggacatcgagacgttcagtccgcgaccttcgcgcgcgcgtcgtcgccgtgagcgtgaagtgcataaggccaaggccgaaacgccgcaggcagctgcgccgcgcccgcatcgccagcccagcgcttccgcgtcgtccgccgcctcggcgcagcctaccctgttggtcatcatcgatggtccgcttgccggcagctccgtgccgctggccgaagccgacatcacgcttggccgcgccgcctcgaacaccgtggtgctcgatgacgaattcgtgtcttcccaccatgcccgtgtctaccgtgacacgcgctccgggcagtgggccattgaagacctgaactccaccaatggcaccgtggtcaaccagcagcgcatcaaccgccccaccattctgcccgctcgtattcctgtgcgcatcggcgccaccaccttcgaactgaggtagccgcatgccaaaatccgccgcttcacaaccgctgttcctgtattccaccacggtgtccgatgtgggcaccgtgcgcgcgaacaatcaggattcctccttcgccggcgagcatctcatcgccatgtgcgacggcatgggcggtcacgccggcggcgatacggcatcctccatcgccatccggtcactggcccacatcgagcaggacgacaccggtggcaacgtcgagacgatctcccgcatgatggagacctccgttatggccgcgcatgacgccatcgtcggcaaggccaagcgcgaacgcaagcttgccggcatgggcaccaccgttaccgcagtggcattggtggccggctactgggtcatcgcccatatcggcgattcgcgcgcctacctgctgcgcgacggacacctgagccgcatcacgtgcgaccacagctacgtgcagcacctcatcaacaccggtcgtatcaccccgtccgaagccaagaaccacccgcagcgcaacgtcgtgatgcgcgtgcttggcgactttgacattgacccgcgcccggatatttcgattcgccgagcccaccccgccgaccgttggctgctgtgctcggacggtctgtgcggtgtgctggaagattccaccatcgaagagacgatgaccacgctgtccgatcagggcgaatgcgcgcagcgtctggtgcagatggcactgcgggcgggcagcaccgataatgtcacggccgttattgcggatgccacgttggcgttggatgccgatgcgttcgatctgccgcaccaaacgccgttggtcggcggtgccgccagccgtaatcttgagccgattgccgacatcgtcaacgagccggtggctaccgcgcccgcactgcgggaggatgattcccccgcccagcgcgccgcagcattgattcagcccgccagcgcgcacgaggcggagaccgcgcaaaccacggccaaaccgtcgtccacacgcgtggtgcagccgtccaccgtccgcgaggagaccggtgaacgagccaatcccgataccggtgagattccggtggtgcaaaagccggatgggcgcctgtccgccgaccccaacgacccggatgtggccaaagccatccgcgatgagcaggtcgagcagaagaaggccacgcgtaccaagaagcgccgcaataagcttgcggtgattattacctgcattcttgccgtgctggcattggccggcgctggctggggcgcgtacacgtggagccagacgcactactacgtgggagatagcaacggcaccgtggccatttatcgtggcgtgccgaccaatctctttggacttgagctttcgcacgaagtgcagaccaccaatatcgccaccgcggacctgcctcagacatggcgtgaccagctgagccaaggcatcacagtcggttcgttggacgaagcgcagtcgcatgtgggtattatccgcaccgaaatgcgcaaactggccaagcagcaggaagccgacgccgccaagaaggccgaggcgtccaattccccggacagttccaaagacagctcccagagcgattccaaggacagcaccgaggattcgtccagccagtccggctcctcgtcagacaagtccggttcgtcaagctcatccgattcctcggataaatccggtatcggagcggccgacaacgcggccacgggagattctcaatgatcgttacccgtctacgtcagatttctttgttgctgattgccatggcaatcagtgcgttggcgttcatccagatgttccagcgcaccgccggcgaattccctatgcaatacgccggcatgctggcattggccgtagtgctgtttctggtgctgtgggggctgattgtgcgcttccagccgtacgccagccagtcgattctgccttgcgtgctactgctgaccgccaccggcgtgaccatgatcgctcgcattgaccagagcgaaggttgggcggttgcccaacgtcagctgatctggctgtgcatcgccatcgtgctttccgcgctgctcatcatcttcctgaaggactaccgcgtgctgcggcgcttctcctacgtgtcgatggtggtgggcttggtgctgctgctcgccccgatgctgccgtttgtcggtcaggaagtgaacggcgcgcgcatttggatcaggattccgggactgggccagttccagccgggcgagttcgccaagctgttccttgcgttcttcttcgccgcctacctgttcgaccatcgcgaccagctggccgtgggcggtaagaagatgctcggtctgcagctgccgcgtatcaaggatctcggcccgatcatcgtggtgtggatcgcctcgatgggcgtgctcatcatgcagcatgatctgggcacctcgcttatgttcttcgccatgttcgtggccatgctgtacacggccaccggccgtaaaagctggatcatcatcggtctgatcgcgttcgccgcgggtgccgtgctggccgcaggcatgttcagccacgtgggtcagcgagtcgatgcctggctgcacccgttcagcaacgagcaatacaacaagacccccggcggctcctggcagctggtcaccggcattttcggcctggcatcaggcggcatgctcggcaccggtctcggccaaggccatccttcgctcgttacgtttgcgaactccgatttcatctacgcctctctgggcgaggaactcggtctgatgggcgtcctggccattttgatgctctacctgctcatcattgcctccggctttatcaccgccatgaaaatcaaggatggcttcggcaagctgctcgcttccggactggtgttcaccatggccttccaagtgttcaccgtggtcggcggcatcacgctggtgattcctctgaccggtctgaccctgccctatatggcggccggcggctccagtctgatcgccaactatattctcgcgaccctgctcatcatcatctcgaactcggccaatgcgcccgagccggaactgacctcggatacgttccagtacgaggctttggccgtgctgcgcaacaaggaacttgaggcccgagcccgcgccactgagccgatcgttcagcctcgcagcgcgtcggctacggcgtcgcagtccgaggcggaatcgtttgacgaccccattgtggacatcaccaagcacgcgccagacacacttgaggcacccgaagtgcccgcaattgtgacctctgcgggctctgctgcggcccccatcgccgagcctattgtggatgccaccactccggcgtatgccggcgccgatgaaccgtacacgcctaccggtacgattcccccgcttcctcccgttaacggaggcactcgcgtatgaacaaatatcttcgtcagcttttcaccgccgtggtcgcgctgttcgtgattcttggcctgtcgtccaccatcatcatggcggtacgggccaacgcgctgaacaacgatccgcgcaacgcccgttcgctgtaccaccagctcggtgcctaccgcggtgccattctggcctcggacggcacggtcatggccaaatccgaaccggtcaacgacgcgttcaaatacctgcgcacctattccaacggtccgctgtatgctccggtcaccggcttcttctccatcaaccagaccgccgatcgcggcctggaagcctcccgcagcatgctgctcaacggtgaggccgattcattgatctggcagcgggccaaggccatgctcaccggcactacgaatcagggcgcgtccatcgaaacctccatcgaccccaagctgcagcaggttgcctacgatcagctcggtacgcgcgatggtgcggcggtggccatcgaagtcaacaccggccgtatcctcgccatggtgagcacgcccagctacgatccgaacaaactggcgacccatgacgccaaagccgcgtctcaggcctacaacgaactctctgcgggccaaaatagcccgctaatcaaccgcgccacctcgcagctgtacccgccagggtccacgttcaagaccatcgtcgcctcggctgcgctggaaaccggcgattatcagacggacacgaagattcctgcaggctccagctataccttgccgggaaccgccacacagctgccgaacgacgaggcacagggcgatggcgtcaacggacagatctccctgcaagaggccgtcgcatggtcgtccaacaccgctttcgcccagcttggcgtgaaactcggcgcgagcaaggtttcggacatggccgccaagctcgggttcggcagcaccatcaccattgacggcaccgaatccacgggcaccccgatgacggccaccgcgtccacattcccctctgatccgaccgacgacaagcttgcgctggcatccatcggccaaggcgacaccacggccacgccgttgcagatggcgatggtcgcgcaggcaatcgccaacaatggcaaactgatgcagcccacgctggtcgatcgtgtgcgcgccgccgatctcaccgtactttcgcagaccaaaccgcaaaccatggccaacgcgttcagcaaggattccgcagacaagctcaccacgatgatggagagcgtggtgaccgaggccaatccgcagctggtcgacggcatcaaggtggcggccaaaaccggtaccgcacaaatcggtatcgacaactctgccatcgacggctgggtgatcggtttcgcgccggcggacaatccgcagatcgccgtcgcggtgttggtgcataacacagatgtacacggttcgctcgccgctggcccgatcatgcgcgcgatgatgcaggaggctttgcagcagtgaaacttatcgaaggacagcttattcaccgccgatatcgtcttgattcgcgtcttgcgcaaggcggtatgggcgaggtctggaaaggctacgatattcagctcggacgtgaagtggccatcaaggcgctgcgctcggacgtgaccaacgccgaggccaagctgcgccgcctgcgtgccgaagcccataattccgccaatctggcgcacccgaacatcgctgcgttgttcgaatactacgagcatgacggcatcggctttctgattatggaatacgtcccctcgaaatcgttggcggatctgttccatagcaagggcgcgatggatcccatcgaactgctgcccattctgattcagaccgcgcgaggcctattcgtggcccactcgcacggcgtgattcatcgtgacgtcaagccggccaacatcatggtttccgacaccggcgaagtgaagatcaccgatttcggcgtgagctactccaccggccaaggccagatcacccaggacggcatggtggtgggcaccgcacaatacatctcccccgagcaggcgcagggccagcaggccacgccgcaatcggacatctattcactgggcgtagtggcgtacgagggccttgccgggcatcgtccgttcaccggcaccactccggtcgatatcgccgcagcgcacgtgaacaatcccgtgcctccgctgccgaactcggtggacgtccagttacgcgaatttgtcatgtcgatgctggccaaggacccgttggatcgcccgaaagacgcgctggtggtgtcccgtacgctggcacgcatcgaacgccgtctgctggatcagcagaccgaaatggccgacaccgccatggccacgtccggcaatcgactgccgcgccgagtgaccagcacgccacgcattgttttggaggccccggcctcaagattgggagggaataagcaatgagcaccagtatgcccaccgcattggccggcggacgctaccagcttggccagctcatcggtcgtggcggcatggccgaggtccacgtggctcttgacacccgtctgggccgtaccgtggccgtgaaaatcatgcgcgccgatctggccaacgacgacatcttcctggcccgtttccgccgcgaagcacacgccgtggcccagatgaacaacccgaacatcgtgaacatctacgattcgggcgaagaactggcttcttccgaaagcggcgataccgagcgtttgccgtacatcgtcatggaatacgtcaagggccagaccctgcgcgacatcatcaaggtcaacggcgcactcagccagcgcgactgcgaacaggtgatgttgggcgtgcttaacgcgctcgactattcgcatcgcatgggcattatccaccgcgatatcaagcccggcaacatcatgatttccgagcagggcgcggtcaaggtcatggacttcggcatcgcccgcgctctggacgattccgcaaccaccatgacccagtcgcagggcgtggtgggcaccgcacagtacctttctcccgagcaggcgcgcggcgagaccgtcgacatgcgttccgacctgtattccgccggctgcgtgctctacgagatgcttaccgggcgcccgccgtttaccggcgattccgctgtggccatcgcctaccagcatgtctccgaagtcgccacgccgccatccgccgtggtgccggggctgccgaagatgtgggattcaatctgcgccaaggccatggccaaggaccgccagaaccgctacgccacggcctccgaattcaagaccgacatcctgacctacatgaacggcggcgtgccggtggcagccgcgttcaacccattgacggacctgtcgaatatgaaggcccgcaaggaagccgaacgtgatttgcccaccacgccggtggaaccgcagcagcagcccacccaggcattcaacccggtgaccggtcagttcgagcagattccaccggccaatggtgccaactcagcggcgttgcagtcccgtgcgcagcagcgtgcggcggcggccaaggccaagaagcgcaagaagatcatcatcggttcggcgatcgcggcgattgtcgcggtgctcgtcattgtgggcatcatgttcgccatgaacggctccggcaacaagtcctctgaagacaccgtcaccatccctgaagtgtgcaacgcttccacgtccaaggacaacatcaagctcaagcttgagagattgggcttgaagatgaccgaaaagcaagacaccgactccaccgagccggaaggcacctgcaccaagatgagcccggacgccggctccaaggtggccaggggatctgccgtgaaggtgtggttctccgcaggcccgcagtccactcaggttccggatgtcaaggagcgcagccaggaagaggcgcgcagcattctggaaagcgccgggttcaaggtgaacgccaccgtcaaaaccgaagacagcgccgacatcgccaaggatatggtgacgagaaccgatcctgccgccggtcagtcggttcccaagggcaccaccatcaccatatatgtttcttccggcatgaccaccgtaccgagcaatttggtcggtcagtcgaaggacagcgtgctacagcagtatgagggcaagttcagcttcaccgtggagcaggaaagctccgatacggtggaggccggtctgattacccgcgtaagccccgattcgggctcttccatcgcgcagggcgggtccatcaccatctgggtgtccacgggcaaggaaaaggtcgctgtaccgaatatcaccgctggcactgactacgccaccgccgaactcatgctcaaggccgtgggcctcaaggctcaggccagtggcccaaccgacagcaccgctgtggtagtcagcatcaatcctggcgctggcagccaagtagatgcgggatcgaccgtcaccattaccacgaaggccggcagcaccggaggcgacaccggtaccggagacggtggcaacggcaacggtgccaacaacggcaacggggggcggaacccgtgagtgagtgagcgccgggcgtgtgtgttgcgcatacgcaacgcacatagcgcaacacatgcgcaacgtaaacacgcaacgcaatcacacaacgcaatcacacaacgcaatcacacaacgcaaaggggaggggcttctgcacccctcccctttgctgtataaagagctatcccagcgcaacattcccgggaaagcgtcgccgcgcgcggaaaagctacttcgtaaccttgggctgaaggccggcggacttggccacggcgttgtcttggccgcagaccttaagccagttggccagcagacggtagccgtcctgggtcatcacggattcgggatggaattgcacggcgtacatcggcttgcccttgaccttgatgccctgaataatgtggtcgccctgcgtccacgcggtaaccaccagcgtatccggcaccgaatcgggctcgacggccaacgaatggtagcgggtggcggtcatggggttggccacgccctcgaaaatctcgtcatcgatatgttccaccaagctggtcttgccatgcatgatggtgggcgcatggcccacagtgcagccatacacctcggcgagcgcctgcaagcccaggcacacaccaaacatcggcacgccgctggccgcgcacaggcgaatcatatcctcactggcaccggattcggccggagcgccagggccgggagaaatcagcacgccatcgtaaccgtccagtacacccggcgcggctgggtcgatagcgtcgttacgcaccacatcaacagtggcgccaagggtttgcagatagcctacgatcgtgtagacgaaggaatcgtagttatccaccaccaaaatatgcgcggaatcggtcatagggctctccttgagggacgtgtactgcaagctatagtactaggctgccgtcagctcactgccacgaagttcgacatctgctgtaggaatgggatattggcggcggcccaagggaatccccactggaacagcgccgcggcggctgcgaacagcagcagagccagcagcagccatcgaatcggtgccacgccgggctgcaggcgcaacagtccgccatagatgctgacatccgggcggcgacgctcacccgcgcgaatctcgcgcagcaccggccagcgccatgccaccgcagcggcgatgaacagaaccagccacactaccagcgcgccgaataccaccttgtccagcgagccaatgcgggaagcgatcgagggggtttcggtggtggagaacttcactgcaccggacgaatcagtagtagccagctctttgggcacgccatcagacactttggtccagtacgccaactcaccatagctgatccatcgatgggtgggggtggagtatttcggctcacaggtagtcagtgtgatcatgcgtttggtgggattggcagtggagtcttccggattgggcgcgatcacatacacgtccgtgggcagcacaatctcgtaccgggtgtagtggtagacgtaccagtaatccttggtacgaacgatgatgggatcgccttcctgcaacttgtccacatcgcccaacggctgcccgtagccgttgcggtggccggcgacggcgaagttgccgacctgccccggcatctgggtggtgtcgtaatggcccagaccgtggcgattgagctgctcgagcgtggtgccttccacgatgttgcgatgccattgggagccgaagcgcggaatgtagatctgcgcaatcaagtcgccatatttcgcgtctttcggctgtactggagcatcgccctcctgggctttggcgatggtgaccgttcccccgttgttgctggggtcgctccagtcgacggactgggtggtttcgttctgggctcgctccgcctcgacaccggtccaccacatctgccagacgatgtacagggcgcaaatcacggcagcggtaatcagcagttcggcgcagatgccgagtgcctgccagatcaggctccgctggggcgaagacgcgccgcgtactgcggcacgacgggaccttgccctgctggcattggccgggtctgccgccattcgtgcggcgtcgtcctcggggaagggctgtacgtccgacacggacgcgagatcaatgggcgccggtgcgccgctgttgtgcctgccgtgtctcattgctgagtctgctcctcatctgtggtctttgacgtatcgaccgtggcatatttcaactgctgcagcaaggcggcggtagcggggaactgaaggccctcggcattctccaccttgtagccaatgccaaacgcggtcacatattgcttaagaatggtaatggcttcggagtcgttcaacgctgcgcgaagtctttgtgggtcaccaatcgcggaaatggtgaatggcggcgagtatttcttaccgtgcaacgacagcacgttgccggaacagatgaccgccgaattgaacagcacccgctgatccataatcatcagcgcatcggcaccgccggcccacaaggcattcaccaccgattcgacgtcctgctgatgaatcacgtaatcgttgatattggcggtcgtgccattgttgttgacggcgttctcccataacggagaatcatccagcgttaccgttacgccgctgccgctgagcgcgggcagcatcaggctggaatccacattgctggagtccttgccttggttctgcgtgctgtcagtaccgtcggtgccatcggccttgagcgcgtccgtaagattggcgacctgttcggtcagatcgctgacgtcctgctgcagctggttggcctcgtccacgccttgctccaccagatcggccgtatcgttggtggcggcaaccgtacgattgaccctcacgttggtgctcagcagaaaaccggtcaaggcaatgacgacgaataccgcgacaccaccccatagggagtgccgtgcgccgtgcttacctacatgtctggccatgaatttcctgtcttcttgccgactctggtcgccgctttcgagtgtagccactattatgacttttagcctattgaatggagactatgctgatggctgacgaagagctgcacgagaccgactcgaacaaccagaaggactggcagagcgagacctcatccagcaccgctgctgacgagaccgccaacaaagacaccgagcagaacgcagagaacgcttctgccgaggaagacgcggcttacggcgtgaatatggagcaggtgcaggccgtgctcaacgccactgccgataaggccacgctgaccccgcagatgcagcgcatgatgaaccgtcaggcggagaacaccaagcgtgttgaagaaaccattaagggcaccaagtcgaacccgcgttggttcgtgccgctgttctgcgcgtttatgatcatcggcctgatttggtgtgtggtgtactacctctccccgtccggctcctggccgattccgaacatcggcgcgtggaacctgggcatcggcttcgccctgatcatgatcggattcctgatgacgatgggatggcgctgagttccgactcgttgcgcttatctatcggtagatcgttttttctatcgttaggttgttcttagttcttatgcgaaaggccgacctcccgtatgcggaggccggcctttttcgtgccttcacctgttcatccacagctatccaccacttatccacgacttatccacgacttatccactacgttatccacagcctgtggatgaatcacacccatgtagttttccaccgaatgtggaaaaccatgtggataagtggtggataagcggcgtttctcggtgtatatctcgtgcataactttggcttggcatacatcgccacagcgagggaacagttatacacccgagttatccactgcaacaaacccagtaataccgcggcattcctaacttatccacataagttatccacagtcttatgcacttttctacacacttgtgcacaagtcaccattgtggataactcgttatcgtggataactcgtcattgcgcgcatctcattactgtggatatcttcattactgtggataccttcatacagcgcatgcccactcaccgaatgacgatatccacatcgctaatatccacatcgccgctttccgtacatacactgatgccgggcactgcatgttccgcaatacccggcatcaatcgtttttttacagccatatcaagccatatcagtgcagggagccgaaactcatccacccgtaaggattggccatattgcataacagaatcaacacaacgaccagcaccaccatggcccagccgtaaacctgcatacgccatttcaggcttttacctcgccacgccggcacaccacccaccagcagccatgtgagtattccacccactacaaagccgccgacatgcgcctgccacgccacgcccccgaccacgaacggcaaggcgaagttcaccgccatccagatcaacatggagcggatatcggcgccgatacggcgatataccaccagcaatgatgcaaacaggccaaataaggctccagaagccccataggctgccatctgccagccgatgcctcccggagccaccgcagcccacaccataagtcccagagagccgccaaggccggaaatcacatacagtcccaagaaccgccagtggccgatcattcgttccagcactgggcccacggaatacagggcgatcatgttgaacaggatatgcaatagcgagttcggcgcatgcaggaacatcgaggtgatgagcgtccacggctcagccaccagtctgaccggagccgccatgccgaggtacatcaaccaagccctcaggcccggggcaataaatcccagcaatacctccagtagccacactgccacgcacgcaccaatcagcgcccaggtcatcaccggaccaccgcgctcccactggtatcgaatctcccgttgtgtaggaatatgcatgcaatccactgtatcgaaggtctcggatgcgtttcacgcgccgcgaagatgctgagccgaccgagggcatgcgggcgtggatgaatcgcccacgaatgtcattccacccaatcgtcacaaacagcggcctagaatagggagcagagtcggtctgaatgggcataccgaccagacgatccctagggaaaggagccgtcatggagaacaagtcttctaacggttggaagttcttcgcgctgctgttcggcggattgctcgccgcgcttgttggcttgtacatctacaagcagcagaacccagattacgatccgtgggaggagccgtgggagaacagctcctcgccggtcgacctgggtctgaacaaggccgaggatgaggccgatggcgaggcggaagccgccccggccgaagcctgatagggcggtctttcaacgcaagaagccccgcaaccgatggatgtcggttgcggggcttcttatgttctggttcccctctccgaggggagccgccccaccgactcagtcagccagaggagcagtgtgccagatatgcggagccgttaagcgggaagcccggcgggcttcccgtaggcgacgccgagcggcgacagccgcgaggtagaaaccagcacgtagccggcgcgctgctccggcggccgtcaggccagaggagcagtgtgccagatacgttccaaatagtcttccatggagcggtcggagctgaagtagccggagttggccacgttgagcagggccttgcggttccattcgagctcgtcggcgtagagggcctcgatctcggactggatgtccatgtaggcggagaagtcggccagggtcatgaaccagtccttggtcagccagtcggccacgagcggggagtaggcgttgcggtcgccgttggagaaggtgccgtcggccaccagatcgatggcctgcttcaggcgcggatcggcctcgtagtaggaggcgggatcgtagccttcggcgtacttcttctcgacctcgtcgacggtcatgccgaacaggaagaagttctcggcgccgacgcgctcacggatctcgacgttcgcgccgtccagcgtacccacggtcagggcgccgttcagagcgaacttcatgttgccggtaccggaagcttccttgccggcctgggagatctgctcgtcaagctcggtggccgggatgaggttctgagccatctcgacgttgtagttcggcagcatgtggacggcgagcttgcccttgacggccggatcgctgctgatcacgcgggaaacgttgttgatcagctcgatggtcatcttggccaggtagtagcccggagcagccttggcaccgaagaacacggtgcgcggagtgatgtcctcggccttgaccttgccggacttgatgtcggcgtagttggagatcacggcgagaatcttcagagactggcgcttgtactcgtgcagacgcttgaccatggtgttgaacagggtgttctcgtcgatatcgatgccgtagtggtccttggcgaagcccacgaatgcgtgcttgttggccttcttgacggcggcgaacttcttgacgaactcatcgtccttggccagcggctcgaggcccttgagcagttccagatcggcgacccacttgtcggtgcccaggccctcggtgatgaggtcggacaggcgcgggttggcgagcttgacgaagcgacgcggggtcacgccgttggtcacgttggtgaacttgtccgggtagacgtcggagaagttcttgagggtgacgtccttgagcagctgggagtgcagctcggcaacgccgttgacgtgggagccgccgtaggtggccaggtaggccatgcgcacggcgtcgccggtgtagatggccatgtccttgatggtgtcggcggcaacgcccttggccttgagctcggcctcgaactgcgcgttgatcttctcgatgatctcaaggtgacgcggcagcagctcgccgatcaggctggccggccagacctcaagggcctccggcagcagggtgtggcaggtgtagttgaaggtcttggtggtgatggaccacgcggtatcccagtcgtagccgtactcatcgatgaggatgcgcatgagctcggggatgccgatcaccgggtgggtgtcgttgagctggaagacgatcttgttcgggaaggtcgtcaggtccggcttgtcctgccccgggtagaagacgcggatggcgtcgtgcagggatgcggagacgaagaagtactgctgctcgaggcgcagttccttaccgaccttggtggagtcttccgggtagagaatcttggagatgttctcggccttgacctgcggggccacggcgtccatgtactcggaacggttgaaggcgagcagatcgaactcgtcgtagctcttggcggtccacaggcgcagggtgttcacacgctgggacttgtagccgggaaccatgtagtccaccggcacggcgcgcacggaccaggccggttcccaggtcttggtgccgtcggcgttttcgacgaccttgccaccgaaggagaccttctgatcacggttgtagtcggtgtggccccacggctcttcgttggccagccagtagtccggggtttcgacctgcttgccgttctcgtcgaacttctgcttgaagatgccgtacttgtactggatgccgtagccgaaggccggcacgccgagggaggcgagggagtcgatgaagcaggcggccagacggccgaggccaccgttgccgaggcccggctcgtattcgacgtccacgatgtccttcggcttgaagccaagggcttccacagccttgtcgaactggtcggtcaggccagcgttcagcagtgcgttctccagctgcttacccatcaagaactcggcggacaggtagccgacggccttggtgttgccgttgacggtgtcggcctgggtcttgaaccaggagtcggcaaggtggttgcgcacggccttggatgcggcgacatacacgtcagcaggggtggcctgctcggcggtgacgttttgagtgtatttcagttgttcacgaatctcgtcggcgaattgttccgccgtgacaggagacttcggtgcggtgatttcggtcattctgactttccttccgggataagtgcccgtgtttattatgccgcgcgataggtatcgtcgcatagacgtaagcatgaactctccgtaacgacgatggcggagcgttcttgcatacgttctcattgagagcgtatcacatatctcacggttccgcatcctacagtatgccatcgtttgcataccttgcggtttcgcgtgccggtgccatgatggagcatatggcagtaattctcgaaaaagacttgaaacgagggcacgacgcactggtgcaatggcgtgccgcagccctggaactggccgacaacacaccacatcgcctgaccacctcccccgttctgccgcgcccggtgtgggcgatggctgtgcgctactcgctgttcctgctggagcggcgcgcgcccggccctggcgtggaggtgcgcgttgcgccgtggggtgcggtcaaaatcctggacggcccggaatcggacccgcacaacctcactccaccggacgtcatcgaactggagcccgaggtctggctacggctggcctgcggcatcaccacgtgggcagaggaaaaggacgccggccacatcagcgcggtcggagagcgcgacgatctgagcgacctgctgccgctgtaaatcgtcggatgcccggtatcggatgccctttatcagaactgtgcgatgctccaacgctggatgtgctcggcccagcggtccggcgtgggtagggtgatgaggctgcgcatcgtcagcgcgtaagcggcggcagctaccagcacggcggccagaatcaggcaggtcggaccgtagccgatggtctgcataccccagccggcgagtgccacggccacgccataggcaccgtactgcaacaccatgctgcccgctccaacgcggccgagcttgtccttgcccaccaaggtattgctgaggcctccaagcaccgcgttgcccgcgggcaatgccagtaccgagcaggccacaaatatggccttgccaaccatggagggcaccaacgcggcaccggtgaatcctacagccagcaagacgaacatcacgcccaccagtacgccgccgggcacacggttgaccagttgcgaggccatcagtgcgcccagcaacatgccaacggcggaggcggcgttgatgaatccggcggatatcagctggctgccaccttgggagatgtccagcgcggtcagcagtaggaaggcattgctggcaccggtcaccatggccgctgcgatgatgagatggcgttggaaccggtcgcgcagcagccagatcatgccgtccagtgcgtcgcgccagcgtggggcggagtcatcggcatcatcggcgtccgagacggccccgacctccgaaccggtatcaacattgcccggacggccgctatcgctcacagtcgcacgtttccaatagcggcggatacgccatgcggacaccatgcccagcacgctcagcaccgcgctggtcaggaacggcaccgcatgtcccacggtcatcagcagaccgcccaacggcccgcctgccagcgtgaccgtcgaatccctggcgtcgttcaacgccatcgcgtgaggcagctgctcatccggcaccacgccacgcagcatggcattcgacgtattctccaacagcccatcgcgcaccgaaaacagcacgacgatacacagcagcgcgatcggaagcacgtgggcatacggtccgccgaatgccggagcgtttgccccgttaaccccatggccgctcgtcttcggcgcattgccgaacagcatcaccgctgccgccgccaccgccgagagcaccacaccggacgcaccccagatcagcatgagcgtacggcgatcataccggtcctgaatcacgccgccggcaaggcccagcaccgtctgcaccaccacgcagatgctttccgtcgtggtggcggcggcagaggatcctgtcgtggcgagcatgatcagcggcaccgcgaacgcgatcaggctggcaccgaccgcgccggacgtgtccgcagccagccaccatccgtaatcagttccccgccataaatccgtatcacttgccatcgttgccctccctgggattggtccttatggacgccaccatagggagccgccgccgagccgaacacccgcaatcctcggttatggggacatggctgcggtcgtcgtcctcatttgtgaggacagggcacaatcagcgccggacgccggacatcgcagcttctgccccatcagccccgcacgcatggaatgcgcacgtaaatcatccacgtgccatcatccgaacgggcggtcaactcaccgcccaactcctgcacacgggtgcgatgcatggccagcccacgccccgaccgctcctgcgcggacaggccactctgcgcgtcggcatcgtcacggatatcgttggtctcgcgaatctcaatccattcgggagacagggtgacgaacagcaggtaggaatcatctcccgccggtgcatggcggcggatattcgtgccgatctccgtcatcagcgacagcgcctcggccgccgcctcggggtccacgaccatgacgatgccgttgaccgcggccgtcccccgatagccctgcgcctccagaaactcctcggtatcggtgatctgcgccttcacacgcgtgacgaaggattgcggcatgcccgctgtggattgcgtacggtcatcgccaccggcgttctcgggcacggcattgtcaaccacctcattcgcaatcgctggacagctcccggcacctaccgggtcacgagccagggcggattctttcgtcggcgaatcaacctgccctgattctgcagtcgccacctcagatgtcccggtgccaccgaccggcaaggactcgtcccggaagccggcgtccattccgctctgctcggtcagaaaatcgatgatgccatgcacttccgcaaaggcacgttggctgcgatccagcacgcgctgccagtcgccaccatcgatgccggctggcgcggccagattattccgggcgatggtcgagatatacgtcagatcgttggacagcgtgtcgtgcagttcgatcgcgagctggttgccgtggcgcagatcggccagcgccgattccatctgctcgttttcgttctcctgattcaccacgcgcttgcgccagcgcaacgcaatgcccagtaataccagcagcacgcttgccgtcaacgccgccgacgccgtgaccagccacgacccggtcaccgcatagacgatggccgccaccgcaagcacaccgatcgggccgaacatcgccagcggatgattgagttctatatcgatatcaatctgatgatgcttcttgccgtcggcgtgaccatacgaatacgacgaatgccgcggaatgataatcggacgtttcaccggcccgctccccttatgcgccttgcgcttcttctaccatgtccccacacacccatcggcgccttcatcagtgcaggttcatgcgaatccatgcgccgataagttccttgagattgccagcgccgagcttgtcggccgcacgcatcagatgcgtgcgcacggtggtttcggtgatggacagttcggcggcgatctgcggcatggtccggccgcgggaccacagttccgcaacctccatctcacgcgcgctcagccggttgtccttctcggccttgatgcgcgcggacgcaacggccgcggtctcgaaccgcacgtcgccaccatcgccccatattttgccggtctgcacctggcggatagccacggcctgcaatcgcacatcatcgttcttgctcatgatgccctgtacgccggcccgggccatctcctgggcatgtcggcccacaatcgaggcggtaatggccagtatcgccgtggtcgcgttttccctgcggattgcacgcaccacatccggaccattgatgtcgttcatcgcgatatcggccaatagcacagcaggcgggtgtttggtggccgtgcacagctgaatggctttgctgccttcgctcaccggcggcaacaattcgaagtctggcagggccttcgacaaaatcgactgtaatgccatcagggccatgcggtcgttgtccatgatgagcatggtgggccttggcccatcctgcccgctgatatccggcatatgcctacgtgcgctcagctcttcttgggcttgagcgcggaaggcatgggcatcggaatcggcttacggggagccggtttcggtacattgaccgccttcttgggtgccgatgcggggaattctccactggtcgccttggctgccgcttcggctgcccacttggcgtactcgtcgaggtcgtcctcctgcgcggcgggagctgcctcggcggcaccggaagcgtggtcgtcagcagcagaatccacatccttgtccgcatactgatcatcaatatcggcgaacgggtcaggagagcccgttcccggctcctgctcgctcagctcttttgccagctcatcgtaatcggtatcggtggtcaggtacttgagctttcgggcaattttctgctgttttgctttttgacgtccgcggcccatctgaccccctgcgattactgtgctgttcgattcatcaacaatagagagtaccactaatagtggcttgttcgttgtcggctcacacttttaccataaaaagcgtttatctgagccctatttaaaggattttcgcatgaccgacgagcagcaactgacagcggcaggcaatgagataagcgcgagcttcctcgcggccaaaaagcgttcggacgaaacgctcgccaagctggaggccaagccgtcgtccttcaccatgttgaccggcgaccgcccgaccggccggctgcacctcggccactacttcggctcgatccgtgagcgtgtcgccatgcaggagcgcggcgtcaacacgaacatcatcatcgccgactaccaggtgatcaccgaccgcgacaccaccgagcacatccaagacaacgtgctgaacctggtgctcgactacatggccgccggcatcgatccgaacaagaccatgatgttcacccactccgccgtgccggccgagaaccagctgctgctgccgttcctgtccctggtcaccgaggctgagctgcaccgcaacccgaccgtgaagtccgagatggaggcgtccggccacgcgctgaccggtctgctgctcacctacccggtgcatcaggcgtgcgacatcctcttctgcaaggccaatgtcgtgccgatcggcaaggacaacctgccgcacgtggaaatcacgcgcaccatcgcccgccgtttcaacgagcgttacgccaagaagaacccagtgttcccggagccggccgccattctgtctgaggcaccggagattccgggtctcgacggccgcaagatgagcaagtcgtacggcaactccatcatgctgggcgccaccgccgaggagaccgccaagcttatcaagaagagcccgaccgattccgagcgccgcatcaccttcgacccggttgcccgcccgcaggtctccgccctgctgaccaccgccggtctggtgaccggccgcgacccgaaggacatcgccgaggagatcggtgattccggtgccggcgcactcaaggcatacgtcatcgaatcagtcaacgagttcctggccccgcaccgcgagcgccgcgccgagctggccaaggacatggattccattcgtgacatcctgcacgacggcaacaagcgcgccaacgccatcgccgaggagaccctcgaccaggtgcgcgaggccatgggcatgaagtactgattttcccgccgctcgtagcaagacgccgtgtcagccccaactgggcaactgacacggcgttttttgcattgcggcgtctgctgtgtcctatcttcacttcgaggggcggatttcttgttttccggaggtctatctccgcttcgaggggctgttgctcaagtaggcgaggcacaaaaacggcggaatgacgttggcgtgaatgggattttatctgagattgagcgcatgaccagccccttgaaacggagatagacctccggaacggctcaaatccgccccttgaaacggagaatcaagcgttagtaactctcaattcaaaaaacacaacatgttttccgtgcaacgcggctatcaagacggacctctggtcacttcatgccgatggcttgcatcaatacgtacgctccccgcacagcaatgtcattacgacgtgttgcggcatagcgcgcatggcttccggagtatcggcggcgtatgggtcggcgtccaacaacaccatatcggccgggtcgccggatgcaaggcggtcacggccagtggcggtcgaggctgccagcgaggtgcgcacatcgaggcactgctcgggctggaacggctcgcggtcagagctttcggagccgaacacggcggcggaaatggccagccacgggtccagcggggccacgggcgcatccgagcccatgcgcagcgtggtaccggcgtcgtggagggccctgaacggataagggataccggccgggttggcccagaaacgggtgatgacgtcgcggtcatccatggcgtgctgcggctggatgctggccgcgagccccagctcggcgaaacgcgggatatcgacgggtttgagcatctgtgcgtgctcgatcgatccatgtgcgtgcgtggcggcgactgcgttgagcgcaatggtgttcgcttcgtcgccaatagcgtggcaggcgatgtcgaagccatgctcggtggctaggcgcatatagtcttcgatttgctgcggcgtgtagctcagcgtgccatacgtcggcggctcgatgcccgaatacggcgtggagcagtaggcggagcgggtgttgagcgatccgtccgagatgagcttcatggcgcccacatggccgagcccggcgctgcccggcagtgggttgccggtatgccaacccgcgtcaatggcggcttgcaaccgctcggggtatacaccagcgtccacgcgcaaaccgttaatgccggccgcgaaacgattggtccatgtatcgatgttttcggccatttcataatcgcggatgcccaccacgcccttgcttgcggcgtcctgttcggcctcgcgcaacagacggtcagtctcttcagcagcgcccggcaccttgtcgaaggcggtgtaggcgttgaaccattcgagttcaccgaccagaccggatccgtccacatgtacgccaagcctgcgggccgcggcggagttcacccatccgcagtgcatgtccgcgctggagagggccaccggctgttcgccggtcacggcgtcaattgcagccagtgtgggctgctcgtcgtcggcccacagcgagtgacggaatcgcatgcccaccacgaaggcatccgggtcaagcgtgccggcggcgcggcgctcatccagatgacggcgcaacatgtccatcgcttcggcggcggaacgggcattgatgaggtccagtcggcccagcgtcttagcccattgcgtgaagtgcgtgtggcagtcccacaggccgggaataacccacaggccgtcggcgtcgatggtggtttcgtcagcaggtgcggaggccgacgttgggattgagacgctgccagaagcaatggcattcgtcgcgtatgccaacgatgtcgtatgcgccttagtctgcatcgtgccgtccgaagccgagaccgttccagcagggccgacagacgcaacacccccatcgcgaagcaccacatccacgcggtcctgagaccccggaacaccggcattgacaatacgcaccaagctactcatacccgccatcatgccacctttgcatgaacgccatggagattcgttcaagctgaatcgcgccgtcggcggcgattcccgctggctgcctgcaaacccctacgttccatgtaattgcgggatggcctgcaactgcgatgaacacccatagtttatccaccgacttatccacatttatccaccgaaaaattggggcggtagacaaggccggtagccggactctacactgcgaggacaaagcgaacatcacgaaggggtgatcatcatgggtagctcaacggcattgaccgagctgacaatgcagaagtatcaacgaatgcagacgtgcgcagatgttcaacgacgaagcgcatggcgcccaccttatgccctgacaacagcgttggagcttttgtcaattgaagtaccccgcatatcaagcaaacacagaggccttgcaactacaaccattgttgcggttccacacgccaatgacaaacggcacattgtgggggtcaaagtggttgtatggcctttcccactagacacggtcataatcgagggacaattcacatgcacttcaccagcttgcacatgggccatgttctccgcgtatctcgaacttgaagaactcatcgttctcgctgattccatgatgcgacgagatcgaaggctctgcagaacaaccatcgacgccctttctctgtatctcgatgaggccgaggcccaggtgcgagccgacaaagagaatggcaccaattcgtatttgttccgcgggtataacaaatgccgtcgcgccctgcttttggcgcgcgcgggcacagattcctccatggaaacacgaactcgtttggttctcttgaaatacggtctggattgcccgcaggtgaattatccaatattcgtaggaaacaacaccagacccatatatctcgatcttgcataccctgaattcaaggtatgcatcgaatacgaaggctctcatcatgccgggcaatggctgaatgacgcgagacgccgccagatgatcgaagacgctggctggaagtacattcaagtcaccaaattagatattggcgacgaagcgggagaagaggcccttgcccgaagagttgccgagaggatacaggaggttacgggcaaaacggtccagctcacgatgcggcaaaccacccagcaaattagcgatgtccgaaagctacgccgtattccgctgtacaaacggctgaaattcgagcctctgctgccgattattccgacgacgcaggaataataagcccggtagagtcagtccgcaccgtccgcaccgcgctacggtattcaaaacccatttcaaggggctgatttggcctccgccggaggtctacttccgtttcaaggggctgatcatccgctagatcacgtgtatcaatgcccttacgccaacgccattccgccgttttggagccgcgtctactcaggcatcagccccttgaaacggaagtagacctctccagaacgtcaaatcagcccctcgaagtccgttttggcctcaatggttcctgccgaaccacaaaaagccactcctctaccatacgagccgaccgcacagcaggcacgtgtcatttgccgctgcggacctcggactccatggcttccatgggctcgtcgacgagcacggtgccggacggcagggtgccgggcagcggatcgtccatgtagtggtcgaattcgtagagcatacgctcgttcggcttggcggtcagcaacgaaaccaccacgatgaacagcagcgaaatgatgaacgccggcagcagctcatagatggcgaatacgccacccaagggcttgacgaggttgtgccagatcagcacggccgccgtgccggacagcatgccggccacggcgccggccttgttggcgcgacgccagtatagcgagcacagcatcaacgggccgaatgaggcgccaagcccggcccacgcgtaggacaccacctggaagatcgacgagttctggtcgtatgccaccagaatgccgaacaggaacatgaccaccagcgtgaccctggccacgatcatgacctgcttgtcggtggccttgcggtgcagcagcccgcggaagatgttctcgcccatggccgaagcgccgatgatcagatacgaggagctggagctcatcgaggccgcgaaaatgccggagaccaccacgccgcacatgaagctcggcagcagggtctgcgccagcacgatgaaaatggtttccgcatcggtggaggtcagcagttcggtgggcatcatcgcgcgccccaccaagccgatgcacaccgcgcaacccagcgaaatcacgcaccaggaggtggcgatgattcgggacttgcgcacttcttccacgctgcggatggacaggaagcgcaccagcacctgcggcataccgaagtaacccaggccccacgccagcatggagatgatggtgatgatgccgtagtcggagggcgcgccgaacacggccttgcccgcctcgacgagctgctggccggtggccgggtccagcttgggcgcggccacctgcgtgccggacaggtagccggggatggcacgcaggaattccacggtgttgtcgatgccgcccgcgctggccacagtgccgatgaacaccaccgcgagcgcgaagaacatgagcatgccttgaatgaagtcggtcatcaccacggacaagtagccgcccaccacggtgtagacgaacacgaccaccgcgccgatgatcatcatgacgtggtagtcgaaaccgaacaacgtggcgaacagcttgcccacggtcacgaagcagctgcccacgtacacgctgaagaacaccaggatgatcacggccgcgatggtggagaccacgcccttcttgtcatggaaacgcttggcgaagaagtcaggaatggtgatggcatcgccggccactaccgagtagcggcgcagtcgccgggccacaagcttccagttgagataggtgccgagcgccagcccgatggcggtccacatcgggtcggccgcaccagtgaagtaggccaggcccggcaggcccatcagcagccatccgctcatgtcggaggcttcggcgctcagggccgtgagccacggccccacgccgcgcccgcccgcaaagtattccttggaagaggagttggagcgtttggagtagatgaatccgatggacagcatggccgcaaaatagatgaccatggccagcagaatccagaaatcgttggccaactgcgacacctccccaatcatgacgccaagcggctaccgccatggcagaactatgtgctgatatgcgtgctgatatgcgattgacgccggagcggcgtcatacagaccgtcacagccgtgaatacggccgcaacgcacttcgcctgatggtagtggatacaagggctcaagcaccttccaccgtttccatactgagacgctgttttatccgagctccccacctgaggggagccaagatgacggtcagatgtcgtagcgccaggacttgtcggtcaccacgcgggccatcgccaaaccgatcggcagacagataatcaccatgaacgcacggaacgcccagtccagcgcattcatggtctggaagctgccgaggtaccacatggcacggtacatatacagaccgggcaccatgatcacgatcgacggcacggtcaggcagatgcgcgggtagccgaggtgcggcggtagccagccacgtcgcacggatgaacgccacgccgatgccagaatgcccgccagaaacgcgccgatgaaggtagccatctcaggagccatgccgaagtcctgcaattccagacgcagcgtgtccgtgatcgcaccgatcagggcggcggccaggcacatgcgctgcggcgaattgaacagcacggagaagccccacacgccgacgaacgccgccacgaaccgcagcaatccgttgacccacgggtcaagccccagcggttcaaagccttccgggtgcaggtgcaccatcacggccacggcccagcctgccagcgtggccatcaggatgatgcacagcacgtacgccacgcgctggatgcccgaggggaagtcgattttcgccatgtcgagtccgccggtgatgagcgggaaaccggggatcacgaacagcatggcgccgatgtaggccgtatcgtgcgagagcgcgactgggtcgaaaatgccgatgagtcgcagggtgccggtgcaggcgagcgccgccgcggccacgcacacaaaggtgacgaagaactggttcagatggtgtgcaaacagccggcgacgcatccactggccaaggccagcgcccacgaacgcaccgatcatgtcgtatgggccgccgccgagcaggaacacgaaggccgcgcaggccagggcggaggccagaccggagaaccacggcttgtacagcggcttgcggcgctcaatcagatcgagtcgctcgtgcgcctgccgcacggtgataccgcccttggccttctcttcgtcggagcgctcgttgaagtgttcggcgtattccttgggcacgcgattcttgcgcttcgtactgcttgcagcagggctttcggcggttgcgccgttcgccgccgcgccctcagcgcccgcctcggcattcgccgcgttcgccgattcaaccgactcattggagtcaccggtaaacacttcggcatcgtcgtaggccttctcttcggccgctttgtcttcgaccgaagtgacttccgcgctgtccgccaaaagtcggtgggcttcttcattgtcatcatccaaggacttggccacggaggtcacgagtaccttggttttcaacgcaagatccagcgcctcgtccacgctgccgttggccgcctcagcctcggccttggcacgttcgcgcaggcgcttggccagatcagcagaatactgcgaagcgtcacgttcgtccaaatgcttgaccacgccatcggacagttgcgaatcgacgtgatacatcgaccccttgccgagattcacggagaaccagtcggcgaaatgttccagcagccagatacgttcggtgttcacgccggtggtcggcaaatccacgacttcggtgatgcggttacgaccatccgtgcaggtggcctcgatatccgtcaggttcacgtcggcgcgtacgtgcacgcccagcgggtaggcgatgcggtgcatcatttcacgcacgcggaaggagccggtgccggctcccaggtccagcatgccgacccgtacaatcacgctggctttggcggcgataccggcgtccaccaccggtttttcccaatcgcgcgcaatatcttccatgtccagcggaatggagtgggtgtggaatttacgtacagccgttgcgcctttcgcttcgggcgcactttttttcttctgttcgctcacatccctcattactactccctgcctcccccgccagcaatcgtaaggtgctcaaatcttccgcgaatcggacagtgtctcatatgctgtccgatattcggtctctataggtggacaacttggcgcactatatggactccgtaacgcaaatagcgatttcgcggggatacactattgcccacacaacaaccacgttgaatatgggctgtgggctcgcaacgactggcctcaacaactgcggaggagccgcagacgaccggtagaccgagcaacctgttattcggcaaaggaggttatatggcaacacctgaagaacagatcactcccgctgacgccgccatcgtcactaccgggaccggccgaaagggcccggaggagcatgatcttcccgaaagcctgaagtacgacatggatctgtgtcttgagatcctgcgtaacgtactgggcgaatacaaccccgaactgctgtctacgttcgacaccgtgcgtcattacgcggtggaggccagcgccgagcatttcgccgagctgaaggatccgaaccccgaccaggatggcctgaaggaggccgtgaacgtcatcgacaacatgacgctgcacgacgcccagctgctggcccgcgcattcgccacgtatttccatctggcaaacctgtccgaggagaactaccgtgtttccgtgctccacgagcgcgagaacaacgtgtccgttgaccaggcggtcgacccgatcaacgagctcaccgtcgcctaccaccagctcatcaatgagactggcccggccaaggccaaggaactgctcaaccagctcgaattccaccccgtcttcacggcgcaccccactgaggcccgtcgtaaggccgtggaaggcaagatccgccgcgtttccgaattgcttgaggagtacaagcgcctcggcggctcggataagaaggaatgcctgcgccgtctctacaacgagatcgacgccctgttccgcacctctccgatcgcgctgaagaagccgaccccggttgaggaagcggacacgattctcgacatcttcgacaacacgctgttcaacaccatccccaaggtctaccgtcgcttcgacgactgggtcctgggcgataaggccggtctcgtcgagcccgcttgccccgcgttcttccacccgggcagctggatcggctccgaccgcgacggtaacccgaacgtcaccgccaaggtgagccgcgccgtggcccgcaagttctccgatcacgtaatcgccgcccttgaggaagccacccgcaccgtgggccgcaacctcacgatggaagccgagaccacgccgccgagcgccgagctcaagagcctctggagccaccagaaggaaatgagcgagcgtctgaccgacaaggccgccctgatctccaccaaggagatgcaccgcgcggtcatgctggtgatggccgaccgtctgcactacaccatcgagcgcgatgccgacctcatgtaccactcctgcgacgacttcctcgccgacctcaaggtggtccagcgttcgctggccgccgccggggccaagcgttccgcttacggcccgctgcaggatctgatctggcagaccgagaccttcggcttccacatggtggagatggagttccgtcagcactccgtggtgcacgcccgcgcccttgcggatatccgcgagcacggcctgcacggcgagcgcggcgaactgcagccgatgacgcacgaggtgctcgacaccttccgcgccctcggtgccatccagaagcgcaacggcctcaaggccgcccgccgctacatcatctccttcaccaagagcgcccagaacatcaaggatgtctacgagctcaaccgcttggccttctcccacccggaggacgtgcccaccatcgacgtgatcccgctgttcgagcagcttgaggatctgcagaactcggtggacgtgctcgaggaaatgatcaagatccccgaggttcaggctcgtctgaaggccaccggcaacaagctcgaggtcatgctcggttactccgactcctcgaaggacgccggcccgacctccgccacgctggccctgcactccgctcaggagcgcatcgccaaatgggctgagtcgcacgacatcgacctgaccctgttccatggccgcggcggtgccgtcggtcgtggtggcggccccgccaaccgcgcggtgctcgcccagccggtcggttccgtcaagtgccgcttcaagctcaccgagcagggcgaggtcatcttcgcccgttacggcaacccggtgctggccatccgccacgtcgaatccgtggctgcggcgaccttgctgcagtccgcgccgagtgtggagaagcgcaacaccgagatgaccgagaagtatgccgacatggccgctcagctcgacgaggccgcgcacaaccgcttcctcgacctgttgaacaccgacggctttgccccgtggttctcgatcgttacgccgctgaccgaaatcggcctgctgccgatcggctcccgcccggccaagcgtggcctcggcgccaagtcgctcgacgacctgcgcacgattccgtggatcttctcctgggcccaggcccgcatcaacctggccgcttggtacggtctcggcactgcatgcgagaagttcggcgatctggagaccatgcgtcaggcttacgaggaatggccgctgttctccaccttcatcgacaacatcgagatgtccatcgccaagacggatgagcgcatcgccaggatgtacctcgccctcggcgaccgcgaggacctcaatgagaaggtgctcaacgagatggagctcacccgcaagtgggttctggccatcgtgggcgacaagtggccgttgcagcaccgccacgtgctcggccaggccatccgcatccgctccccatacgtggacgcgctgtccgtcacccaggtgctggcgctcaagtcgctgcgcaagaaggtggacaaggaagagctctcgcaaagccaacaggcaggattcatctacctcatcctgtgcaccgtctccggcgtcgccgcgggc

SEQ ID NO: 2609 - DNA, 14422 bp, Unknown
  R222_15m  MAG No. k141_17756
acatgcccaccgtgccgattcccgcacgcaaggctgccacgacgttcgacaccccctccaagcgtgagcgcatcgaggtcaagccgccgatcacccgattcatacgtcgtgccatcacccgcgtgttcggcgtatggtcacacatctccactcaggtggtgcgccaatggggctggtatccgcgagtggaaccctatgtgggttatggcaccggcgattactcgcgcctgatctgccgcacggtatacgcccccaagcatgcgcaatccggcgaactgatccgcggcatccgcggcatgcttgccgtatccgcgccgcgcacccacgtgcaggccagcattgatgacacgccgctcaacaccgtgcagatcggcgtctccgaggtctatgacaaggtggaccgcacgcgcgatctcggcagcgaatacgccatctccgattccgccggatacctcgacctcgtggccgagcatcgtctggtgcccggtatccatcgcgtctcctacagcgtggccaaccgcaaacccgtgagcgccaacctgtacaccatccccgccagtgccaaagtcggcatcatctccgatgtggacgacaccatcatgatcacacaggccccggtgccatggaaggccgcgtacaacctgctgttcctcgaccccaagaagaaagcctccgtgccgggcatgagcgtgctgttcacccgcatcgccgacttgttccccggcgcaccgttcttctatctttcgacatcgccctggaatgtggagagttcgatccgcaacttcatcactgaccatggttttcccgaaggcccgctgctgctgcgcgacctcgacccgaggcccaagaccttcgtgcccaccggcccccagcacaaacttgagtttgccgaacaacttatggccgacttcccggacatgaagttcattctggtgggcgatgacgggcagaaggacccgaccacgtacgccaccatcgcccgcagatataccggacgtgtactggcgatcgtcattcgtgagttgagcccgcgcgaatcaaccggattggcgtcggtgacgggactcacctcgacccagccgactccggtaaccgatgtaccagtattcaccggcaccaccggctcgaacattctgaagaccatgctgccgtatctgaagacggtgttgcgataagcgcggcgtgatgaacgccgaatgcgtcccggtgtggtgcctcgcctataatcgcgtggtatgactgacgagagcacaaacgccgcggccgcgatgccgccttatgccaagcgcgagccgaagcgccgcgaattccacggtgacgttttcgaagacgattacgagtggatgcgagacaaagactccgatgatgtgcgcagctacgtagctgccgaaaaccagtactgcgagcgtcgcatggcgcatctggcggatttccggcatacgttgtttgaagagctgaaatcgcatgtggaagagaccgatatgtcggttcccacgcgcgtcaatgattactggtacttcacccgcacgcagcagggcaaacagtatggcgtgcaatgccgcatccccgtgcgcgatgccgatgactgggacccgccggtcgtggatccgcaaggcgcgcccggctccatgcccggtgaacaggtcgtttttgatgcgaacaaggaatccgaggggcatgacttcttccggctcggcggcttggatctgagcaaggacggccgttggatgctgtacggcgtggatgttgcgggagacgaacgatatgatttccgcattcgcgaccttgccgggctggagaccggggagccggtcagcgaactgcccgaacagttcaccggcattggcagcgcatgcttcacgccggacggccaatgggtgttctgggtggaattggacgattcctggcggccgctcgccgtgtggcggcatcgtgttggcacggcggtcgaatcggatgtgtgcgtgtaccgagaaaccgatgaacggttctgggtgggcgtcggcatcagttttgatgagcgcaatatcgtgatcggcaccggttccaaaaccaccaccgaagtgctgatgctgccggtggccacgcctgaaggcgaattccaagccttcattccacgtcagaacgatattgaatatgatgtgagctttgcctgttttgaaggcgcgggggagaacggtgcggatgtgccactcgccgtggtctaccacaacgccgccaatccgaatttcgaaatcgacgtcattgacatgcgtggccatgagccgccgtaccgactcggcgaaggcgtgtgcatcgccgccgggtcgccgtacggctgtgaacatggtgagccggataagccgattaccgaggcatacttcaacgccgccaatccggcgatattgcagggtgcccacggtctgggcatcgaaggcatcgcgttgcatcgcaactttgtgtccctgagctaccgtgccgacggccagccgcacgtggcatacatgaccaagagcgcggctgccgccgacttcctggccggacggccgtggcggtttacggaactgctgccgcctgccctggaggacgactgggacatggttgccgccgatcgcgaaggcttcaccggcgatcatggcgagatcttgtggaccgaagatgaggcccccacggatcacacgtcatcttccgatggtgccagcgacgaccacctgcccggtgagacccggcgcttgtacaccatcggcgtcggcggcaacccatcgtatgaggcgccgcgcatgcgctactcgttcgccagctacacccgcccgggcgagctgcacgaaatcgatcccgccaccggcgaagatgcgctgctgaaacgagccaccgtgctgggcgacttcaatccacgcgattacatggaacgccgtgtgtggattaccgcgcgcgacggcgaacgcattcctgtttccctcgtctggcaccgcgattgcccggcgcaggattcgccgatgttcattaccggatatggtgcatacgagatttcctccgatccggggttctcggtctctcgtctgagcatgttggatcgcggtgtgctgtacgccgtgccgcacattcgtggcggcggcgaaatgggacgcgcctggtatgaacaggggcgcaggctgaacaagaagcattcctttgaggacttcgtggacgccacgcgcgcgctgcagaaggcgcatttggctgatgcttggcgcaccgtggccaacggcggatccgctggcggcctgctgatgggcgcgattgccaatatggcacccgaatgctacgccggtgttgaggcggatgtgccgttcgtggacgcgttgacctccattcttgacccggacttgccgttgaccgtcaccgaatgggacgaatggggagacccgttgcatgaccctgaggtgtatcagtacatgaagtcgtacacgccatacgagaatgtgccggtcaccgtgctcgagggcggcgacgacgaggctgccggtgacggcagtgctgatggggctgccgccggcgcggtcgccgccgcgcaattcccgagaatcttcatcaccacctcgatgaacgacacccgcgtgctgtacgtcgagccgctcaaatggctggcccgtctgcagtccgccggcgtggacgcggtggctaagatcgaggtcgaggccggtcacggcggtctatccgggcgttacaaacaatgggaagaggtttcctatgagaacgcttggtgcatggatgtgatggggctcgctcattaggtcattctgtcgttcattaggtcggtgtcctcttctatgtgagactgaaatgccgccatttcagtccctgaaatgaacccacgccgacctaatgaacactaaaatgacctaatgaatgtctcgacacgatacgcatgttggttgtgtccactagctgagcgggttcgggccggcaggtggtcgcgcgagtaggctccttgaactatggcaaagacatataaaatcgccgttattcccggcgacggtattggcaaggaagtcactccgtgggctcagaaggctttggaaaaggccgctgaaggcgtagctgacttcgagtatgagaacttcgacttgggtgccgagcgttatctgcgcgatggtgcgatcctgcccgaggacgaagaggagcgcatcaaggccaacgacgcgattctgctcggcgccgtgggcgatccgcgcatcaaggccggcattctggaacgcggcctgctgctgaagctgcgcttcgacctcgaccagtacgtgaacctgcgcccctccaagctgtacaagggcgtcacctcgccgctcgccaaccccggcgacatcgacttcgtggtggtgcgtgaaggcaccgaaggtctgtactgcggcgccggcggcgcggtgcgccgcaacaccccgcaggaggtggccaccgaggtgtccatcaacaccgcatacggtgtggagcgtgtggtgcgttacgccttcaagctcgctatgaagcgcaagaagcacgtcaccctggtgcacaagaagaacgtgctcgtcaacgccggtgatatgtggcaacgcatcgtcgacaaggtcggcgaggaataccctgaggtcacccacgactaccagcacatcgatgcggccaccatcttcctggtctccgacccgagccgtttcgatgtgattctcacagacaacctcttcggcgacattctgaccgatgaggccggctccgtggtgggcggcgtgggctactccgcctccggctgcatcaacgcctccgacgagttcccgtccatgttcgagccgattcacggttccgctccggacatcgccggtcagaacaaggccaacccgaccgccgccatcctctccgccgccatgctgctcgagcatctcggctttgatgatgcggccaagaagatccataccgccgtcgaagcggacatcgaggagctcggctccaccgtgcgctccaccgaccaggtcggcaaggacattctggcccgcatgtgatgtcccacttggctcccctccagaggggagccaagtttatactgagttgcatgcaaatgcgacatggggaatgcaaaaccgttggcggcaaactagtcgccgtgaccgtatccgtcgatgatgacggcaccgcacagtcatgccatatcagcggtgatttctttattgaatcagtttcggatgccgaatctcatgctttgttgcgtgacttggaacaggctctaattagtgatgattcattgcggtccgtattggacgctcaccctagttgccaaattatcggcacagatgaagttgccatcaaaaccgcatatagccgagccgtaagcagcaacttgcccccgctggtgggggctcccgcgcagcgggtgggggtggtcagccccgatgcgccgaacaccccggcatccatcaatacacaaaccaagcagcccgacaaaagctctgaataccgggagcgctggaacgccctcagacctcaactcaccgtgatccacgaccatccgcgtactccggacgagcaaatggccattgacgagacctgggcgcgtgaagtcgcagcaggaacacgacagccgaccatacggttctgggagtgggcgggcccggctgtggtcatcggccgtttccaatcggcccaggacgaggtgaatctggacattgccgagcagctcggtttcgacgtggtgcgccgttgcacgggtggtggcgcgatgtttatcgaaccgggcaacaccattacctattctctgtatgcaccgctcgatttcgttcagggcgtaagcatcgaagaatcctaccggctctgtgactggtggctggtcgaagcgctgcgcgaacttggcttggatgtgcggttcgcgggcctcaatgatatcgcctcgcagtacggcaagatcgggggagcggcgcaacggcgcttccccgtaggctcaggcggcgcggtgctgcaccatgtgaccatggcatatgacatcgatgcggccaagatgagccgtgtgctcaacaccagtcgcgagaagatgtcagacaaagcggtgaaatcagcagtcaaacgtgtggacccgatgaaaagccagacgggtctcagccgcgaacacatcgtcgaacaccttattgactggtttgcggcgtgatttcaccgatggccgtatacgattttgccggtggccgtgcgtggttttgtcatgggcgagcgcggtaaccgtgacagtgccgttttttgcggtaacacattcgtcagcatgtcgtacggctatcggatcgcgccacacatgaagtgacgaatgatggcatgcttctgacgaaacctgtggggcgcgttacaatatgacggatggccgacgacggtcgtaggacaataaggatggtgcgatgagcttggaaacgccaaacgcttttgctgacgaggagaacatcctgctgcatacggcattgttcaagcaggtatcgccagccgaagccgaggagctgctgccgcatttgaagcgtgcgaccttcgataagggcgactatatcttctccgaaggcgataccgatcagcgcatgtatctactggagcaggggcgcgtcaagctgattcgcacttcttccgatgaccgcgtgcagctgctgtccatccacgcgccgggcgaagtgcttggcgagattccggtattcgaccctcatggtggcccgcgcactgcgtccgcggtgtccatgagccatggcacgcgcgtggtctggctggagcatgatgccctgttcgcatggcttgatgagcatccgcgtgtggccatcgacatgttgcaggtcatggccaaccgccagcgcggcaacaacgaacgcatctccgacttggtattcatggatgtgccggcgcgtctggccaagacattgctcaacttgggctcacgtttcggcgagccggtggaacagggcctcaaagtgccgcatgacctgactcaggaagagctggcccaactggtgggctccagtcgtgagaccgtgaacaaggcgttgatggacttttccaaccgcggatggatcgcacgtgacggtcgatcgatcatcatcttccagccaggcatgctgattcgacgctcgcggcgctgaccgttcggctgacttccagccaatgttacgctagtgcggttcttgtgatgatatgttcacgggagctgaccgcgagcccggttggtagggcaccccatttagaatggggctcatgcccaaaaagaagtccctcactctccaacgtgtgcttgttctcctcttggcctatatcatgcttgccgtctgcggtggcgtggcggccagcgtgttgtttgtaccgggtgtggtcggtgccaataaagccgccaaagcggtgattccgtcgctcaaggtagaaaacgtggacttcgacgtgaccggtctgccccagaagtcgacgatgtacgcgcgagacggttccaccgttatcgcgacgttctacaaccaaaaccgtatcgtcgtgccgctgaagaagatttccaaaaccatgcagcaggcagtggtggcgcgcgaggaccgtcgattctggactcacgccggcgtcgacgtgcaaggcgtgatgcgtgcgttcgtgcagacctacctcgtcaaaggctcccagcagggtggttcgtcgctgacccagcagtacgtcaagaacgtgctgctcatgcaggcgatcgaggacgacgacccgatcgcccagtaccatgccaccgaagacaccgtcgcccgtaagattcgcgagatgctgatctccgtgcagatggagaagaagtattccaaggccgagattctgcagggctatctgaacatcgcccagttcggcaacaacctgtatggcgtggaaaccgcagcccagcgctacttcagcgtgtccgccgccgacctgaacgtggtgcagtccgccaccatcgcggctatcaccaagaacccgagccagtacgatccgctggtcgaggagaaccagaaggaaagcgagaaccagcgcaatatcgtgctcaagctgatgctgcaggaggggtacatcacccagaagcagtacaccgaagccgtgaacacgccgctgaaggacacgctgaaggtgcaggccgtgaacgtcggctgccaggacaccggcgactacgcatacttctgtgatttcgtggtgcatcgcatccagaactccgaagaattcggcaagactcgtgcggagcgtaacaagctgctgcaggagggtggcctgaagatcgtcaccacgttggatgtggaagcgaattccacgatgatggagaccgcgcgtaataccattccaccggacgatcccagcggcatggagatcgccatggccgcggtcaaaccggggaccggcgaggtgctgggctttggcctgaatcgttactatgacgccactccggcagccgcgaacgatccgaccaagtcgggccagaactacgccgtcgatctggtggacggcggcggctccggttggaccatcggctcgacctggaagcccatcaacctcatcgcgtggatggaggcgggccattcgatcaacgacaacctgcagaccaccacgacgtaccccacgaccgacttcgcctgtgacaactacaagggcggcgccgattcgtggaacgtgtcgaacgccatgggcgccggcacggtgaacccggaaagcccgttcctcggtctggtgcgatcgcacaacaccacccaggcctccatgggcgccatcctcaaactgtgcaaggtggcggacaccgcgaccgaactgggataccatgacgccgccaccggcgagaccatcgacaagaccccggtgtacacgccgtccatgatgatcggctcggtgaacgtgtccccgctgaccatggcgagcatcttcgccgtatacgcctcgaacggcgtgcagtgcaacccgatcgccatcaacaaggtgaccggcagggacggcaaggagttcaaggtcccgtccgcgaactgccatcaggcggtggataaggacatcatccaaacactcgcttataccctgaaccaaggtacggtgcggccggatggtgccggttggtcattcagattggctgacgggcgtaagccgtttggtaagaccggtaccagtgaggatctcgcggtgtccggtggatcgttcattcctaatcagatcgcggcgttcgctgtggtcggcgacgcacagaacccgtacaccaaccgtatttccaacattgccatcaacggccggtacaacagctattgggatggttcgacaatcgcaggtccggccgttaccaacttcttcaatagctacatttccaagaagaaaataccgattgacaacgattatggccagcccgtctcgaagtacaccacgactggcaagtacctgggcattggcggacgaacgttcagcgtgccgcagaccactacgaatggcaacagccaatcgcagacgaccaccaatggtcaatcccagtcgcagtctcagtcgcagaacactgggcaaaacaacacccaaacccagggcaccaattcagagcggtcgaatgatggccagtgattggtgattggcgtttgacatttggtgattgcaggccggctgagtctacgtaacatagtcgactgcgatacccaaattacgtagtttgcgggcgttacctgtttcaggtgacgcccgttttacaatacttaatgacaacgccagcgcgttcatcgaatattcgccatgaacgcgcattggaaaggggaacgatgagcaacgacgatctgacgcatgagaattttgattttcgtggattcgacgtgccggatctcaaagcggtgacgctggcttcgtcttcggacggcgaacagtccaagcagccgaagaccaagcacgaggatgcatcgaggaaccgtaggcacggtaagaagaagtcaaaatccgacgcacggtccaagaagcgggccggcgcgggcaagacgagcgaatcgtttgatgattatgaggattatgaggaaagggaagctgtgagcaaggcagataagaaagccagcaaggaccgtccgggactgtttgcgccaatgacgctgcgcgaagtgaccgtgcgtaatcgtatttggttgccgccgatgtgcacgtattcgtcgttcgcctgcgatggtaggcccacgccgttccactaccagcattacgtgtctcgtgcgttcggcggattcggcatggtgatcgtcgaatccaccgccgtggctcctgaagggcgtatcacgccgtgcgatctgggcctgtgggaagacgggcagattgatgcttggcgctggatcgtggacggtattcgcgaggcgggtgcggtgcctgccatccagctcaaccatgcggggcgtaaggcttcgaccggttgcttcgccgttggttacgacggtcagagtgtgccggaggaggcgggcggctggcccaccatggcaccgtctgaaatcgcgttcggcgggctgcgtacgccgcgcgcgctgtccgtggatgagattcatggtctggtcggtgcgttcgccgcggcggcgggccgtgcggtggccgccggcttccaggctattcagattcatgctgcgcatggctatctgatttctcagttccttgacccgctgagcaatgagcgtgatgacgaatatggtggcgatttgaccggtcgctctcgtttcctggtcgaggttgtggatgccgtgcgcggggccgtccccgagggcgtgccggttctggtgcgcatttcggccacggattgggccgctggcggttgggatttggatcagaccattgcactatccaaggtgctgaaggagcatggcgtcgatgtgatggacgtgtccactggcggcatcatgtcgggagtgtcgattccggtcaagccgaactatcaggtgccgttcgccgagcaggtcaagtccaaggccgatattccggtgaccgcggtgggtcttatcaccaagccgaagcaggcggccaagattttggcccgtggcgaagccgatgccgtggaaattggccgcgccgcattgcgcgatccgtactggccgttgcgtgcggccaacaagctgggcataccgtccacagaggtcccctacgccccgcaatacgtggccggtgcgtactgaatcctcatggggcggtgactttcccatggggcggtaaaaccctcatggggcggtaaaaccctcatggggcggtaacccaaaacggcggtattctgcggaatgtgaaatttggctaaccgccccatgggacaatcaccgccccatgagggttttaccgccccatgggtaatagggcaatatgtgggttcactccacgtccacgccgacggcgtcggagacgtgctcgaatccgtcgcggcgcagcagctgggccagaccgcgcttcaacacggtgatctgctgcgggcctcggtacatcagcgagctgatgaacatgaccaggctggagccggaacgaatcttcgcataggcttgctcgggggtaaagacgccaccgatgccggcgatggcgaaccggtcgccatactccttatacaccttgcgaatcagctcggtgctggcgttggtgcacgggccgccggacaggccgccctcccaatcgcgcggaatctcgaggccggtgcggtccttctgcagattggcgatggacagcccctgcacattgtgctcggccagcacatcgagcagctccttgtactcgccccacggcttgttcaacggcatcttgaccagcgtgggctgcgggcggtcgatcttgtcgagcgccgtaaacagacggtcgagcgcttccggagtcgcggtgaacggttcgccgacgcgcgtgttcgggcaggagacgttgacctccaccatcgcggtgcggccggcggcgcggcgcatcgaaatgcagtaatcctcaatgccttcgtccaaatcgccgcactggtcgtcgttggtgcgggcgatcgacacagacagctgcatctggcgggcctgagtccaagccttctcggcgcgctcgatgaccttgtccgaaccgatgttggcgaggccgacgtgcaccatcatcgaatcgtattcaggcagacggtggaaccacggcttggcgttgcccgggcagggacgcgaggtggtggagcctacggtttcaaaaccgaagccggcatggtccagcaccacggacatgtcgcagttcttgtcgaggccggcggacaggccgaacgggttggtgaaatcgacgcccatcacattcgtttccagaatggggtcggtgtagtcgagcatcagctgctcggcgagcagcagcggcgggacgttcttgacgacgtggcagaactcgatcatctgatcgtgtgcctcatcggggcggtggttgaacacgaagttcggtttgatgatgtgcttgtagccgaaggtgaacagatcggtggtggctttgttgacggcgtcgtgccagaagctttcagaaacgtaagtcataccgcctattgtctcacgcttgggctggtgcggctaggcgattcctgcctaggcgaattggggaaggggctaccgcgtgtcgaggcgcacgcaggcgtcggctcggcagaagatacatgaatcgggatgcaccaggtatcaggcgtgactcgccgctgagcaacgcgctcgggagagtcgtcggtcgtgagtcatcgcgctagtggtcgctgcgagaatatcggttcgcacaatgtgcgattttgcgcggttttgtggaaatgaacacctgaattgcccggaattttcgagagattgtccccaaaacgctcaagccggtttggtttgtgagcttttgtgtgcgataatgttcacatgatttcgtcacaacgtcagcacctcatcttgagcaggttgcgcacgcgcggggcagtgcgcattacggcgctatcgaaggaactgggtgtgtcagcgatgaccatccgccgcgatatcgccgaacttgccgacaagggactgctgaaacgcgtccatggcggcgcggtgactaccagtaccttgctcagcgaacccctgttctctgtcaagtcccagatggatctcggcctgaaggacgccatcgcccaggaagccatcaaatatgtggctcccggcgatgtgatcgccatcggcggcggcaccacggcctatgtcttcgcccagcatctgctcgaatcgcagcagtccagcggcatcaccatcctcaccaattcgattcccgtggccgaactggtccaggccctcgaatccaaggacgtggaggtgatcgtcaccggcggcgtgatcacccgatcgaactcgcttgtcggtccgatcgcggacaaggtcgtcgcctcgctgcgtgtcaacaccgtattcctcggcacccactcggtgtcgattccccgtggcttcctgatgccgaattcgctggaagccgcaaccgatatggcgatgatggacatcgccgatcgtaccatagttttgaccgatcacaccaagtggagctgcacatcgctgtcgctgtttgcgcgcttcgaccaggtggacacggtcattactgacgacgggctcgatcccgactccgccgccaaaaccaaggatttggtaaaggaactcgtgctggcccaccagagcgagatcattgaggaaagtgagtaaacccatggctgatttcgccaactacacccccggggagtatgcgaaggagcacatccgcatcacgccgacgacgcttgccgacggtcgtgacttcttctacctggacgacgaccccgagttcgtctccggtgccaagacccgcgagctcaaggacccgcgctcgctggactaccgtttcgccccgcacctggacgccgacggcaacgaagtgccgtacgccgccccgcagatgcgccgcgacccgctgaccggcgactggatcccgatggccaccgcccgtatgaaccgcccgatcaccgccggccccggcgccaccgccaagggcaacccgctggccgcccgcaagcccggtgacccgtaccaggacggcgaagtgccggacaccgactacaacgtcgtcgtgttcgagaaccgcttcccctccatggtgcgcgtgcccggcgtctccgaggacgtgacctacgttgacggcaacccgctgtgggagaagaagctcgccgccggccgctgcgaggtcatctgcttcgacccgaacgaggacggcctgccggccgatctgccggtctcccgcctgcgcaccgtggttgaggcttgggccttccgtaccgccgaaatctccaagatggaaggcatcgagcagatcttcccgttcgagaaccacggccaggaaatcggcgtctccctcgcccacccgcacggccaggtctactgctacccgttcatcgccccgaagatggagaaggaactccaacacaccgaggcctaccacgagaagaccggtggcaacctgcttaaggacatcatgaatgccgagctcgaggctggcgagcgcattgtgatgcgta

SEQ ID NO: 2610 - DNA, 7917 bp, Unknown
  R222_15m  MAG No. k141_20198
gttacagcccgtattctttggcgatgacggaccagaggtcggcggcggcctgatcgacggtttcgttgacgatggtgacgtcgaattcgctttcggcggcgagctccactttggcggtttccaagcgtcgggcctgctgttcggcggtttcggtgccgcggccgatcagacggcgcttgagctcttcgaagctcggcggcgcgatgaacacgtacaccacttccaagtcgagttcggcggcgcgctgcttgacgcggcgagcaccctgcaaatcgatttccagaatcgttggcatgccggcagccagatgctcctcaacaggcttgagcaatgtaccgtagtgggccatgccgtgcaccacggcggtttccaggaactcccccgccgcttcgcgggtcaggaactcgtcttcggtgaggaaccagtagttgacgccatcaacctcgccggggcgcggggcacgcgtggtggcggagacggacacccacacttcggggtggtcggcgcgcagcttggcttccacggtgcccttacctactgcggtagggccagtcaggacgattagacggccggcatgggtgttttcagtcatgggttcctccggagatgatgtggtgtgcagcgattatgaatccaatgtggtaacggctcaccggcgagatgaccggtaactgttacagccccgacgaacagggaagaatatgaatcgtgatgcgacgtatgcaatgagatagatacgtacgcatgccgcgacatctgattccgttctgattactggttttctgcgccttcggcagtggcttccatcagcgactgacgtacgtcaagcgcaatcgactcggtagcttggctcagtgcggcgatatccggcccatgcgaggcgataaagcgggacacggtaaccagcacgttgccgcgcgtaccgcggaacacggttttcagatccttggcctcggcaccctgccaaccgtaaccgggggaaagaatcggaccggtgaacttggaggggtccacgccggaatcctgcatccattggccgatggtggcaccgatgatcagacccaccgagcccatgccttcgatatccacgttatgcttctgcgcggtggaggcgatgccgtaggccacggtacgtcccttgtaatcgccgctctggcgcaacgcggtctgcagactcatgccttccggattggaagtcagggaggcgatgaacacgccgcgtccgttttccaacgcttcggtaatcaagccgttcaacgagcgcgcgccatagtacggcagcagcgtgatggcgtcggccagcaacggtgcaccgggcttgaaataggcgtccgcgatggcggaaatcgtggtggacaggccgccgtgcaggcagtccacgatggtgatgacgcccatttgtcgtgccgcgtagagcacgcgctcgagcgcttcgaaacctttggctccgtagcgctcgaacatcgacgtctggaatttgactgctgcggcgcgcccgttggcggcctgcagcatacgcatggagaagagttcggcgccttcggcgtcgacgttgtatccccagtcggtgaggagcttgcgatgtgggtcaatgcccacacacagcggtccgtatttggccattgaattgctcagtcgcagaccgaaatccgaacgttgtgcctgcaattcctcactgctgggtgtagtcatcagaactcccgtcgctccaattcgaacagctgcttcgaatgctcctgaatgctcatgatctgataatcattatgcttcacggcctcgatagccagcagtgcggcttggaactcggtgatggtggtaaactgcggcagatcggctgcaatagcggcagcacggatggagtagccgtcggaacgggagccgcgcgagttcggcgtgttgaggatcatgtcgatcttgccttcctcaatgagctgaaccacgttcttgcccacggagccggcggcgtgatgcacctcgaccggggcttccggatcggtgtccacgcgggtgctgatcttgtccacgatgttcgactcgatgccgtaacggcgaagcacggaggcggtgccctcggtggcccagagcttgaatccaagctcttcgaggcgcacggcgagcagcggcagctgacgcttgtcggtgtcgttcacggaaatgaacacgttgccgtgggtcggcaggccaccatcgtaggcggcgagctggctcttggcgaaggcgtgcgggaagtcgcggtcgaagcccatgacctcgccggtggagcgcatctcaggtccgagcaggatgtcgacggtcttgcccaccggggtgcggaagcgcttgaacggcagcacggattccttgaccgcgacctgctggccggggtggatgtcgccgccgtcgcccttgggcagcagcagaccgttggcgcgctggtcggcgatggtctcgccggccatgatgcgggcggcggccttggccagcgccacgccggtggccttggaggcgaacggcacggtacgggaggcacgcgggttggcttcgatcacatacagcgtgttggccatgaaggcgtactgcacgttgatcaggccctgcacgtggcagcccttggcgatggcgtaggtgccttcgcgcaggcggcggatctggtcgtcggacagggtggacgggggcagggtgcaggcggcgtcaccggagtggacgccggcctcctcgacgtgctccataatgccgccgatgtacagttcctcgccgtcgaacagggcgtcgacgtcgatttcgatggcgtcctgcaggaacttgtcgatgagcagcggggagggcaggcggccggagaccacggtatcggccttggcctcggcaagcgcgcggtccacgtacttggtgagctgcttgtcgtcgtagacgatttccatgccgcggccgccaagcacgtagctcgggcgcacgagcaccgggtatccgatgcggtgggcagcgtccatggcctcttcgaggctcagggcggtgccgtaacgcggggcgttcatctccgccttcttgagcacctcgccgaacagctcacggttctcggccagatcgatggattccggggtggtgccgagaatcggcacgccggcggccttcagacgcgcggccaaggacagcggggtctggccgccgagctggacgatgacgcccttgaccgggcccatcctcttctcggcctcgtagatttcgagcacatcctcgaaggtgagcggctcgaagtagaggcggtcggacatgtcgtaatcggtggagacggtctccgggttgcagttgaccatgatggtgtcatagtccttgccaagctcctgcacggcgtgcacgcacgtgtagtcgaactcgatgccctggccgatgcgattcgggccggagccgaggatgatcacggcctcgcgctcgcgcgggcgcagctcggtttcgtcggcgtagcagctgtagtagtacggcgtggcggcgtcgaactcggcggcgcaggtgtcgacggtcttgtagaccgggcgcaggccgtaggtccagcgcagctcgcggatggtgttctcgccttcatcgcccaagccacgcaggtgggccacctgcacgtcggacagaccggcgagcttggccttcttgagcagcttcggggtcagggtctcggcctcgcgcaccgtcatggcggtctcgttgatgaggaagatctgcttcaggaaccacgggtcgatcttggtggccgcgaacacctgctccagcgtggcgccgccccagatggcgcgcatgagctgcaggtaacggtgttcggtcggggtgtggatggcctcaagcagttcggccacttcttcggcggacggcttctcgccatcccagttgaagcccatgtggcgcttgtcgatggaacgcatggccttgccgagggactcctggaagttgccggccagggccatggcttcgcccacggacttcatggaggtggtcagggtggggtcggcgcccgggaacttctcgaaggcgaagcgcggcaccttggtgaccacatagtcgatggtcggctcgaatgaggccggcgtggactgggtgatgtcgttgcgaatctcgtcgagcgtatagccgagggccagcttggtggcgatcttggcgatcgggaagccggtggccttagaggccagcgcggaggaacgggagacgcgcgggttcatctcgatgacgatgatgcggccggtcttcggatgaacggcgaactggatgttgcagccgccggtgtccacgcccacgccgcggatgatggcgatgccgatgtcacgcagcttctggtattcgcggtcggtcagggtgaagcagggggccacggtgatggagtcaccggtgtgcacgccgaccgggtcgacgttctcgatcgggcagacgaccacgacgttgtcgttgcggtcgcgcatgagctcgagctcgaattccttccagccctcgatgccctcttcgatcaggacttcgtcggtgggcgagtaatggatgccggcgccggcgatgcggtgcagctcctcctcgttgtgggcgatgccggagcccaggccgcccatggtgaagctcgggcgcacaaccagcgggtagccgaacttctcggcgatcttgtcgacttcctcgatgctgtgggcgatgtcggagcgggcggattcggcgccggcctcgtcgacgaccttcttgaacagttcacggtcctcgccacggtcgatggcttccagggaggcaccgatcagttcgacgttgtacttcttcaggacgccggcctcgcccagcgccatggcggcgttgagtgcggtctggccgcccagggtgggcagaagcgcgtcggggcgttccttggcgatgatctgctcgaggatcggagtggcgatcggctcgatgtaggtggcgtcggccatctccgggtcggtcatgatggtggccgggttggagttgacgaggatgacgcggatgccttcctcacgaaggacgcggcatgcctgggtgcccgagtaatcgaactccgcagcctgaccgatcacgatcgggccggagccgatgaccatcacggatttgatgtcggtgcgcttcggcatatcacttaccttccttggagttgttcttcataagttcgcagaaacggtcgaacaggtaggccgcatcgtgcgggcctgctgcggcctccgggtggtactgcacggagaatgcggggatgtccacgcactgcaggccttcgaccacgtcatcgttcagatcgatgtgggagacgagcaccttgccgtacttgccgttttcaaacggcgcgtcgacctgcttgccgatcggggcatcgaccgcgaagccgtggttgtgggcggtgacctcgaccttgccggtggtcagatccttgaccggctggttgatgccgcggtggccgaacttgagcttgtaggtgccgaagccgagcgcgcggccgagcagctggttgccgaagcagatgccgaagaacgggtagccggcgtcgagcacctggcgcagcagctcgatttcggggccggcctgttccgggtcgcccgggccgttggagaagaagacgccgtccgggttcaggttctcgatttcggcgaaggtgatggtggagggcaccacgtgcacgcggcagccgcgttcggccatgcggtgcggggtcatgcccttgatgccgaggtccacggcggccacggtgtacagcggctccttgccttcgtactcgccgcatggctcgatggtgtaggcctgcttggtggacacttcgtcgtacaggctcaggccctgcatctgcggtgtgttcttgacgtcttcgagcagctgctcgatggtcttgagcgcgccggtggcctggtcggtcagggcgtcgccggagaagatgccggcgcgcatcacgcctgcggaacgcaggtgacgcaccagcttgcgggtgtcgatgtggctcaagccgacgatgccgttcttggcgaggtcgtcatcaaggctaccttcggcacgccagttgctcacgttcggagagggatcacgcacaatgtatccggcaacccagatgcgggaggactcagggtcttcgctgttgacgccggtatcgccgatgtgcgggaacgtctgcacgacgatctggcgatcgtagctcggatcggtgagcgtctcctggtatccggtcataccggtggcgaagacgatctcaccggtcgtctcaccgagggcgccgtacggctcccccacatatacctgtccgtcttccaaaacgaggactgcatcgtccttgtcatacatcggaattgcgatggtcccggactcgttctggctcaccaaaacccccttatgtttttcgggtattcgtaccaaggttaacggccagcgcagactcacacgccgttgggcgcaaagtctcaccccgctggcggggctgtcggcaaggtgccgacttgagaatgtgtggcgacacaagtgtccgcccatgaaaaagcctcccgaatggggaggctgaacaacaaatgactaatcgaccgtcggctgaatctcagcggacggggcagcggactcgtcggatgcaccggacgaatcgggcgaatcggaaacatcgccctcatcggtcggctcggatgcggcggcatcggaatcggacgattcctcatcggcctcttctgccgcggactccggtgccggtgctgcgttcttggcggtgcacactgcagacagcaggccatggatgaaagcgggcgaatcgtcatcgcacagggtcttggccaatgccagagcctcgtcgatggcgaccttgtccggcacatcatcgttgaacagaatctcccaagcggcgatacgcagaatgttgcgatcgaccacgcccatacggcggaccttccaacccgtggagtgttcgtccagggtcatgtcgatctgacgacggtgctcggccacgcccttgacgatttcaatggcatagtcgggaagcggggtctgggcaccgggatgtgcgatgcgctcgtcaagcagggcgagaatatcctgacttttttcgtcggcttcgtacagggtgttcagagcccttttgcgcgcggtggaacgtgccatactgctgctgtcctagtcctttatacggtcggtcgtctgttgaggatgcggagatcagttgttctcgcggccggtgtaggaaccatcctcggtgttgatcttgacgcggtcgccctcattgatgaacagcgggacctgaatctcggctccggtctcaacggtggccggcttggtgccggcgttggagcggttgccctgcaggcccggctcggtgtgggtgatggtcaggaccacggagcccggcaggtcaacgctcagcggggtgccgtcgtggaaggagaccaggcagtcggtgccttcgagcatgaacttggccttgtcgcccacgagggtcttcggaaccatgatctggtcgtaggtggtcatgtccatgaacacgaagttgtcgccgtcctcgtaggagtactggagggtgcggttgtcgacggtctcgaattccatcttcatgcctgcgttgaaggtcttgtcgacgatcttgccggagagcacgttcttgatggtggtgcgtacgaaggcggggcccttgcccggcttgacgtgctggaacttcatgacggtccacagctgtccgtcgaggttcaggacggatccgttcttgatgtcgttagtagtctgtgccacgttattcacctatttcaaattcaaactagcttaggcaaagcccaaaaattgccttggctattatgccacaccgggtatacaggaagtgaacgccccggattcaacttgtaagtgcaacggctggtttcgggtcggcttgttttgattgtagcttggccatctcctcgtcccatacctcgttgggcgttttgtatccgaggagtttcatgggggtgtcgttgatctccccgacga

SEQ ID NO: 2611 - DNA, 48217 bp, Unknown
  R222_15m  MAG No. k141_20265
cccatcgatgtcgcagacaactgatggcgagcatatccgcagttaaagtcccgatgcagccctgaggctcaactgcatcagcaagtcttctaaacgacgctcagcatcctcccaaagacgaggaggagtgaacggagcggctgctcactggttaatcctgactaaaaatcaggcagcgagagcgaactcagtgcggttagatttagcacttattcttttgccggggtcatccacgagcggacccggcgttctcggcacgcttccctgcagcgaacaggtcaccgtcgaaaccgatcgcccccaatcttgagttatcaagcttccggcttttcggccggacttttcagcatacaccctatggtgctactcgcgcaaatcgccagcagcgaacatcgccccggaaccaacggaaccaacgaagccaacgaaatcgccgtcacttgatgatgggcttctgggatgaggaaacatcaatctgatgtttcccggcaaagccagccgtgccagcggtgatgttcttgtcgatttcctcgacttccgccaacttcagcttcagttgcgaggagtcgccccaaatgattacgcggtcaccgtcgttaagcgtggtagtcaccgaatcctgcgtctcagcggtgaccttggtaatggacttacgcatcgattccggcaacgcgcccagaatcgtcagcgcctccttcaccgaacggttcttgagactggcgtctatatccttgacctcgatcaccgggatgccatccacgttggcgttcttcaccgagttcaacacacgcgcctgggaatccaccgcggtcagggtatcgcctcttttcagcatggccgcgggccgttgcgccttgacttccacgctcatcgacttggggaactgtttggagaccttggcctcgctgacgccgggaatggacttgagttgctctgtgatctcatgggcggagaccaggaacaacgactttccagcctgcttatcggcgatgacatggatggtctgcgcactcacccattcgttggcaccggatacgccgatctcgctggtttccagacgaaacaccgacgagaaaagcagcagccacgttagccccgtcactacagccacactgacgaccgcaatcaacacgcgtaacgcaacgacgcgcacgtttgcacgcttgcgttctttggcgcgttcggtgaaattcaccactttcgggcgtgatgcgactcctagggagccggtggtctgatgcagcgtttcggcaacgtaatcctcgctgtgcaaccgtcgtgcatcgacgaaggcaccggcctggcccttggctaccgtcacatcgtcgatgatctccggctcgtcgatctcatgcccggaagacacggaccggggagtgcgagacttcgacgagcgacccgtgtttccgcgtgaaccgatggtgcgcggcttgcgggagctcccagacgaacgacgtgagccgttgtcattgcccccggatctgaccgtgcgcccggacatcactcgcagctttcccgatgggcctcaagtgcggtgagcagcacctgatccatgtcggtgatgtcgcccgcgcccacggtgaagatcacgtcgccgtggtgggcgcgcatggccatcatcttggcggccaggcacatatcctcgaccggctgaatccacgtgcctgcggaagcatccttgagtcccgcagccgcgtccacgatggtggaggggctgatgtccgggaaatcggcctgcttttcacgggccgggaagataccggtgataatgacgtcatcggctttggccaaggatttggcgaactggtgcgcgaagaacttggtgcgggagaacaggtgtggctggaagatcacacgaatggtcgaatcggggtaccggcgtcgggccgcatccagcagggccgcgatttcggtgggatggtgggcgtaatcgtccactacagtgacctgcttgaccatgccgcgcacctggaagcggcgtgccgcaccgaggaatgtgccggccgcattggccgcgtctgcggggctcacgcccagcagcacggcagcgctgatggcggcggccgcattgcgcgcattgtgcacgccaggaaccttcagggcaacgctctgagacaccggctcccccgccgtcaccgcagccggcagatgcagggtgagctgttcgacgccgctgcctgcggtctcgctttccgaagcgatccagacatacgcggcaccgcccaaatcgggcagggattcacgcgcggtagtgccgtaggcaacggtatgggatttcacgtcggcgggcatggcctccagcacggcaagtccgtcgggatcgtcgatactgatgatcacgtgaccggtggcccggccggcgtgggcaacgaacgcggcacggtagtgggcttcgtcgccgtaatggtcgagatgatcggcttcacagttggtgataatggcgatggtcggatggtatttggcgaagctgccgtccgattcatcggcttcggccaccaggatatcgcctttgcccgcgtgtccgccgtccagcgtggtgccgtccgggccttggataaagccgccgatggcgtagcttggatcggcaccggcgttcaccagaatgtgggacagcatggagctggtggtggttttgccgtgcgctccggccacggtgacggctcgtttgccgttcatgagcagggcgaggatgtcactgcgatgcacaatgcgcttgcccgccgcgtgtgctgcgacgatttccggattgtccggtttgatggcgctggagtagaccacggtctcggcctgggcgacattttcggctcgctgcccgaattcaacggtgatgcccagcgtttcaagtcggtcggttttggcgctgtgtgcgcgatcggagccgtccaccgcgactccttcggcgtgcagcatttcggccagaacgctcataccggcaccgccgataccgatgaaatgggtggcaccgagatccgcggggcgggccgcagcatcgaatgaggcatacgtggggtcaagcactatgggctgatcttgagacaattcaaaactcctttagggattccagcaccctatattatgaccgtatctcgtgctgcggaacggaattggtcagtatcgcgcacggaatgatatctgaatactacttggatggttcggctaattgcagaacgtgccgggccatgatttcggcagcgtttctgatgccgtattcccatgccttgcggccgaattcggcaagtcgttcgtgatcggcgagcagatcgggcacatgctcatgcacccactgcggggtcaggtccttgtctgcgaccagaaggccgccgccggcgttcaccactggctcggcgttgaaacgctgctcgccgttgccgatgggcagcggcacgtaaatggccggcaggcccagtgcagccagctcggataccgatccggctccggcacggcaaatcaccaagtcggcacaggcgaaggccagatcgattcgttccagatattcggcggtatggtagtcaccttgtccggccgattcggggccgatgccggtaagcacgtccgcgccggccgaggccgtgaccagttcgcgtacttcgctgattttgcctcgcccggtcaagtggatgatttgtgcgtgggccaacaggtctgcggcggaggaggcgatggcgcggttcaggctttgcgctcccagcgatccgccagtgaccagcaccagcggacggttcggatcgacgccaagctgcgcggccgattcacggcgtacggcggcacggtcgtcaccgatgcgtttggtcagggaggcgatggccgggcgcaacggcagaccgacgcgctcgacgtcggctccggcacgcggtttgagaccggtgccctcgtacacggtaccgatgaaatcggcccaacgagcgcccagtttattggccatgccggcacgcgcattctgctcatggatggcaatcggaatgcccatcttgtgtgcggtggcgtagacgggggcggaagcatacccgccgaatccggccacgacatccgcatgccgcgtttcaagaatggagcgcaccttggcggtttctcgcttccattttgccgggaagcgcagcatgtacaggttagggcgacgtgggaacggcactttttcgatggtgtcgagctcgtagccggcctccggcaccaaatccttctccaaacccaccgcagtgccgatgacggtgacctgtgccgtgggttcgatgtcgcgaatcgccccggcgaccgcgagcagcggattgacatgtccggcggtaccgccgccagcaagaacgatatgtggtgtgccttgattcatgattaccgagtctacttacgcgctctgacgcgactgttttatctgcggttgagagcgcataagtcccacaaccagtccggccgccgtcaagcacataatcatggatgagccacctgcggagacgaacggcataggcacgcccaataccgggaacacacccacgaccacgccgatgttgaccatggcctggcccacgatccaaatggtgacgcacatcagcaccatggcaacataacgatcggtgacctgcaatgcgatgacgatcatgcaccaggcgagaatcgcgaagaacagcaatacgatggcgcaaccgacgaatccggtctcctcgccgatgatcgcgaaaatgaaatcgttatgggcggccggcaggtagttccatttctcccgcgaattgccgatgcccaatcccagaaaacctccggaggcgatggcgtacttggcgtgaatggactggtagcatacgctctgcgcgtcagcggccgagcaatcgccatatgtggccagaatacgacgcaagcggttcgggctggaaaccgccaatgcaccgaccataaccaccgcgcccaatacgccgactcccatccatttgccggggaacccgacgatcagaaaggccacgcctccgatgaagaccagaatcatggccgtgccgaggtccctgccgcccatcaccagcgccacgcctatcgcatacaacaccaacggcgcggcatatgctttgattcccttcttgtggtacatcttgctgcaggcatgcaacgacgagggcagccatatgcacatcgcgaacttcatgaattcagccggctggatagtggtgaagccgaggttcagccaacctttgttgccatagacgtcgatacccaaaggagtaaaggtcagcgcctgcaacaggcaggcacccaccacaaagagcacgccggtccgtttccagaacgtcaccggcatcatcaatgccacgaagcccagcaccaagccgatcaggcaaaacgcgccctggttcagaagctgaaggaacggcgacttgcccagtgcggccatggtgaccgtggagctggagaacaccatgatcaggccgaagcatgtcagccccaccacggccatgcggaagccgtggtagcaccatagcgggttgagcgagcttcgccaacccgtgtagtcagtgatttcgagtgcgggcttgtcagggactctgtatgccttacgcttatgggtatcagtggaggccatgcacctcgctccacgtcttggctgcggcggcgaatcgattgcctcgatccgcgtaggacttgaactggtccatggaggcgcaggccggagccataagcacgatgtcgccggcggcggtatacgtgccgcaggcttcgacggcacgatccatgacggtatcgttgtcttcgggatcgatgatggtcaccgggatgtccggagcttggctggcaaacgcttcgatcatcggctgctggtctttgccgatgatgacggccgctttgatggtgtgtgcctggtccttgaccaggtcctcgaatcgactgcccttggccagacctccggcaatccagatcacagacttggccgggaagctggacagcgaggcgcgtgccgcatggccgttggtggctttggaatcgtccacaaaacgaacagagccgccctcgactgcggcctcagccacggtttcgatgcgatggccgcccggcttgaacgaggtaagcgccttcaacgcggtatcgcgatcagcgccaagtcccagcaccaacgccaatgccgtcaatgcatcggccaccagatgcgggtacagtgagccgtccggctctgccagatgcgtgaaatcggtgatggcggccagtctgaccgactctcctactgcgccgccggccacgccgctcctgtccacgatccagccatcttcaatgccgatctggccggcttgaggggcctcgagcgtgaatcccaccttgcggcatccttcggcagtctgagcctcggccgccagttcgctgactttggcgtcctgcgcattgtagacgatggcgcgtttggcgttgtggaacaccttggatttgtcggcggcgtaattctcgcgcccgccatgccagtcgaggtgatcgtcggcgatattggtgatcgccgcgcagtcaagtgccagcgaatcggtgaagtgcaattggaaggagctcagttccacgcacagtacgtcgtgctgcggattggtggcgcaacgagacaggctcatgctcatgtctccggaggcgatattgccggcggtcggcgcgtcgagtccgcaggcggtgagcatttccgaggtcatctcggtggtggaggttttgccgttggtgccggtgatgccgatccatggagccggagtaccggtgcgctcgttattcacacgcagctgccatgcgaattccacctcgctcatcacggggatgccacggcgttgggcttccagcacgaacggggtgcgggggttgaacaccggggacgacatgacgtagtccacgtggtcccagtccacgtcatcaaaggagtggagatcggcctcgggcttcctctcgtcgacgccaatcacgtgggtgccgcgttccctcaatacctccgccaacgaggtgccggacacccccagtccggcgatcaccactgtcttatccgctacttgcattgttcctcctgatataggaattccgtgggtgagcataatccacccagatttccgctagctgaacagcaggccggagcgggtgacccagtcgccgtagaaaatcgtcagggcgagcagcacgaagatgagttcgatcatccagaaccgtaccaccaccttggtttcggtccaaccctccagttcgaaatgatggtgaatcggcgccattttgaatacacgtttgtgggtcatcttgaagtacccgacctggatgacgtcgctcatggcttccatgacgtacagtccgcccagaaccaccgccaggaattcggtgtgcgtggcgatggacagggctgcgaacagaccgcccaaggccagggaaccggtatcacccatgaaaatcgatgcggggttcgagttgtaccacaggaagccgaagcaggcgacggccgcgcatacggcgatgacggtcagatcgagaggatcggacacggcataggaatatccgccatggctgccgcccttgatgtggtagctttcccagaatgcgatgatgccaaaaccagtgaaggcgatcatcgacgaacctgccgccagaccgtcaagtccatccgtcagattcactgcgttggtccatgcggtcatcaggaagttcacccagatgacgaacaggatgatggctacggcacggccggcgaagtcgaagttgaagaacggctgttcgatgaagctgatgcctgcctgcgcactggggaatcccgatttggtgggaatcagcagcgcaagtaccgcgtagatggtggcgaagatgaactggccgatgaacttgccgcccaccgataggccttcgttctgcttcttacgcaccttggcgaagtcgtcgataaagcccagcagacccatcgacagcatggcgaacagtacgagcgccgcggaccaggagggcacgtcgcccgaacgcaggtatcggtacagtgcggaggatgcccaaccgagcagaatcgcgaagttgatgaccacgccgcccaacgtgggggtgccgcgcttgaccagatgcgactgcggcccatcctggcggatgtactggccatagtgcagcttgtggaccagccgaatcagcagcggggtgccgactaaggtgacgatgagcgacaccagcattccaatgatcagagcaatcacgtgcagcttctctttcttgtcggtttcttggggtggttatcaggtcagttctttgcccagcgttcagccaaagcgctcaggcctgacgcgtgcgatcccttgagcagcaccacagcgtcgggatggttgcgagccaagtcgatgaccagctgttcggccgcatcgatgtcgtgtacgcaatccaccgacgcggattggctctgacgggcaccgtccgccagagcctgtgccagtgcatcgagatgttggtcttgggcggaaccgaccgcgatgatcgcgtcgatgcccaattcgtccgcatacgtgccgatcgaggtgtgcaatgccgtttcatcggcgccgagttccagcatggcacccagcagcgccacgcggaacggctccttgccgtcatttgagttccaggccttcaacccgttcaggccggctttcatggagtcgggattggcgttgaaggaatcatcgatcagcgtgaaggaagtcccctcgcgattcaccgtggacaatgccatgcgatgagggctgatggtgtgctgcgaggccagaatccgtgccaccgtttcgggtgccataccgtaacgcatcgccacggttgcggcggccaacgcgttcatcacattgtgacgtccaggaatgcccagatgcaccggcgtatggttgccgtccgcatcgaccaacgtgaattcagcatgatcggaccggtcggcagtgacatcaatggcccgcacctcgggctcctgcgacgatcccaagccgaaccacagcacgtcgccgttggccaggccggccatgggaaccacgtgttcgtcatcggcgttcagtaccgcggtgcctccgggaagcaatccctgcacgatttcgcttttcgcctgtgcgatgcgttcgcgggagccgaattctccaaggtgagcgacgccgaccttcaatacgattgccgtgttcggcggtgcgatacgggtcagtcgcgcgatttcgccgatatggctggcacccatctcagccacgaagaaccgggtgtgctcatcgacccgcaacgcagtgagcggcaggccgatctcattgttgaacgatcccaccggagccacggtcggacctacggtggcaagcagggaggagagcagatccttggtggtggtcttgcccaccgaaccggtcaatccgatgatgtcgaagtcgccgtccagctcgcggcggcgaacgatgttgtatcgggcgagttcgccaagggcgtcgaccgtgtctttcactacgatctgcggaaggccatcggacttcacctcatggtcgacgatggccaccgtggctccctgtccagcggttttcgccacaaagtcatgcccatcgacacgctcgcctcggatggccacaaacaccgatccggggccggcctgccgcgagtcgctgaccgtattggtggctcgagactcggaaccggcgtctccgatcaatcgaccatcgacggccttggcgatctcctccacgctcatcggaaccatggtgtttcaaactcctttacgattacgcttcgtcccgtatccacggacttaattgagattattggccacatgcagggcactgcgtatgttgtttttcctcacgccggcggccagcaccatggcgatggccaaggacatgtgcccgagtcggacgcggtcatacattgccggtgaatccgcagccatttcatccgattcgggtgtcgacgaggtcatggacatgtcatgttccgcaacgaatgcgtagcgtgtcttcaattcgttcaagcttgcgcttgcgttgacatcctccgtgcccagtacatccacgttcaccgattccaacgcatgctcggccaacgtgcggtcatccatggcgatgatcacggccgccacaccgtcttcggcgcacacggacagcgcgcgctgcatatcgaggatgcccagaggatagttcaggttcatggtacgtgtcatcgacgtggacccggatgcggtgattaccgccaccggattgcccagcatgtgcaggaattcggagagctgggacacgcctgcgtcgacggcctgctcatccgcaccggtcaccgcgaacaccgccatggcattggacggtccgccggccagaccgctggccagatcgccgagtacgcgatcgtcgaaatcgccgtagagcaacggtatatcggcattggcgatctgccctttggacgcgcgtggcagcaacgccgcataggcaccggcctgtgcggcatgcagtacatcgggttcctgctcatgcgtgcagatgaacagcgagccgggaatcacggtgtccacggcatcgctgagtgaggtaatggtgacattggtggcgaagggtggatcgacttcaaaaccgtaccgttcgaccagcattcccagggtcacccgctgggcgatggattcgctcactgcactcatgggctatcgcctttctcccctgatccttaccacgtgactggaatagcatttttgcgtggactggagacaggcacctcgtatttctgcataaggaactcacaaatctgtgcggaaacagggccggccgtcagaccgccgaacacaccattcggatccttcatcaccacggtgaccgcatagcgcgggttgtccgcgggaatcaccacggaataatcggagataatggacgagagcgtgccatccgagccctgcacctctgcggtactggacttggcggccatgcggtaaccatcgaccttgacgaacttgttgtagccttccgccactgattccatcgcattcatcatgtccgatgcgaccttttcatccaccacgcgggtggcttcgcccttcttggtctcagtggtcttgccattggcatcggtggttgatttgatgatcgactgctgctgcttgacacccttgttcgcgatggtggccaccacgttgttgagctgcagggcgttgacggcgtagccctgaccaaacaggatggtgttgcgcgtacgcagatcccacgccgaagggttggtgagcagaccgctcgattcaccgggcaggttcagtccggtcggttgtccgatgccgaatttggtcaggtactcgtagcgttgctcatccggatagttctccccggccataatcatgccgacgttcgatgagttctgcagaatgccggcgagcgtccagcgctcagtgccatggtcgaatgagtccttgtaggtctggccctcctgtgtgatgtggtccgggaccgacaattgatcgctcatcttatgcagtcccatctgcagatagccggacatggagatgaccttgcccaccgaaccaggctcgaaggtttcggacacggcccgagacgggctcatcttcgccgcatcggtaccagcctgtacttcatcgctatcggccagtgcgagaatctccccgctctggacatcctgcaccacggcgatcgcccacgctgcaccatacttggattcggcctccttcaagacctttttgacataccattgcacatcacggtcaatggtcagggtgacatcgtcgccatttttggccgccaccgattcggtcatggtgccgggaatctcttcgccgccattaccacgctggtaggtttcatggccatcggttccggtaagcgtcttgttctcgacctgctcgatgccggcgacgccatcgccgttgtcgttcacgccgccaagcagcgcgcccatgagatcgccatccgcatacagtcgttcactgctcagctcaccccagacaataccgcccaggtgcaacgcctcgatgctgcgcttgacctgcggagtcacatctttcttcagaatcacatactgccctgtaccggacagatcagcgcccagttccatggcgttcatatccaggactttggccagcagtcggcccacggccgccgctccggtagcgcccacgggtttgccgtcaatttcgtggcagtaatcacgggtgttgtcattgcaagtaatcggctcgaactcctgtgcagcctccggattggcgacgatagtataacgctccacgctttgagcgagcacggagccgttggcgtcgaggatacgcccacgcttggcgctcaacgtcacggtcagggtgcggttagccgtggccgcttgtgcggtttgacggccgccgatgagctgggtggaggccagctgaatcacgcatgccgacgccaccaacgccaatgcggcgccgatggcgatgcatttgaacgcgaaggtcttgaccttggcgaactctacgatgcgacgaatggtgttcactgggttccgcctttgttggactggtatccgcttaagtcgatggacactgatccctgctgcgggaccatgcccatgtcgctggccttgtcgggcaggttcgcgaccaattgatcgagtttggcctgatcgtcttcgatatcttgggtaagtctgttgatgttggtttcgatctgtgccgcctcaaacgagttctgcaccatctgggtacgcagcatcagcgcgccgaacaaggtgccgacgaggaagatcactgcaatggccacgtgcaccagcggtgcgcttcttgttctggtccattcgatgacccgtccgacgacattgccctgctcgtttccacgcgggttggagaccacccgcagctcaggtcgggaggaggactgatgcttggtgtgcggtcggttcgaggctggagccgcgttcgatcgaatgctacgtgcagttgccatatgctgttatcccctccttgtacgaattcgtgccgtgtttttggctctgcccggagacgcggagccttgtatcttgacgtcattcaggccctgcgcggtttgcgtaaagcgtttcctccatcgtgacggaatctcacggctgacttccaccgcccgcaaccgcaccgaagccgatctcgggttggctgcgatttcatgttcgtcggccttgacggcacctcgcgtgagatccgtgaaaaacggttgggcatccggcggtacgacaggcaggccagccggaacatccactcgcagcccttgtgccatgaacgatttgacggttttgtcttcgagcgaatgataggactccaccaccagtcgtcccccgacatgcagtcggttcgcggcctgcggcaatgtggaggcgagcttgtccaattcgccgttgacttcaatgcgcaacgcctggaagacgcgtttggcgggattgcccgccgggcggtgggcttgcggcaccacttcatcgaccagacggttgagctgtgcggtggtggtaaacggctccttgtctcgacgcgccacgatggcgcgggcgatctgacgcgagaaacgctcttcaccgtattccttgaatatgcggaccagttccgccgcatcataggtggcaagaatccgttcggccgtcaacggctggctgacgtccatgcgcatatccagcggcgcatcatgcgaataggagaagccacgatcggtttcgtcgatctgcaggctggataatcccagatccatgaatacggcgtccacgcgttcgatgtcttggtccgccaacacctgatcgagctgatcgaaggcggcatgcaccggaatgaatcgatcggcgagcccctcccgttccatacgctcggtggccagccccagcgcttcactgtcacggtcaatgccgatgagccgaacctgaggcgcggccttgaggaaggcgatggaatggccggcaaggcccagggtgcaatccactgcgatggcgttctcatgttccagggcaggtgccatcaggttcacgcaatcgtcaagcaataccggcagatgaatattcgccacatcaaccatcagaattccacctccggcaacacatcgtcagcaatatcggaatatccctcttccttctcggcgaggtaggactcccacgtgtccttattccacagttcggcacgggtgccaacgccgatcaccacgacgtcggaacccagattggcgtaatcgcgcagcatctgcggcaccagcacgcggccctgcttgtccggctgctggtcgacggcaccggaaaggaacacacgcaggtattcgcgggcggctttgtttcccaccgacacacgctgaatctgcgaggcgatacgtcgaaattcgtcgaacggcagcaggtacacgcaccgttcctggcctcgggccatgaccaggccctgccccagctgggagcggaatttggccggaagcgccatacggcccttggcatcgatcttcggcgtatatgttccgagaagcaatggcggcagaccagccatgagatcggccatagtggtggagccttgtgcgttggcatcagcgtcgcgaatcgtctgatcggcaaccatggctccacctccttcatcgttacgtgggatacacttcggccaactggctcaccactctaccccacgattccccatttctccccactcatgcacgatttgctcacccttttagggcaattaccgatggattgcgcgtgtcggccacgactgtcgcacgaatggacgctccgcacattcaatccacgtcgcgcaccccaccgaccgagcagcatggtgaattcacgctgaattcacctattccgggttgtccgcatcactgacgtagggggtgtgcggtaaatttgaatgccttaagtttttctgccccacggaaatggaacgaagagaacagcatgtcgagttacgcctcccagctgcatgaagagcagcaggccgtcgatcgcgcctatggacgattggatgatctgcgagccgaaatgtggcaacgcctggacaccgtacgcgccgccggctcccacggatcccccacgcaacgcagcgaacgagactcctttgccacaatgtacgaaaaccgcctcacgcaattgcgcagcgttgaggatcggctggtgtttggccgcctcgatgccaagaacggcgaccgtcattacatcggccgcatcggcctgtcgagcccggaccatgagccgattctgaccgactggcgtgccgaagccgcacgtcctttctatgaggcgaccccttccaatcacggcgacatcgtgatgcgcaggcatatcaccttgagtttccgcgaagtcgtgggcgttgaggatgaggtgcttgacgtgcattcagaccaggtcggccaggcgtcttccgccggcacattgaccggcgagggtgcgctgctggcttcgttgagctcacgccgcaccggcaagatgaccgatatcgtggccaccattcaggccgagcaggaccgcatcatccgctccgacatgaatcgtgccgtggtggtgcagggcggtcccggcaccggcaagacggccgtggcgctccatcgcgccgcctacctgctgtacacgcaccggcgcacgctggaacgttccggcgtgctggttgttggccccagctcggcgttcctgcactacatcgatcaggtgctgccctccttgggcgagaccggcgtggtctcacgcaccatcagcgatctgattcccggcatcaccgccacggcggtcgactccccttatgcagccaagctcaagggcgatcgacgcatgacctccgtagtggccaatgccatcgccgcgcgcgtgcgtgttcccgctgttctgccgacagtaaccattagcggcattcaggtaccaatgctggccactgatatcgagcaggcgcaggcggacgcgaagcgcacccggcaacctcataacaaggcccgcgagacctttatccgttcgatgctgaccagcatgcagaaccgttatgccgaacagcttgattacacgccggatcaggcggagctgaaccgcgcgatgtcgttgctgcgtatgaacgagcaggtgcgcaagaccctgaacctgtgctggctgccgatgaccgccccatggctcatcgatcagctgttcgcccatcccgaacgtctgaagtctctggctggttggctgaccgacaacgacatcgcggcacttgcccgccccaagggctccccgctgacccgctccgatattccgctgctcgacgaagcgatggatatgctgggccccgatcccaagacggtggcccgccagtccgccgccgacgcacgtcgtgccgccgaagagcagtatgccaaagacacgctggccgcgaccggtctgggtggaggcatcgtctccagtcagatgctgctcgaccagatgaacggggacgacgccgagctgaccgcgcagcgggccgcggccgaccgtgaatggacctacgggcacatcgtggtcgacgaagcgcaggaactgaccgccatggactggcgtatgttgatccgccgttgtccctcccgctcgttcaccatcgtgggcgatgtggcgcagacctcggcgctgggtggcacccgacgctggagcaaatcgatgaaccgcctgttcggcgaaagccactgggatctgaacgagttgaccatcaactaccgtaatccgcaggaagtttccgaactcgcctcacgatttgccgagaaggaaggcctctacatctccacggtcaatgcggtgcgcaccatccccgattcggtgtcccgcaatgtggtgcccgacatgtcgtccttgctggaaacgacggccgagcaggcggcgcagcttgccgaacaattcgtttcggcagacggcaccggccgcatcgccgtcatctgtccggatgatctcatcgccccggtgcgcgacgccgtgcgccgcaaactggccgccgttcttgacccggtcgaatacgcaaggctcatcgagcagcccgaatgggatgagcaaatcagcgtctgcggcaccgaaacggtcaagggtctggagttcgatgccgtcgtggtgatcgagcccggtctcatcgaggatgacgcgccgagccgcctggtcgccgcctcggacctgtacgtggcaatgaccaggccgacccagaaactggttatagttcggacaagaacggacgaaaagtccctgaacatctaaggtatgaagcatgcccaaagcactgttattggaaaacattcaccccgacgcggccaagtcgttgcgtgaccacggtttcgaagtcgagaccatgaagggagccctgagcgaggacgaactcatcgacgcgctggatggcgtggacttggtgggcgtacgctccaagaccaacgtcacagcccgcgtgctggatgcgcgtcctacgctaagcgccatcggctgcttctgcatcggcaccaatcaggtcgatctggcacatgccggcaagcgtggcatcgccgtgttcaacgccccctactccaacacccgttccgtggtggaattggtgatttgcgacatcatctgcttgatgcgccgcattcccgcacacacgcatcacatcaagcatggcctgtgggacaagtccgcttccggctcgcatgaagtgcgcggcaagacccttggcatcatcggctacggcaacatcggctcccagctgtcggtactggccgaggccctcggcatgcgcgtggtgttctacgacattgaggagaaactggcactgggcaacgcccaccgttgcgataccctcaacgaactgctggaacagtccgatgccgtgaccctgcacgtggatggccgcaagtcgaacaccggcttcttcggcgaagaccaattcgcccacatgaagcaggacgcgattttcattaacctttcgcgcggtttcgtcgccgatctgggagctctgaagcagcacctcgattccggccatctgtctggcgcggcggtcgacgtgttccccgttgagccgaagaagagcggagatccgttcgagacctcactggccaacgaagacaatatgattctgactcctcatattggcggctccaccttggaggctcaggaatccatcggccatttcgtctctcagcgtcttgaggattactggttcaagggttctacctcattgtccgtgaacctaccgcagatcaacctaggtgaacgcaagggcgtgtgccgtatcgcccatctgcacgacaatcttcctggtgtgctggctcatgtcaatcgcgtgctcggcgaagagaacatcaacgtttccttccagtcgttggccaccgaaggcgaacttggctatgtggtcaccgacgtggctcagaagcccagcgccgccacgcttgaagcactacgcaacatcgagggcaccgttcgcatgcgtgtcatcagctgacgcagctcatcctcgattgatatgaaagagacccgtcgctgacgggtctctttcataagtgcagggcttcatgattggttcgcaccatggtttgcgaatcactcgcatatcacggtgcacggcattcgcatattattcacgcaaaccatcaatggcgctttggaaatcctccagacctgcaaagttctggtacacactcgcgaatcgaaggtacgccaccacatccaagtcacgcaacggtttcaggatggctttgcccacttcatctgaggtgacttcggcaaggcctcgggagcgaagatcctcttcgactttctgtcccagcagcttcagatcctcttctctgaccggccgcccctggcaggctttacgtacgccggaaatcactttgtctctgctgaatggctccacgccacccgaacgtttagtgaccagcagcatactggtttccaccgtggtaaaacgcttgttgcatttcgggcatacgcgacgccgacggatggaatgaccgtcatcgctaatgcgcgtatcaataactttggtgtcggggttctggcaaaaagggcaatgcatgctctccagaataacgtgtacgggcggaaaaaccatgccgctcgggtttcatttactcaaccggaacaataatgcgctgcccggcctgcaatgttccggactcgagattgttcagcgtaatcagctcatccactgtttccgatacatcatggccagcaggtgtaatagccgaagcatatgaccagagcgtatcccccggccgcacgatatagctggtcacctgcgtggcacccgtatctgattgggcccgctgagcggtaagcgcgccgaaaccacaccaggccagcgccaaggcgatcatcactgcgataatccgcccacgcacattccggcgggacgttccagcatgctgcatagctacacgtgcgctacgggccggggccatcaccattgaaccagtcatcacgaccacctctctcgaacagatgttctatcgaacaactgttcttataatggcacaaatgttcgacacggtcaagtcgaaactcgaacagatgtttgatttcacacgaacaacacgttatgctggtgacataacgaaaggagccctgacgtgagcaccattcccctctcccccaggcagaagccggacgagtccaccctgaccgaccgccagcgcaaagtgttggacgccattcgcacgcatatcgacgaacaaggctttgctccctctttccgggagatcggaaatgccgccgggctcaaaagtccgtcttcggtcaagcatcagctacaagttttggaagacaagggcttcattcgcatgaacgcgaacaagggtcgcgccatcgaggtgatggcaggatccgccccgaatgccgaaaagccatcacaagccagcgaagaggcaaccagcgccagcaatgtggcggagatataccaattccccgccgaagccattgccgaatcacatgacgtaccgctcgttggccgtattgccgccggcgtgccgattaccgccgaacagcatgtggacgacgtcatgcgtctgcctgaacggctgaccggctccggcaccctgttcatgctggaagtccacggtgattccatggtggatgccgctatctgcgatggcgactatgtggtggtgcgcgaacagaattccgccgtcaacggagatatcgtcgccgctctgttggatgacgaggccacggtgaagaccttccgcaaggaaaacggccacgtctggctgatgccgcacaaccccgcatactcgcccatcgacggcacacatgccacgattatgggcaaggtggtcaccgtactgcgcaaattatagcctgttcgccaccagctgatcagcgtgcgctgaatcgcgctggtcgtgctatagtcgcacactgcttacgaaaccccggcctcgcgccggggtttcgtcgtattcagaccatatcgcaaatggtattgagaagcggtttcaactcgatagagcgaaggagtacacatggcccatacccatacacccgcaccatccacatccgtaaaccctgccgcgcaccagcgcaggctgattgccacgttgaccgtcactggttcggtcttcctcatcgaagtggtgtcggccgtcttaaccggctcactggccctgctggtggatgccggtcatatgctcaccgacatgtccgtgctggtggcatccacaatcaccgccatactgatgcgccgcaagcccaacaacactcgtacttggggctgggccaggcttgaggtgctcaccgctgccgcgggcgccgtagtattgcttatcgtcggcatctatgcgttggtagaggccggcatgcgtctgttcggcggctccaaagcggaaatcgacgatatcggcttgctgctgttcgtaggcattctgggtcttgtcgcaaatatcatctcgatcttcatccttgcctcgcagcgcgaagacaacatgaacatgaaggccgcgttcctcgaggtaatgaacgacgcacttggctcggtgtctgtggtggcctctgccctggtaatgatctccaccggatggaatggcttcgacgccgtggccggtgccgtcatcgcactgatgatgattccgcgcgccatcaaactgctgcacaacgcggtcaaggtgctgctggaggaaacaccggatggtcttgatctcgataaggtacgcgagcatctggaagacgtgccgcatgtgcttgccgtgcatgacctccatgccagcacggtgtccaccgacatgccgattcttatggcccacgtggtagtcgacaaagacctcaccatggaagatgccgccacaatcctcacccaactgcaggattgcctgcgcgagcacttcccggtctcggtcccccacaccaccttccagcttgagcccgagggctatagctccccctcctccaacgaattccacgaataaaaaatgctccctctggaagcattcagcagggtataaaaaatcgctgtacgtgtgcgatttttcgtgccgcacaaggtgaaggcctacaaaggtagttcgaaccttgtgcggtgtgaaaggcgctccgtacagcgattttttatcagaagccgaactgggcggcggtttccttcagcgtctcggcggagcgcttcagagcggcgagctccttgtcggagaccggggtgttgatggtgttgttgacgccctgacggttgaggagggtcggcacggacatgcagatgtcggagatgccgtggaagtccttgagcatggagctcacgggcaggatgcggttggtgtcgtgcaggacggcttcgatgatgtcgacgccggacatgccgatggcgtagttggtggcacccttaccgttgatgatcttgtaagcggcgttcttgacttcctggtggatctcctcgcgcttggcggcgtcgagcggatcgtggccgggcagcggggtccagtcgcacatggggacaccaccgatggtggcggactcccacagcgggacttcggagtcgccgtgctcgccggcgatgtaggcgtgcacgttcttgacgttgacgccggtctgctgggcaatcaggaagcgcagacgagcggagtccaggttggtgccggaaccgaagacctggttctcgggcagaccggtgagcttctgagccacgtgggtagcgatgtcgaccgggttggtgatgagcatgtagatggcgttcggagccaccttgaccaagttcggcatgatggccttgaggatgttgacggtagcgccaacgagctcaagacgagactgacccggcttctgacgcggaccagcggtgatgacgaccatgtcggcgtcgcggcagatctcaggatcgtcggaaccgtcgatggacacggtcgggtagaagctggagccgtgctgcatgtcgagcacttcggcttccacgcgctccttggcgatgtcttcaagcacgatctcgcgagcgacgccacgctgggcagcggcgaaggcgagggtggagccaacggcaccggcaccaataacagcaagcttcgtgggcttaacggtagtttccgccatgatggatgaacctctcttcaaaggcggtctgctgatgaatggcaggccttgtaactaacggttttcactctataaacccgctaagacgttttgctaccagcacaccaccctgtctgataacggtatggtaatgtttccaacggttgttagcgctcacgaacaaactgtgatgtttatcacgttagtcaatggactgttcgaccacctgagcggcaagatgggcgtcaacgtccgcttcaagctgtatgccatcatcgcggtactccaccttgtccaccttgccgtattcgcgtacacgagagatcagggagccagcggtatacggcagcagagcgttgacatgcacatgcgggaccggcagcagactttcgaccgcggtacgcagctcgtccaatccctcaccggtataggcggagacgatgaacgcatccggctgcagtgcggcgagtcgttcacgtgtcgcctcgtccgcctgatcggccttgttgaatacgagaatacgcggaatcgaggccgtgccttcgatgtccgccaacacgtcattgaccgcgtcgacctgagagaacgggtcagggtgggagccatcgaccacgtgcaggatcacgtcggcctcggccacctcttccagggtggatttgaacgcctcgatcagctgggtgggcaggcggcgcacgaagccgaccgtgtccacgtaggcgtaagcgcgtccgtcgcgggttttggcgcggcgcacggccgtgtccaatgtggcgaacagcgcgttttccaccagttcggccgaaccggtcagacggttggtcaacgaggatttgccggcgttcgtgtagccgaccacggccactgtgggcaggccgaagcgacggcgtgaaccgcgcttgacctcacgtgccggagccatctcacgaatctgacggcgcagtctggcgatacgcgtgcgaattacacgacggtccatttcgattttggtctcgcccgggcctcgcgatccgatgcccgcatccgcgcctgccgcgcgaccgccggcctgacgggacagcgaaccaccccaaccacgcagtcggggcagcatgtattcgagctgcgccaactccacctgcgccttaccttcacgcgaggtggcgtgctgggcgaagatgtccagaatcaccgcggtgcgatccaccaccttgactttggctgcgtcctccaatgcacggcgctgtgacggcggcaggtcgtcgtccacgataatcgtatcggcttcctcacgcgccacgatgtcggcaatctccttggctttgccggaaccaacgtacgtggctgcatccggcttggagcgatgctgcagcaaaccatcgcataccaccgcaccggcggtttcggcgagcgccgccaactccctcaacgattcctcggccttggcttgcgtggtgacggcggacgaccagacgccgacgagcaccacacgttccagacgcaccttgcggtattcgacttcggtgacgtcctgcagctcgccgagaccggcgacatgcttgagctcgttgcgggcctcgcgctcctcccattcctggttggcgtcctcgtgccagccggtcgcgcgctggctgtcgtcgagcagcacttcggactgcccggccagcacaccttcaggggtaacgtcgttgttgccgcggtcgatgtcggtgtactgggtgttgtcggtcaagtgcgcctcgtttggttggaatggttcacgattcttctatggtcctttattatcatcacatgaggtgacatgctggcatagatcggcacgtaccggcataggccggctgatacaggtcggcatacgagagcggcgaatcccgcagaaatggagcgaccatggcagaacagtatttctctgcggaacccgcgtcgaaggatgtgcgccgcacattgaacgtaacgttgcgcggccatgaggcgaccgctcaggtgtcgaacggcgtgttctccggctcgcgcgtggacctcggtacgtcggtattgctgaagcatgcgcccgagccgccgcttaccggcgatttcctggatttgggctgcggctggggccctatcgccctgacattggcgtttgagtcgcccgaagcgaacgtgtgggcggtggatgtcaacgagcgcgcgctggacctgacccatgccaacgcacaggcgaacggccgcacgaacattcatacggctcaggtggacgagtccagcactcccctgcccgccgagaaccagccggcgttctgcgagacggtgccgggcgacctcacgtttgatgcgatttggtcgaatccaccgattcgagtcggcaaggaagcgctacatacattgcttatggcttggctgccgaagctcaaggtgggcggcgccgcctatctcgtagtgcagaagaatctcggctccgattcgctgatcccctggctggacgatgcgctcggcgaggggttcactgcgagcaaatacgcgagctccaagggcttccgtatcattgaagtccgtcatgaaatatgagtatcctgcagaacttcccgtatctgccgcgcgtgatgagatagccagcgcggtcaaacgttcccaagtcgttattgtgtccggccagaccggttcgggcaaaaccacacagctgccgaagatcctgcttgagcttggccgtggcacgcacggcaagcagatcgtgcacacccagcctcgccgtatcgccgcgcgcacggtggccgaacgtatcgcctcggagatgggcgtgaagctcggtgacgaggtcggctatcaggtacgtttcaccgacgaaagctcgcccagcacgcgattgagagtcgtgaccgacggtattctgctcgcccagatccagcgcgatccgaaactcacccaatacgatacgatcatcatcgacgaggcgcatgagcgcagtcttaacatcgactttctgctcggctatctgacggcactgctgcctcagcgccgcgatctgaagctcatcatcacctccgcgaccatcgattcggtcaagttccaggagcatttcgagcacgccttgcatgagaaggtgccggtaatcgaggtttccggccgcaccttccccgtgcaggtggtctatgagccgcttggcaccgcgcccgcgttgatgcgcgaagtgccgggattcgcggtgggcgcccgccccggcgacgccgattacgacgagctggccagcgccatcgcggaatccgattccgaccggccccgcggccggtccggcgactcctatgccgatgacggcatcaccgatatgcccacggccgtggctcgagcctgcgccgaactggtgatccactcctcccatgagcgcggtccccgcgatattctggtcttcgcttccggcgagcgcgacatccacgagttcgaggccgcactgcggcatcattacggtccgcgcgccgacgacatgcgccgaccggacgccatcgagatcatgccactgttcgcgcgattgtccgccgccgaccagcacaaggtgttcgaatcgcatttgcatcagcgcatcgtcatcgccaccaatgtggctgagacctcgctgaccgtgcccggtatccgctacgtggtggaccccggttccgcccgtatctcccggtattcgaagaccgcaaaggtccagcgtctgccgatcgagccgatcagccaggccagtgccgaccagaggtccggccgatgcggccgcgtggccgacggcatcgcgatccgcctgtattcgcgtgaggattacgagacccgaccgcgcttcaccgagccggaaatcctgcgtacctcgctgggtgccgtggtgcttcacatgctgtcggtgggcgtggcccgcacggccgaggacgtcacgaacttcgggttcatcgatccgccggatatgaaggccgtgtcggacggtttcaatgagctcaccgagctcaaggccatcggccgaaagcgcggcgaggtgacgctcacccataccggccgtcagctggcgcgcatccccatcgacgtgcgtctgggacgtatggttatcgaggccgcgaaaaccggttcgccgaatcttctggcccaggtgctcgtggtcgtggcgttcctgagcttgcaggacccacgtgaacgcccggacgacaagcgtgaggatgccgaccgtatccacaaccgatatgcggatgagacttccgatttcctgacggccctgaacatctgggatcgcgtgttccaagcggacggcgacccgagcaacaacgcgctgcgccgtatctgcaaaaccgagtatctcagctggctgaggatacgccagtggaaagatctcgtctcccagctacgccagatgtgcaaggagctgaagttcaaggtcggcgacccgttgcccgcctcccgcccaggcttggagattcgccagctgccgttgaatcagcaggccgcgcattcgctgtgctgctcgtgggatgcggatggcatccacaagtcgatgctcgccggattgctgtcgatgatgggcatgcaggtggtgcgtgagcccaaggcctccgatttcgcggggctgaccggtgcggcgcgcgcccgtgcgatgaaacgcgcccagaagcagtcgaagaacgattatcagggcgcgcgcggcacccgtttcgccctgttccccgcctccgccgtggccaagaagaccccgtcatgggtgatgagcaccgaactggtggagacctctcgcctgtgggcccgctattcggcggccatcgacccggcgtgggccgaaccgttggccggccaattgacccgcaccacgtatgcggagccgcactggtcgggttcgcgtggctcggctgtggccaccgcgcgcgtgctgctgtatggtctgccgatcgtacaggaccgtgccgtgcagtggggacgcatcaatccgcttgaggcgcgcgacttcctgattcgccagggtctggtcgagggcgatattcagcagcgcttcagttacgacgactttgtgggcaaaaaccgtgacattctcgaggatgccgccgatgacgcgagccgcacccgccagctggcggacaccgtgtccgacgaggatctgttcgacttctacaacgcggtcattcccaacgatgtgaccagcgtggccgatctggcgaaatggtggaagtccgagcatgaccgtcagccgaatctgcttgatttcgacccggccaaggtggagcgtctggcatccagcgattcggtgagtctggacgattaccccgaccattggcatacgaccggatcggacggccaacccatcgacctgcgtttgagctacgtatacgatccggccgacccggccgacggcgtcaccgtgcatgtgccgttgaaggcgctctcgcgtatcacgcccgaccagttcacatggaatgtgccgggcctgttggatgagctgattctgtcgatgatcaaggcgctgcccaagcagctgcgcgtccagttcgtgccggctccggatgccgcgcgtgcgattcgtgactggatcgacgagcattacccggatctgccgggctcgggctcgcagcagaagccgaatctgccgccggtggatgaggatggcacgaccgttggctggcctgatttggcacatgtgttcaccaaggcggccatcgccaccaagggtgcgcagattcatcccgaagtgttggggccggaactggtcgagcgtctttccccgtatctcagggtcacgttctcggtggagcagcaactgccggccggcaagcaccctcgtggacgccggcatgcgcgcggccccgtcaaggtgctgggtgtgtccaaggatctgaaggcgctgcaacgcaagttcgccgcgcaggcggaggcgtcggcccgtcagatggtcaagaagcaggccgatcaggctggagaacagggcaagctggtcagtcaggcgaacctgttgcataaggcgggtgccaccaccgagtcccgggccacgatgctctggcgtggcgcattggatgcgctgcggttgccggccgaacgcatttcgtcgcgctggctgggtaccgaggcgttgatgctggcttctgctccgtacaagtccaccaaggatctggtcgaagacctgcagctggccacggtcaaacggctgatgccgaatgtcgacaggctctcggacgatgaggcgttggccaatgcggtgctcgatgtgcgcgaagtgtacgaggacaccgtctatcaggtggcgcatgacgtgatcgccgtgctcaaggcttatgccgaagtcgacaaggccactggcggcaaggccgacttgccgatgctgtcggtgctgcagtcggtgcgcgagcacatcgccacgctggtgttccccggattcgtcggcgccgctcccccggacgcgctggcgaacatctcccgatacctgcaggccgatctcatgcgcctggccaaggcgaagaccgacaagaaccgcgacgtgcgatgggcgtgggaggccgacgaggcccgcacgctggtcgacaaggcgatggccaaggccaaggcggagccggccggcccccgccacgagacgctgatgaagcaggcgaccgccgcccgctggatgctcgaggaattctacgtgtccctgtgggcgcaggaactcggcaccgccaagccggtgagcctgcagcgcatcaagaaggcactggcgtagcgatggcgacgacgcaacggcgcaagccggccaatccgcgcggcagggcgaacgtgattgtcgcggggcggggcgtgtcaggcggcaatcgcaaacgtcgcccgggcaaacgcccgcgcaatcgcaggtatccgctcagcccggcgcgctggtggaagcgggccgggttggcgcagcgcgtcgcggctgtgctggtcaccgtggtggcggccgcatgcgtggtcgcgctggtcgtgggcactgtgcgggtcgtccagtggcgtcgcgacgtgcaggaggccgaggcccgccagctgcagctgacgcagcaatacgacttcaatcccggcgacatcatctcggacggccagttcttcaacgccaatgcgatgagcgaggccgaggtccagtcgttcctcgacaagcagggcgcggcgtgcagcggttcccggtgcctgaaaaccatgaccttcgacaccgaggaccaggcggcgaacgagtattgcgcggcgtacgagggcgcgagaaaggagaccgcggccgcgatcatcgacaagtcggcgcgcgcgtgcggcatcagccagaaggtgctgctcaccgtgacgcagaaggagcagcacctggtcacggccgtcgatccgacggacttccagtacaaggccgccatggggctgagctgcccggacaacgcgaactgcgatccggcctatgccggcttcttcagacaggtgtacggggcggcgcaccgctaccaatactacgtggcgcatgaaagcgcctacggctatcacgccaacgcgctgaactacatccagtaccacccggatgccgggtgcggcggcaccaacgtgtacatcgagaacaaggcgaccgcgctgctctacatctacacgccctaccagccgaacgacgcctcgctggcggccgggttcggcgagggcgactcatgctccagctacggcaaccgcaacttcgccctcatatacaccaactggttcggtgccgcgcgccgataggggcgggaacggcaaaaaaccgaaaccacggtaaggctaggtgtcatccgcgccgtcgccgccccgccgcacggccggagaaccggccggatgacgggcggcacggctcacaggtcgatcttcggggaggcgtcgagcagggtacgcgtgtactcggccttgggatggttgagcacgcggccggtctccccgctctccacgacgcgcccgtggcgcagcactgtgatcacgtcggacatctcctgcacgatgcccaggtcatgggtgatgaacaggcatgcgaaaccgtgctcgcgctgcagccggcgcagcaggtcgagcaccttgcgctgcacggtcacgtccagcgacgacgtcggctcgtcggcgatgagcagcgacgggttgagcgccaaggcgcgcgcgatgccgacgcgctggcgctggccgcccgacagctggtgcgggaaccggccggccacatcggcgggcagctccacctgatcaagcaattcaaggacgcgcttgcgccggtccgtctcgctgagcccgccctgcacgagcatcggctcgccgatgctccatgccacggacttgcgcgggttgagcgccgatccgctgtcctggaacacatagcccatatgcttcaggatctcgcgcttgcgcctgccatgcgccttggcgagatcctccccctcgatgagcaccgtgcccgaggttggcgcgagctggccggagatcaccttggcgatcgtggtcttgccggctcccgattcgcccaccagcgcgcgggtcctgccggccaccagatcgaacgagatgtccttgacggcgaagctgccggccttgtacgacacggccacgtcgttcacctgcgtgatgcgcctgccgccgccgggcgcgtcactttccgtgatgcgttcgccgccggccgcatgttcgccgtctgccgcatgctcgtcgatgcgcaggcgcggcacggcgtcgagcagcatccgcgtgtagtcgtcggacgggtggcggaagacctgcgcgacgctcccctgctcgacgatcacgccgttgtgcatcacgtacacgtcctgcgcggcctgccacaccacgcccatgtcgtgggtgatgagcagcacggccagatcgaggtcgaccgccagcgaggagatcagggcgagaatcgccttctgcgtggtcacgtcgagcgcggtggtcggctcgtcggcgatgagtaccttgggtcggttgatgatcgccatggcgatcatcacgcgctgcagctggccgcccgacagctcatgcgggtacgacgaccacacgcgttcggcgtcgtcgagcccgacctcgcgcagctgttcgagcaccttggccttgcgctcggcggcgctgagctgcttctggtggtatttgagcgattccgcgacctgtacgccgagcgtgaacaccggattgaacgcggtggacggttcctggaacaccgtgccgatgtattcgccgcggatgcgttgcagcggcgcgtcggcggccagcagatcgatgccgcggccggcggcgtccttgccgtcgccgcccggaccggagtccggcccgtcatccacaagggcgtcgtcgaggtacgcgtggcccttcacgctggccaccgacggatcgagacggggcagcgccatcgccgtcaccgacttgccggagccggattcgccgaccagagcggtgatgcgccccgggaacagcctgaggctgacgccgtgggtcacctcccgctcgtcgaagctgacggccagaccgtccacggtcacgatcgcgcgtggttcactcattggaagctccttggatgcacaagcgttggaatgcgtccggcgcgcgcgccagcggaccatgccgccggcgcgcgccggatgcggatgccggctcagttcgcgctggcgagcgagacctgcgtgtagtccgggtacgccgggaagttgccgatgacgaagttggtcacgttcgatccgtggatgaacgtgttcttcgaatagatcagcggcacgaccggcgcgtcggccatgatcgtcttgtcggcctcggcccagatcttgccggcctcggtctgatcgatggtctcggtggccttcttgatcagctcgtcgaccttcgggttcgcgtaacgggccaggttgtagttgccgtggccgatctgcgaggagtcgaacagcggggagatgttggcgtagggcgacgggaagtcgggctgccacgagctgatggccagatcgtagtcgcccttgtcgttggtcagcgtatcggaatacacatcgtcgttaagtgtctggatgtccaccttgacgccggcccgcttgaggctcgtctggatcgaggaggcggtttcggcctgagcggaggtggcgatgagcttgagggtcggggcctgctcgcccgactccttgatcagctgcttggccttgtccacgtcgccggtcggatcggccttgtacaggtcgtagtcctcgcggccctcgatgccgggcgtaatgagcgtggtggcgaagttgccggcgatctcgccgccggaagccgtctggtaggccttcttgtcgaccgcgtactgcagcgcttggcgaatcttcgcgttcttcacgtgttgggtgttgatggcgaggtattccagcgcgccgtcgccgctggtggtcagcagcttcttgtagttcgggttggcctgcgcctgcgcgagctgcgcggccggcacgaatccggacaggaacgagttcttgccttcaccggtgccctgcatgatcgactgggcggccacagaggtgtcctgtcccatcttgaacacgatcttgtcggggcccgcggtgcgcaccggatcggtcttcttgtcccagtaggtgttgcgcacgaagacggcctgcttgccggcctcgttcgactcgaccttgtacgggccggaggccaccggcagcttgccgtagccggacgccgggcccttgccgtcgggcacgggggtgaacgcggcgagcgagacgacccacggccagtcgccgaacggcgcgttgaggtggaagatgatggtcttgtcgttcggcgtctcgatggagctgagctcctggccgtcgaacgggccgtggtagtcctgcgcgccctcgagcagcgtcttgtggtagctcaggccgccggtcagcgagtcggcgaaggaacgctccagcccgtacttgacgtccttggaggtgatgggcgtgccgtcggagaacttgagcccgttcttgagcgtgtacgtccacgtcttgccgtcgtcgctcgacttgccggtgtcggtggccagatcgggcacgaccttcgtctcgcccttgtcggtgatcttccacgcggtcaggcggcggaagatgttgccgttcgtggtggtcggcagaccctggctcttggccgggtccagatccatctccgtgctggacagcagcacgttcagcgtgccgcccttgacggtggtgccgctcgccgagccggtggcggcgttgtcgttggacgcgccgcagccggacagcgccagtaccgcggcacaagcccccgccgcgaatacgcgccatgcgttgttcttcatgatggttttcctctctatcggtgccggtccgtggagcagaccggcaagtatcgcgtgttgcggccgcagccgcactacttcgtgccgagcgcgaccctggggtcgagcaggctgtagcagatgtccacgatcaggttggcgacgatgaccagcacggcggcgaacatcgtcgcgccgaccagcacctgcaggtcgaggttcgacacggaatcgagcagcagcgagccgagcccctgcatcgagaacaccttctcggtgagcaccgcgccgccgagcagcccgcccagatcgaggccgaacatggtcatcacgggcagcagcgcgttgcgcagcgcgtgcttgaagatgatcaccgattcgggcacgcccttggagcgggcggtgcggatgtagtcctggctcagctcgccgatcatctgcgtgcgggtgaccctggtgtagccggcggcgctgagcacggccagcaccagccacggcagcagcagatgcgtgaaccagccgacagggtcgtcgtggaagttcacgtacccgccgctggggaatatctgcagcaccagcgaaaaggcgatcaccgtcagcaggccgatcaggtatgacggtgccgaaacgcccacgatcgacagcccgagcagcgtgcggtcgatcagcgtatcgcgcttgagggccgcccacacgccggtcgccacgccgatgaccagccacagcacggccgcgccgaccgcgatcgacgcggtgatcgggaagcggtcgaggatcagctggttcaccgattcgttgagacggaacgaatacccgaggcatggtgccgagcagaccacggcgccgccgccgctgccgaaggtgcgcccgacgaagatgcccgccacgtaattgcccatctgctcgtaccacggcttatcggtgcccatgaaggcggagacccgctgcagctgctcgggcgtgcacggcttgccgcacgacagctgcgccggattggtcggcagcaggaagaagatcaggaacagcgccagcgtgatgagcaggatgacgacgatcgagctcgccacgcgcttgccgatgtattgcaggattctcatgcacgcacccccttgcgcgggtcgatggcgtcgctcaggccatcgccaagcaggttgaagccgaaggtcagcaggaacagggcggcgcccgggaagatcagatacatcgggtcgaccagggcccactgcacggcgtcggagatggaccggccccatgagggcgtcggcgggttcatgccgacgccgaggaacgacaggcccgcctcggcgccgatgcgcccgggaatcgacagcgtgatgttgacgatgagcagcggcatgaggttcggcaggatctgatgccacagcacatgggcaggcgaggcgcccatcaccttggacgcgacggcgaaattgcgcttgctcagcgtcagcgtctgcccccggacaagacgcgcgatgccgggccatccgaagaatccgagcactagcgtcagcagcaccggcctcgggaagccctgcggcaccaccgccgacagcgcgatcgcgaagatcaggaacgggaagccgaagaagacgtccatcgtgcgcgagatcagcgcatcgaccaacccggggaaatagccggccagcagcccgagcgccacgccgatgaccagcgagatgaccgacgagacgacgccgatgcccagcgagatccgtgagccgtacgccacgatggagaacaggtcgacgccgcgcagcggggtgacgccgaaccagtgccgggcactgatgccgccgccgaatccggccggcaccgacccggcacccaaggcctcgggatgctcggcgtacgggtcgttgccggtgatggccgacaacggcccggccagcggcgccagcagcacgaagaacagcacgatggcgccgccgaccactatcgatgagcgagcgccggaacggagaacgcgccgccgtctttccgccttcggcgcggctttcgcagtcgcatccgtcatattgtcatccccattttcacgctgaacatgccgataatcatcaatccgcgcaggtgggcgcccgtgagccgggtcccctgcagccggtgtcctaacattaaggtttcgcagcaggatgacatgctgtggccttatcggttatttggatagcaggttatcaatggacggcaatcggcggataaggcatgccgcggggacatgcgggaaaaacccttcgttcccgcgcgtcacgccacccgtcattccccgaccgggctgacgtacgggcgcagcagtgtcgtggtgccggctgccagcaacgcaaaaatcgcgccgaccgggccgagccaagtcagcccgaacacgtcgttgaccaggccgccgaccgcggaaccgatggcgatgccgatgttgaacgacatggaattcagggaggcggccagattcaccgaaccggggtgggactggtacgccacgtccatgtacagcacctgggaggaggcgttctgcagatacatgagcatgccaagcgccaccagcagcagtgcgccgccggccggcaccagcgaggcgaaagccagcaggcacaggcagacggcctgcacgcagtagatcggtcgaatgtgggtcagcggctcgacccccctgccccgatcggccagcttgcctccgtacaggttgctccacaggcaggcacagccgtagaccaccaagccgacgctgatatagcgttcgggcacaccgatttcgtcgcgcatgatcggcgagagatacgtgtagaagacgtaggaggcggctgcgccaaagaccacatccgccacgccgagctggatgcggcggtcgaagaacagacggaattgcctcaggaaaccgatcttcgccggatgtgagttgcgtggcagagacactgccatcgatgccatcagcacggcggtgagcaccgaaaccaaggcaaaggtgacacgccagccgaaagtattggccacccaagtgccggccggtacgccgatcacagaggcgatggagaaacccgagaatacccaggcaatgaacttggtgcggtatttgtcggtggtcacgtcgggcgcgaaggtcatggagatggccaccagcgtgccggacaccgaggcgatgagcagtcgggcgatgagcagcaccggatagttcggcgcgaaggcgcacaggatattgccgacgaggaacacgcccatcaacgtcagataggtgagaaagcgcgggaatcgggcggataatgcggatccgagcggcgtgcagggcgcgtacacgaatgcgaagatggccaccagattacccacggtcacttcggagaccttaagtccggatgcgatgtccggcaggatgcccactaccacgaattcgctcatgcccagcatgaagctggcgaagatcaggatggtgaccggcagattgaagaagcggtcggtgcgcgcggtgttcgcaggtgtgttcgtcatgggtgctctcttgagtgctctcgctcgtactacaagctgattcgtcggttacgtcaatcgtttttcgtatcaactcagcgacaacactattcccacctctgcccgctacccaccaccacgacacgctatagaaaaccccgccgatgaccaatcatcgacggggttcggcacatgtgcaacgcttgcgattacagcttcggcagatacttcttcagctcgtaaggcgtgacttgctggttgtactcctcccattcctggtgcttgttgtccaggaagtagccgaaggcgtgttcgccgagcacgtcggccacgaagtcggatttctccatgatcttcagcgcctcgtccagcgagcgcggcagcggctgaatgcccatggcctgacgttcgccgtcggtgagctcccacacgtcatcactggtgggttcgcccagctgcatctgcttatcgatgccatcgagaccggcggccagcagcaccgagtaggcaaggtatgggttggacaccgggtcgagcgcacggaactccatgcgcgcggagttgcccttgcccggcttgtactgcgggatgcgcagtagcgcggaacggttgttgtggccccagcagatgtagctcggagcctcattgccgccccacaggcgcttgtacgagttgacgtactggtcggtgaccgcgcagatttcggccgcatggtacaggatgccggcggcgaactggcgggcggtcagggacatgttgaactcctgaccggcctcgtagaaggcgttggaatcgccttcgaacaggctcaggtgcgtgtgcatgccggaaccaggcgcgtcggccaggggcttgggcatgaagctggcgtgaatgccgcgctccaaggaaatctccttgaccactgtacggaatgtcatgatgttgtcggccatggtgagcgcgtccgcgtatcgcagatcgatctcgttctggcctggccccgcctcatggtgcgagtattccaccgagatgcccatttgctcgagcatgttcacggtggcgcggcggaagtccatgcctgggctgcgcggcacatggtcgaagtagccgccctcgtcgatcggggtcggggccttggaccagtcgtcctggctttcgaacaggtagaactcgatttccggatgcacgtagaacgtgaagcccttgtccttggccttggcgagcgtacgcttcaacacgtgacgtggatcgccgagcgaaggctcgccgtctggggtcagaatgtcgcagaacatgcgggcggtaccttgcgggccaccgcgccacggcaggatctggaacgtcgcgggatcgggctggacgatcatgtcgtcttcggacacgcgggtcatgccctcgatggcggaaccgtcgaagccgagaccctcctcaaacgcggcttccagttcggccggagcaatcgccacggacttcagtgttcccaacacgtccgtgaaccacagacgaataaagcgcacgtcgcgttcttcgaccgtgcgcagcgcaaactcctgctgtttatccatagtcgcctatcgttccataaccgtgttacgaggggcgttaacatctcactgtttgtcacctgcgagtcgcgagatttcatcaacatgccccggtccgcatgtcaggcatggttcgggcccatgccggcacggcactatggtagtgactataagcgaagatcatctcaccccatccgccaatccgcccgagctggtgccgatcaatcagctggatgattacgccgacttggatgcgttgcaggcacgtatagacacgctgttcgagagctaccggcattccctgtacgacgatcgccgttgggtgttcgatcatttgcgctatcaggacgcggcccgcaaggtggtgggcgtgggctcggtgggccagcgcgcgtggacgtcggtgtggatcgcgcgtgatatcgacgatccgatgatgattcagatgaaggaggccacgtattccgtgctcgagcattactgcggcgcgtcgccgtacgccacgcacggtgggcgcgtggttcaggggcagaagctgattcagaatacggccgatgtgctgttgggttggtcgagctttatggccgaggatggccgaccgcgcgactattacgtgcgccagttgtggaatggcaagggttcgattgatatcgacaatctcaacgcttcgggattgagcgatctgtcgcgcatgtgcgcatggtcgttggcgcatgcccacgcccgcaccggcgattcgatcgcgatcgccaattacatgggtggcaccgacgaattcgatcaggccattgcctcgttcgccgtcagctacgccgaacagaatgatgaagactacaccgtcttcaaaaagctcctcaaatccggcgaccttccttgctgagccgttaagcggacagcccaatgggctgtccgtaggcgaggcctgagtgaagcgatagctgagcaaaggtagcttaacagtctcgctaaggcgagtcctttgcctacttcgcgactgcgagcgcttcctggagcgtgaacgcacgtgcgtataacgacttgccgaggatggcggaatcgacgccgatctcggccagttccttgatggcgcgcaaatcgtccagcttggagataccaccggaggccgtgaccttggcgtcggtgcgttcggcgacttcacgcagcagttgtatgttcgggccggacatcatgccgtccttggccacgtcggttaccacgtaacgcgagcagcccacggagtcaaggaacttcatggtctcaaacaggtcgccgccttcgcgcgtccagccgcgcgccgccagtgtgtgaccgcgcacatccagaccaacagccacacggtcgccgtacttcttgatgaccgaagcggtccaatccgggttctccaaagcggcggtgccgatgttcactcgggcggcaccggcctcaagggccgcgtccaacgaagcgtcatcgcgcacgccgccggacagttcgatgttcacgcggtcgccaagctcatgaacgatttcacgcagctgatcgcgattgttgcccgtaccgaaagcggcatcaaggtcgaccaggtgaatccattcggcaccggcctcaacccaggtacgggcggcctcaaacggcgaaccgtaatcggtttcggaaccggattcgccttggcgcaggcgcacggccttgccatcgcgtacatcgacggcgggcagcagagtcaacgacataagaagagcctttcttcagttacttatacataatttgagctctctcgtcagaggggagcttcatgctttttacagcgtggcgatccagttcttgaggagctgggagccagcgtccccggacttttccgggtggaattgcgtggcggacagcgggccgtgttcgtaggcggccacgaaacgcgaccggccgtacgagcaccagctcacgcgttcgggcgcaccgctcagatcaatgtcgaagcgggacgtatccgccggcttcacttccatcgcggcgtaggagtgcacgaagtaaaaccgttcattctccacgccgttgagcagcaccgaatcgggggcggcctcgatcgtgtcccatcccatgtgaggcaccacgtcggcgtccagcaggttcaccgttccgccgatcagcccgatgcccgcggcatgggccccgtgctccagaccgtgttcgaacatgatctgctcgcccacgcacacgccaagcaccgggcggccggcgcggatgcgatcatagatcacacggtcgccgtcgaccttcttcagtccttccatgcatgcggcgaacgcgcccacgcccggcacgaccagaccgtcggcctccaacgactgccggtagtcggaggtgagggtggtgtcgacgccaagattggcgagcgcacgcaccatggaacgtacattgccgaaaccgtaatcgaaaacaaccgctgtggtcatattctctcctatcccctactggttggttggcgtctattcgatgcgggagccgcgtccgccacgcccacgcttggtatggttggcgagaatctgcatcgcctggtcatggtcgagtccagcggaatccaccacttcgaacccttgggtcttgagttggttcagggttacgatgccgagcatcaggtcctcgacgaagcgcggtgtggaggtgaacagcacgggcggcgcgaaactctgtccggcctctccctgcacgtacatggccacttcgagcttgtcggcacgattgactgcaagaatcacggccatgccggataccacggtggtcaggtccttggctgcggcttccgggccgtcgccgtccagattcttcagcaccgcgacggccccctgattggcaccgacgcatgcggcggagatgtccgacagctggcagaacgcggccaacagttcggcggaggcaagacgggtgacgatcagcgccaccttcgccttgttacccaacagtccagcgagttcgttgtcgaagccgagcgaggggtcgaccacgtcggccatggcctcattcaccgcatcagcgaccgacccggtgacgtcgtcggccataggctggccggaatcagcggaagccttatcagccgtatcatcattcgcgtcggaatcggacttcgctgaagcagcgtccgccgttttatcggcatcactggtatcactggcatcgccggatgccgaatcgtccgcgaattctttctcgaatccggcgagcgcggcctcaagctcctcgtcggagaagtgcgattcgtccggatcgaacttgtcgtcggccatcacagggctcccttggtgctgggcacgccgtctacacgcgggtcgatttccacggcgaagcgcagcgcacgggccagcgccttgaattcggcttcggcgatgtgatgcggatcacggccggcgagcacctgcatgtgcaggcagatgccggcgtggaaggcgatggattccatgacgtggcggaccagagagccggtgaagtggccgccgatcatgcagaattcgtagccttcgggctcgccgctgcacacgcagtacgggcggccggaaatgtcgaccacggccttggccagcgcctcgtcgagcggcacggtggcgtcggcgaagcggcggatgcctttcttgtcgccgagggcccgcttcagagcttcgccgaacacgatggccgtatcttccacggtgtggtgcacgtcgatgtcggtgtcgccgtgggcgtggatggtcaggtcgatcagcgaatgcttgccgagcgcggtcatcatatggttgtagaacggcacggatgtatcgatatcggttttgccggtgccgtcgaggttcagttcgaggtcgatgtgtgattcgctggtttcgcggacgatgtgcgcggttcttgccatcatgtctcctgtgtgattcgtcatattggattgcggcgggactcgaatcgcttcgggtctcgccgcaatcggaaagaaacgtcccttatgctgcttccactatacgaagcgcttcaacaagggcgttacggaaggtttccatctcctcgtcggtacccatgcacacgcgcagccaaccgtccggtccgaccacgcggatgagtacgccgcgcttcaggagctcgtcgaagatggcttcgcgcttgtcgaagtgcccgccgaacagcaggaagttcgagccggattcggccacttcaagcggctggtccttgtaggtctgttccttgagccatgcggcggtggcctcgcgggtttcgcgcagatgctcgacacggctcagctgttcatcggtgtgttcgaaggcggccagtgcggcggcctgggtcacggcggacaggtggtacggcatacgtacgatgcgcacgcagtcgatgatgcccttggatgcggctaggtagccgactcgcgcgccggcgaaggcaaaggccttgctcatggtgcggcttacggccaggttcgggtggtccttgatcaggctcacggcgctcggggtgccgggcttgcggaattccacgtacgcttcatcgatgacgagaatcgggtgcacgccctcacccgcgccggccacttcggcggtttcgcaggcggcgagaatacgctcgatatcctccatcggcaacggggtgccggtcgggttgttcggactggtgagcagcaccatcgagggcttgacctcggcgatggcctcaagcaccttgtcgacgttcaacgtgaagtcggcgttgcggtgggcgagcttccaaccggtgaaggtgtcgcgagcgtactccgggtacatggagtacgtcgggtcggcaccgagtgcggtgcggcccgggccgccgaaagcctggaacagctggagcatgatctcgttggagccgttcgcgccccacagctcgtccacgtccagacgggtaccggattcacgggccaggtaatcggagaatgcctgacgcaattcaatgtgctcacggtccgggtatcggttgagtgtgggggcgatttcacgcacacgcttggcgatggtgtcgcatacggccgggtccggcgcatacgggttctcgttgacgttcaggcacaccggcacgtccagctggggagcgccgtacggctcctcaccgatcaggtcgttgcgcagcggcaggttttcgggaatcgagctcatcgcagaccggctcccctctcctgctcgcgcagggtggccttgtcatacggatccttgacgaagcgggagagcacgcactcgccgtgggcgggcaggtcctcggacaccgcgaaggcgttgatgcgggcggcgagagccttgaggccttcctcgtcgtattcgatgacttcgaccggcttcatgaacgtgtgcacgccaaggcctgcggcgaagcgggcggtgccgccggtgggcagcacgtggttggaaccggacatgtagtcgcccagcggcaccggggagtacgggccgcggaagatggcaccggcgttcttgatacgcttgacgacagcatcggcatccttggtctgaatctcaaggtgttcggccgcgtaggcgttggccgcgtcgatggactggtcaagaccgtcggtcagcacgatggcagactgggtgccggacagcgacgtgtggacgcgctcggcgtgctcggtcttcggcacgcgatagttgaggttctcctgtaccttgtccgcgatgccggtggagtcggtgaacagcacggaaccggcgagctcatcatgctcggcctggccgatgaggtcggcggccaacaggctcgggttggcggtttcatcggcgatgatgccgatttcagtggggccggcgaccgcgtcgatgcccacgaatgcggagaccagtgacttggcggtggccacgaagatgttgcccgggccggtgatcttgtcaaccggatcgcacaggatgtcgccgtcctgcggctcgctgcccttggcgccgtatgcgaacatggcgatggcctgggcgccgccgaccgcgtatacctcgtcaacaccgaggatggcgcaggtggcgaggatggtcttgttcggcaggccttcctcattgtcgcgggcgggcggggtggcgatggccaacgattcgacgccggcggcctgggccggcacagcgttcatgatgacggagctcgggtagacggccttgccgccgggcacatacaggccgacgcgctgaatcggaatccagcgttcggccacgcgggcgccttcggcgagttcggtgtagaagtccttcggcacctggttggcggccacggcgcgggcgcggcgcaccgattcctcgatggcggcgcgcacttcggagtcgagcgtggtcagggcgtccttgatcgcctcgaccggcacgcgcaggtttttcgggcgcacgtgatcgaacttctcctcgaagtcgcgcagggccgcggcaccgcgttccttgacatcgtccagaatcggacgcaccagatcggtggcttcggaagtgcccattgcagcacgcggcatcgcggcgagcagttcggcacgagacaggttctgaccacgcaggtcaatgatttgcatgatgttctcactcataacgccccatcgtaccaacgtgcggggcctaagcggcgaggaacgcccatgttcacccgtatcgtgagattatcgtgcgtgatgtggattcgtgatgcaggttattgacgcacgccaaatgcccgagcggtctcatcgataatcggcatgtcatgtacggcgacgtgactcacttcggaccatcgcggaccaatggctaattgctcaaccaaggcttgcactgcgtcgctactgccttgtgcttccagctcaaccgagccatcgcggcaattgcgcacccagccctgtacaccaagtcgacgtgcctgagtcaccgtaaaataacggaatcccacgccttgcaccagtccggtgaccgctatatgtttgcggaccaaattcgctgattgcctcatgatgctcagttcctaatccatcgttcgcagcatcgggtagaggctcaggaatcgccggtatgcgtcggcatatgtgcgtgcggtgtcaggattcggctggtatacagtgcattcgcatactgattgcagcaggtctggtacattgaataccaacgaggccattgccactgctggcagaatatcggcattggcgaacacttcgatgggatgctccaacacatcggccagaatctggcaccacgcattttctctggctccgccgccaatcagggaaatctcgctgggtttggcgtcaaaactttccataccttgacgaatggagaaggccacgccctcaagcgtggcacgcatcatgtctgccttggtggtgtctggatcgaggcctacataggccccgcgaatattcgggttcattacggggaaccgctcccccaccagatatggcaggcacatcacaccgttggagccgggtttggatgtttcgataagctgatgtgcttccgcgtaatcgccatcagcgaatacgccggtaacccatttatgcacgtcaccggcgttgaggaatggcacggcattcacgaagacttcttccacaccaaatgccagattcgcagcaccgggcttgccggtgaacggttcgggcgaaacggtggcgatccaacctgaggtgccgatattgatgttgtattgaccagggcggctgacaccgctggccagcgtggtggcacccgcatcgccaatgcccgcgtataccgcagttccggcggagaaaccggtgcgttgtgcagcggattccgtcactgtgccaatgttgtcttgcggattgtgcaggtgtggcaacatggccatgtcgattcctgcggcctcgcacaattcggcatcccattggccattacggatattcatggcaccggctgtggaacaagccgccacatcgcccacgcattcgccggtcaattgggcgatcaagtagtccttggaactgatcaatacatgacgaatgcgcgcgtacgtttccggctcgtgttcacgcagccacatcaacttgggcaacggcaagcagccttcgagccggttgccaacggtgttcaggaaacgttctactccaccctgatatgtcttggcgagttgcttggcctgttcctcggctcggccatccgaatacagaatggcattgcggacgggattgagctcgccgttcaaagcaataacatcctgcatctgaccgctgaaaatgatgccacgaatgcgagtcacattgaattctgactcggattgccgcgcctgctcaatcatgtgcctggaggccgagcagaaagcttgccaccattgatcggggctctgttcccgatagtcgccgttgataataaggttaagctcactactcgcactggctacgatacggccttgcctatcaaccaaggcacccttcaacgccgtggtccctgcatcgaatgcagccacatattcctctgccacgtgctctccccttcaatctgggttgtgattctactggttattatcgtagccgcttactcgttgcattcattaggtcgatttcacgttcattaggtcggtatgccgtaagacggctcttcaggaatggcgtaatgactgggttctgatgccgaagaccctgggcccattgacctaatgaatgcaataatgacctaatgaacgagaatcacgccatcattacgcaattctttgcccgcgaaacgcggctcattgcatcgtcttgtttctaaaataggaaattgaatgaacactacgaatagtgaggcattatggcaattcaatcgacaattatgctgaacaacggcactgtcatcccgcaggtgggcttgggcgtattccagacaccggatggtgatactacagtgaacgcggtgcagacggctctggagaatggctaccgccatatcgataccgcaatgatttaccgcaacgaagcctcagtaggtgaaggtattcgccgtgctggtgtgccgcgcagcgatttcttcttgaccaccaagctgtggaatgacgatgttcgcgcacgccacggcaaggatgcattccaagaaagcctcgaccgcttgggcgtggattatgtggatctgtatctgattcactggccggcagacggctggcagcaggcctgggatgacttgcaggagatttatgcctctggccgtgccaaggccattggcgtcagtaacttccaaaagcatcatattgatgagctgctgacccacagcgatatggtacctgccgtagaccagattgagtcttccccacaattcaccaatcaagagctcattggccagctgcgtgccaagggcatcgcaaccgaggcttggagtccgctcggcggtaccggcggcaacctgctgagcaacccagtattggccgagatcagtgccaagtacggcaagtcacctgcccaagtggtgattcgctggcacatccagcgcggtatcgtcgtgctgccgaaatccactcatgccgagcgtatcaagcagaacttcgaggtcttcgacttcaacctatcagtcgatgatatgaccgccatctccgccatcaacaccggcaagcgcaacggtgctgatcctgacaatttcaatttctagacctttatcggtccagatacgcaaagagggaactctccgtcattggagggttccctcttctatatgctttcgattcggccacaccctaggtgcgagagcctatgtcttgttggtttcggatataggggaagccccttggggcgtgtgctccgaggggcttcctgtacgtgtggtgcggcggcgtgctactctcccacaccctgtcgggtgcagtaccatcgccgtgccaggccttagcttccgggttcggaatggga

SEQ ID NO: 2612 - DNA, 110264 bp, Unknown
  R222_15m  MAG No. k141_20486
cctggcgcacccgcctcttcggccatggcgctggccggtgcggtcatggccgcgaacagtgtggccgccgcagcgactcccgccatccatgattttgctttcattgttctcctccttatggaatatatggatgaatccatgttggtcatacggaacagttcccgtatgaacgttttctgatatgcgcggcgattgccaacaccgccaacgcccctccggacgccaccatgccgacaatcgtcaccacccacgcggcacgacgccccgcggagggcagcgcggaaaccggttgcggccgattggtcagacgattgtccgtaacgccggcccaatcaccccgtccgtgcagtacggctttcgccttgggatcctcctggcgaatcgtgaattcggcccaggtacggtcgctgtcgggcaaccgatatccgccgggcgcggtgatctccgtcagccggtaggtgccccagtcgagattgtcgatggtcagtttgccgacggtcggatccttgtctccggtgccggcacaggcggcattaccgtcgcccacgcaatcggcgaagttatagagggaatcgttgaccttgttccacgtaccgttatcgttgcgtcgttcaagtcgccacgtggtgccggacaggtattcctcgtgatgatcggcgtccaccttgctccacgacaccgagccggtgatcttcttgtctcgaatcgtcaccgtatagccaccggtccattgatgcaccgacgcatgcggactgccatccgcgttcgtcgggccgaaatacgcgcctccgccgcaattcgtcagatagaaatcggtctgctcgtcgttgatctcatagccgagcggcgcttggagctctttgatccgatacgccgtgccgcactgcaacccttgggttttgccgacgacgatcatgcctttctcatccgtcaccgccgtaatgggcgtgggcttgctcgacgcatagtcatggccgtcccattcgagcagttcgaatttggcgccggccagatcccggtagccggatgcatcatcatcggttttatgcaacagcatcgtcgatgtctgcacgatgacgccgctactgctgatggccgcgccgttcgtattgaatgcgccggcatcggaccatggcgagttggtgaattgcgcggtgttcgccacgtcgaatccggcggagcctttgaacccgtactggtagctgatggtcaccggcgtggaatcgggaacgtataccgtcaatacgccgccgagtttggcatcgttttcctgatatacgatcgcatccgaggatggttggtacgttttgccggccgggcaggactgtccgttgcctatccaagcgagacacacggtcacgttgcccaggaacgtgacctgcggattgctgccttccggtatggccggcacggtcagcgtgtctttgatgggcagcatatcggtatcggggacgtcatcctgtttcgcatgcgtggcatcgatgttcagtccataccggttggcgcgcacataataggttcgggtgaagcttttgccgtcggaggaccagccgctgtcgacgttctgcttgtcttcgacgccggtattggttttctgtaaattatcgatgaaggtttccgacgtggacacggaaggtatgctgccggagcccatggaaaccgtattacggtatttggccgtcaggcaatcgccggcaccgtttttcagcgcgggatcggcgacgcaaccccgtttgccgtcgtatttgccttccatccagtacttgccgtcgttgatatcgggagtgcgtgcggccgcatacagatacacgttgccgtcgttcatgagatcggtcgcctgttgggggatggtgatctggtacgtgcggtcgccggtctgcttgacggtaacgacatattgcacaccctgggtattggtgaaccgcgtctcccccacggtaagccactgtttgcggtcgccatgatcggagaacgcgaacttcacgtcgtgcaggccctccggcagggtttccgtgaagacgagcggcgcgcgacgccaattgtcggtcacgtgcgcgctgatacgccatcccacttgcctcacggacaccggatcgggggtggcggtacgtgtgtagtcggcaccgttggccgagcaggaggtgaatttggggttcccctgtccgtcgaccggatcgccgcaaccgtctttgaccaaagaggcgacttgcacactggaggtgacgggtttgacgaacgctccaccgacgccggttcccgcggtggctgaattcttacgcacggtcgtttcactggaatcgaacaggctttgataggtgatcgccgcggttgtgccgggggcaagcgcgttgtcggccacgaaccggaaggacgtgtatcgctgtgattcctgcgccttgttaaggtccacccaggtcctgccgttgtcggaggacacttgcgtcgctccggtcagctgcttaccatcgacggccacgcgcagactgtcctgcagcagttgcttcgtgtaccagacgccgctgccggtgtcctgcatgacccatcccgccggcaattgaccgtcgccggcattgcgcaccgagacattccacgacgcaaggccgcaatggccttccgccacgcccatggtctggcactgctccgccgagggggtctgctgcccgcccgccgttttggtgagtgagatccttggccgcagcggattccaagcgactgcgttgttggtgaaatagtcgcctccgttgttggaacggacgaaccgcgaaatgtttttcgaagcgggatacagcacatcattggcgaacgtcgaatcgtattgcaacgtcaacgtctgccctgcgggaatcgaatacgaatccggctggaaaacccatttccaataggttcccgtggccaatccgccggccggccatgtgacggcgggtccgcccttgtagttcggcagcgtgaccttatataccgtcaacgtgccgtgccccatcgttgtggtcaacgtttggtacagatcgttgatgttctcagccgtgtaccatcctcggcttaacgagatggaaccggcgttcggttgatcaacgttctcatacgccatccaatcctcgatcctcacgattggctggtcgatggttcccgtgttgacgtattgcgcctgccatctggtactgagcgttccgtccggttgcagcgtcggtgtgccgacgacctgcttggaggtgctgccgcttctgcggtacatggtgatggtggtggtatggccgttgccgaaatccaatacggtctgccccggattattgccggtcaccttgctgcgatcggcttcgatgtacaatcggccattgtccagcggggcggcggcgttcttgctgatggcgtgctcgctgaagacgatggtcaccaatccgtcgggagcgatcgtgtacgtgccgagatcgtcgttgagcgtgcccgacatggcggtaccggtgccattgaatcccgcgatatggtatcggaacacgtggttgtcttcggtgatgcttcctttgggtatgacgaattgcgcgtcaaaacggaattgggctattctcgtgctgtaatcgaatgagacattgccgtgttcatccaagggaacgttctgccattgcgtcgaattctgcaatcgatattgcactgcggcattgctgatgcagccgaccaatcggccggaaggcttgctggaatcaacgatggcaccctgttcgtcctggttccaaggacgaccgcacgccggcgtctgttgtgcggcatcgacagccccccccccgtcgacggcggcggccgtggcgaccggtacgatcatgccgacgaccagcgcgacagccgtcgccaaccgcgttaaacgtgtgaccataccagaactccgcacatactgacggttcatcgcttcgcgcgaaccatcgtgagatagtgaccgcaagggatgcgcttgtttgaatgcgtgccgaagcacacgtccctaaacgcgaaaacgtaaccctttattcaacaaatgttatcacttgtatcatatgtcggcatatctttgtgccgggatatggaaccggtatacggccgcgcctccggccgcgcgcgtatacgaatacttcgcgccgctttccgcttctatcaggaacagttacctgaataaaccgggttacctgaataaaccggacagttggctccatagcgacggcttgcgcagcaaatcatcaccctcgccctcgccaggcgcggtttggttcaccgcataggtgtaggcgcgtttggaactgggcttgcccaccagttcgccaaactccagcaattgcgtacgcggctcgtaagggtgacggatatcaaattcgatcaatcgcgtggcacgtttggccggagccggtccgtacgtattgaatccgcaggttggcgtagcgataagcaacagaccctcatgttcgccgacgaaaccgttgcgatgatcatgaccagctacgacgccgaaatacccctcgcgcagcgcctcaaactcgtccgactcatccgggcaggaaatgccttcccccagatacccgccggcttgagtgcgatcctcgtccagcacataataggtatccgcatgcttgcggtagccctgcatggcgaaagccgcattggcggccaccggtttgagtacctggtaatactccggcagcggcatgtgctggaacaccattgatttggctccgatatgttcgggcaaagccttgaggaaggccaatgtctcgggcgaaggcgtgccgaaaccgcctccatgcgcatagtcaccggaattcaccagtaccagtcccagtacgttgcgcgtgcaatccacatccatcaccggcaatgcaaaagtgccgggaatggtggacgcggaaatcggcgcatcggtttcttcaccattggttgccgcaggcgagccgtccttatgacacatatatacggtctgcttggccagcgcatcgctcggcggattgatgcaaccgggaaactcgcggtagattccgtcgagttcggcattgctcaaaccgcactggaaatcgtggttgccgtaggtcaccgcccacggtatgccccgtgacgccaaaggagaggtaaattgaccgatggccttgcgcaccaattcacgcgtatggttcaacgcagattcaggaatcgcctcttcgcaccaacggcgtttgcggaagctcttggcaaaggccggatcgtagccggcgatctggttgccggagaaaatcatcagatcaggccgtgcggcatcaaggctggcctcaatcagggcgatggtgtctttggagactttcggcccatcctgaatgtcggcaatctgcagcacgcggaacttgccggaatagtggaattgcagtcgtccgagacgcgcagagatagagaccgggcggccgtcttcggcatcggccggcttgatacggggtttcgacgacatcccctctggcgtacgctgtgtttccgtcatgccctccactgtacacacaaacgaaaaggcccgccggagcgggccttttctacaagttcaactactggagcagaatctctgcacaacatcatcgtcgtaacggtaagtctttccaatgcccgtccaacgtaacagtcctcgtgaccatacactatttgtgggctctgctctgttcagttgttcttgtacctcataatctattcatcactcccgtttctcgcaacctgcagagagtcgttgtgcgttttttatcacaactgttcaatcgcactttctggctatcggaaaacgagctgaaccgttcacatcgaacccgtctgatgttcggtttcgttcgtttcaccgccgctcacggcgtgtcgcgagcacgctagcacactcagaaccaaccaacaccgaactaacatgaacacccgttgaattctggcgcgttcagccgttttccggccacgccagagcttacgatataagctatggcacagatatttgacgcaccctcgaaggcaattctgcgcagccaaatcgcagagcatattgccgaaaacgacaacaacgaccgccgcgtcgatcaggaaggcgaggcaccgctgcccaaggaccgtttcttcgaccgcgagctcagctggctcaagttcaaccagcgcgtgctcgaatgcgcggagaacgaagacatgcccctgctcgagcgcgccaacttcgccgcgatcttcgcctcgaaccttgacgagttcttcatggtccgcgtcgccggcctgaagcgccgtatcgactcgggcatcgccgtgccgtctgccgccggcctgagcccgcgtcagcagctgcgcgcgatcagcgagaccgcacaccgtctgcaagacgagcacgcacattacgcgatcgacaccattctgccggaattggagaaggagcgcatcgtcctgctgacgtgggacaagctcacctcctccgagcaggagcgtctctcgcgctactaccgccagcaggtgttcccggtcctgacgccgctcgccgtggatccggcccacccgttcccctacatttccggcggttccatcaacctggccgtgattgtggagaacccggcctccggcaagtcgcacttcgcccgtgtcaagatcccgggcaacctgccgcgcctggtgccggtggacgacatgaccgacgaggagtccaaggacgagcgttacggcttcatcgccatggaaaagctcatcgccgcgcatctggaatccctgttcccgggcatgatcatcaaggaagcccgctccttccgcgtgactcgtaacgaggacatcgacgtggaagaggatgacgccgagaacctgctcaacgccatggagaaggagctgctgcgccgccgcttcggaccgccgatccgtctggagatcacggacaccactagcccgttcctctcccagctgctcgccgaccagctcggcgtgagccaggacgaggtataccgtctgcccagcccgctggacctgaccgtgctctttgagctcggcagcgtggaccgcccggacctgaagaaccgtccgttcgtgccgaccacgaaccgtcagatcgccgaggtcgagtcctcccgtgcgcaggacattttcgccgccatccgcgagcgcgacatcctgctgcatcacccctatgactccttctccacttccgtgcaggccttccttgcgcaggccgccgcggacccgaaggtgctggccatcaagcagaccctgtaccgcaccagctccaactcgccgatcatcgacgccctgatcgacgccgctcatgccggcaagcaggtgctggctttggtggaaatcaaggctcgtttcgacgaggacgccaacatcgcgtgggcccgcaagctcgaacgcgccggcgtgcacgtggtgtacggcatcgtgggcttgaagacccactgcaagctcatcgaggtcgtgcgtcaggaagcggacggtctacgccgctactgccacgtaggcaccggtaactacaacccgaagaccgcgcgactgtacaccgatctgggtctgctgacctgcgacccggtggtcggccaggatctgactcgtctgttcaaccagctctccggttacgcgccaaagtccagcttccaccgtctgctggtggccccgcgcaccgtgcgcaccggtctaatccagcgcatccgccgcgaggaggacgccgcccgcgccggcaaggaggcctggatcaagatcaaggtcaactccatcgtggacgagaagaccatcgacgccctgtaccgtgcctctcaggccggcgtgaagatcgacatcgtggagcgcggcatctgcgctctgaagcccggcgttcccggtctgtccgagaacatccgcgtacgttcgattctcggccgcttcctggagcactcccgcatctacgccttctgcaatgcggacggcccgcagatcggcgagggtccggcttccggcccggaggtctacatcggttcggctgacctcatgcaccgtaaccttgaccgccgtgtggaggctctggtgcgtgtcaccgccccggagcagattgacgggctcatcaagtacgtggacctgcagatggccgactccaccatgagctggcacatgcagcccgacggcacatatgtgctgcacaccaaggacgacgagggccgcccgctggtcgacagtcaggaatacctgattcgcaagcaccagcgccgccccaattcgcacaactgatttcactcgatgctccctgtcagcacgagctgactgagggtggttacgatgcccggctcctctttcgagaggatgccgggcatcgttgttcagcgcgcaaaaactacgtagcagcggtccaacgtgacctacaatacaagagatgggtacgaacagtatgagacgaatcgtggaagccgccggcggtattctgtaccggtggaaggatgatgccgagccgacgcaggcatcgtctccatcagcgaaatccaatattgccaccgatggcaccatcatcgcgaacaccacggattctgacggcaaggccacggcagcacccggcgcatcggacgcggctcccaccccggacccggcgcaggccgacagcccggccgcggcggacaacgtactcaaccgcatcgaactgtgcgtcgtgcatcgcccgaaatacgacgactggagctggccgaaaggcaaggtcgacccgaacgaatcgcaccggcatgccgccgtacgcgagatcggcgaggaatcgggcctgtccgtggaacttggcccttatctgggcgacatcgagtacccgctgtccgaagaaggcagcaaacagcgccataccaaggatcggtcggcggataccaagcatatccagttctggatggccacgccgatcagcgccatcgacaacctgcggcgtacccatgcgtttggcccggtgcatcgggcggacatcggcgaaatcgacgaagttttgtggctgacgccggccgaggcccgcaagaagctcagccattccaccgataaggacatcctcgcgctattcgttgatcgggtcgaagaaggtgcactggacgcggtgccggtgattatcgtgcgccacggcaaagcggaagcgcgcaagctgtggaagggttcggacgcgaaccgtccgatcacgccgcgcggcgcggctgcggcatacgcgctgaaccgcgagctggcgtgtttcaatccgacccgactggccacgtcgccttgggtgcgctgccaggagacgttggagatgttcgcgtggcagaccggacgagacatggttcatctcgatccgctcaccgaagatgcatacgccgctgcgccggacaccgcatgggagtgtctactcagcgaaatcgagttcgcacttgagcgccgtcagcccatagcgatatgcatgcaccggccggtgattggtggtatgttcggacacctgcgcagcatgtgcgttgcgccgtctctgagcaaacgcctgatcgccaagacaccgttcatgccgaccggcacggcggtggcgctgttcgtcactccgacgcctcatggtcccaaaatcatcgatattcagaaggttcaaccgcttgtctactagacccgcatttcctgattcatccaactcctcggccgctgccgctgcagctcatgccgcgcacaatggtgccgccggcagtctgggcccgggcttcggctcgttgcgtgcggccggagcggcattcggacctgctcgcatgggttcttcacgcccctcgcgcccggctcagctcgacccggctgtggccgatggattggccggtggcatggacccgcaggcgttgagcgagatgagtcatctgtctgctgccgcattgctggatcgtgtgcgccatagcgaagacccggcggttgttgagcgggtgctcacgttggtggagacggtcggcgtggatgaaatcgccgaactatggagcgatgccgagccggattcgctgcctggtgtgctgtggcgactgtatatgttgcgtacgtggatgcgatcgaatcgcgactcgatcgcgcatctgtggcgcttgggtgagccggtggccactaccgcctccgccatcgccggcgtggatcaggctcccagtgaagatgacatcgtgcgattggccgattcgattctctccggtgcttttgtgggcgattttgccgtggcgcttgagcgtgcggcggcgtttaccgatgtggtggcgttgggcttgcgcgtggaggcgcggcgcatggtgacccgggccgaggccaacggcgccttctcctcggatgccgatgagaaggccgtgcgtaccaaagccgcccgccttatgcacaccgccggcagcctcatggccaccgccaaggatttccagcacggcgccaacctctggcgtcgcggacggttggagtaaatcctgctccgggctccctctgatgagagagctgtcacgggcgatgcccgtgactgagggagaaactcaccaaccgcaccccaacaatcagctaccagccaacaccacacctccccggcgcggcgagccccatcgcaagctatactaagtatccgcgtcggaccgtgcttaagccccgggctccattttttgccgccgcgagcggcccttgcgccgacaggcgctttcgcggttcggcgcttcttttcttttacccgattcacgccccgaacgttgcgatgggcacgaccagtatgccgtcattgcggcgataggccttcccacctcggccggtaaggaacatcatgaactctggttcgcgaacttgggccatggggttgccacagattttgtcgcggaaggatttgagcttatccgcattgtcatcgttcaccttaaggtcactgagttttatttcgatagcaccccacctgccatcagacaactcgataatgacatcaacttcaagccccttgtcatcgcggtagtaggcgatgcgattgttcgcgcccggcatggccgacagatatacattcaaatcacgaatgcacagcgtttcaaacagatcgccgagcgtctgtgtatcgcgcatcagagtattcggcgcggcacctaaaaccgcagcaggcaacgaaggatccacgaaatatcgcttgggcttggttcgcacacgactctttgcgcggagtggcggctcccaaccctccaaatccgtcagaaggtacaagtccttgagcattcccaaatagctctttactgtctgcgtatccggttcacggcgctcatcgccataggccatatccgcagccagcgtcgcatattttggtgcctgcgatacgttcacggcgagcgcacgcatgagtgcacgcgcggtttcagggttcttgttcatcttgggcacgctgatatcaagcacactcttgatatattcactcggaatttccagagcaaactcgtcatccaaatcaagatttgcgggccacccacctcgacagcaccatctggcaatatcttcaatgctggttgcacattcggcaggctcgaattgtccatcaaacaaaccagacaagctcactacaccggtagattgccctgactcgcacagactcataggccacatacgcaagcgagaaattcgacctgtgccactgtggtgaattgtttctcggtccttcggaatggccgagcccgtaagaatcagctgccccttgcgattcgcattgtcatccacatgacgacgagcggcatcccaaatttgcggcacatcttgccactcatccaccaaatgcggttcattacccatgagtaccaatgccggatcagtctgtgcggccgcaaaggtagcggcatcatccagacgatccatacttcgcgagcgggaaagcgccgtccatgtctttccacaccattttggcccgacgatttccaccgcgccgaatgctttaagtaacttacctaacctgccatcgaccacgcgagcacgataatcaggttgagtcaaggtatcactacgattgttcaaatcgttcattttccggcctttctcagctacccaatcacctcaatatagattttacacctttctcattcccggttttacactatttccattcccggttttacaccattccgattcccggttttacaccgcaaggtgtctagtttcttcctatgacttaatccaccgagaatcaatccaacgaatcttcgcgcacgactgcgagcgctaggctaaacttgacccattccgatgagacatatttcacaataccgtagctttttcagctggtttccagaaaccgttgacttactgtccggttcggcctagatacgctctttttcgaatctcatgaaatcaacgtcaacaccttggggaaactctcatgaaggcaaccatcaccaaagcgactatcgcagttctcgccggactcgcgatcctcgccgatgcctttctgcttttttcgatgaagatatccgatagacgccacgtgaatgtcattgccatagtgacggatgcacgcgcacgatgcgagcgtcgagccgctccacgatgtcgtggtgatgcgtggagaacagtacagtcttgccggcatcagtgaaggcgcgcaatacctcaaccactacgtcagtattgcgctcgtccaagccgtcggtcggttcgtccagaacaagcaggtccggattcatcgacatgcagcaggcaatcgccacacgctttttttcaccgccagacagacggtatggcgcccgctcccgcatccgatccaagccgaacaacgtcaccatgtcatcgactctgcgctgtacttcggcatccggcaaccccatctgcaacggaccgaacgcaatctcctcttccaccgacgggcagaacagctgggtgtcggagctttggaacacgaatccgatgcgctgatgcagcgctttggcgaacaggctgttcttcgcctcgacttcctcgcgaaccaccggagtaccgccaaaccgatactcgcctgagtccggaaattccagcgcattgatgatgcgcatcagcgtggtcttgccgctgccgttcggcccgagcagcgccacgcgctcaccgcgttcgacggtcagcgaaaaatcacgtagcacggcgtgcgacgaggtttcatcgtcggcgtcgccgtaatctttataggaaaagtcgatgtgattcagttcgaccagcgggtcgccgcggaaccatgagttatctggctgcatggctgcagtttgtttatgattacgctttaatccgaacattattgggctccattcattcgaaccaccctcatcccgaatacaccgccagcgcaatcattgcagcaatgcacacggcatacaccccgttgcgccacgtcagcagacgctcgtggtggatatgatacgtaccgtcaaacccccggcacaccatcgattcagccatttgccgcgcctgcgtattcgcacgcagaaacagcgcgcccatcaactggccggcggacgtcagcttggtccggtcgcggcccacgctgcgcaaccgcagcgcatccagcaactccaccatcgaacgaccgagaatatcgatgaactgaatcgtcacgtcgcagatataaatcaccgaatcagggtagccaactgcgcgcagtccggcaatcaggcgattccacggcaccgtacgcgccagtgcgatcaccagcgacaccgccacgaacgcacgcaccaccagccggaccggcgcactgtactgcccaatcagcaggctcggcaccgccacgaccaggctcaggatgcatacggccagcaccgggccgagcaacgtcctcatcaggcgcgccggccgggtcgccatcatcagcagcaccaccgccagcatgatgtacgagaacagcatgttgcatgtgatgttgacgcagacaatcgcggccagtatgcccagcagccgcacgcccggattgaccgagcccagcaccttgtcgaccgggctcgactcaatcggcaacgcatgaccaacctgctcgagtacgctgccgaaatgccccaggttgtgttcgatgaaggatgacttgtcagtcggaggatcgtaatcctccgactcacgcatccatgcaggtatcgtcaacgcgcggatgtcttgccgttgccgctcactgcgagcgccagcagacggaacacgatagtgagcacggcgatgccaatcactgcggagagaatgtagccggcgatgtccggcagaccctgcagcgagtagtcaggcaacagcgcatcccacgagaagccatgggcgatgtactgcggcacgtagttgagccccgtggcactcatgaagtcctcggcgccccactcgccccaggcgtcgccggtggcgagcaggccgatcggggaaagcaccgccaccacggccagcgcaatccacgcagacttgcgcagtccggcgtgcgcgacctgtttgccgtcagcaccggcggtctcggcgaagttcacacgggcattgtcttcgataatctccggtgcggtgcggcgcacgaattcgacaaccaccacggtcaccagaccctcgaccacgctggctacggccaggtgcgggatcagcatggcgggaatcgtcacgttaaaggtgaacgggaagtagagcgcctggccgtcagcggctttgaacagcagcggctgcacgccgagttccagcgccacgcagaatgcggcgagcgtgatgccgatatagccggacacgaattcggccacgcgttccttccagccgtcgggcagcaccttgcgtagcaacacgtacagtccgtaagccacaaacggcagcacgaacgccatgttgaagcagttggcgccgagcgtgatcaggccgccgtcgccgaagagcagcgcctgcagcagcagggccaccgacacggagaccgtcgcgtactggggaccgagcagcagagcgatcagcgcgccgccgacaccgtgcgcggtggtgccgccgggcgtgggcacgttgaacatcatgatgaggaacgagaacgccgcgccggcgcccaggtaggccatcttctccggcgtgctgttgcggatcacgtagcgtaggcacagcacccacaccggaatcatgatgacgtagaacaacgccccggtggacggcgaaatgaaattatccggaatgtgcatcgccaatgtgacggtgtcaggtacttcgatcatatccaacttccctctttttgttgatttcggagctcgaccacaacctcccgctctaggaacgtgatatgtaataccacaactgtgattcgtctaatgcacaaccatgcaaaatagcttgcaattactagcgacacaccgtgtaccatatatccggtttccgtgttttcggatatttttccgctatattttttgcatatttcgatcattcgttacaaagtgacgcaacaggctctctacactgtggcatgaaggacgtggggattctcacgccacaagcaattttctccaaggagaacggatgatcgccaaagaaatcaccggcaacatcatcagtcagcagtacagcgacggcaaacttaatgtgtcgattgccttcgactggttcgaaaccgataagaagcgcatgcgcaaggtggccgaggacggcaccgagttcggcatcatggttggcaagaccatcaaggatggcgatgtgctcgccgaaaccgaagacaagcgctatttcgcacgcattaaaaccgcacagctgattgagattccggttaactcgatgacggaaatgggacgcctgtgcttcgaactgggcaaccgccacctgagtctcaaggtcgagaacgaccgcgtgctggtgccgtacgaccatccgaccatggaatacacgaagaagatcggttatgaaccgcatatcatcgagggtgggtttgacggcttcctgatcgtcaaggcccacgccggcaccggcacactgattccgggcaccaacaagaccacgggcgacgtggccgaggaggagcaggaagccgaggccgacaaggaattcccggccgaggaggccgccggccatctggatgtgcatacacacgacgcaggtgagggtgagcccggcgaatatgagatgaacggcgtgctgcaccgcccggacggctcccacagccacgacggcggccgcacctggcacacccactgatagccccatgaacatcaacgaaaccgaatcgcgacgtctggccatgctgcaggtgtgcgacagcgtcttccccgtgggcgcgttcgcgctgtccaacggcatggagaccttcgtacagcgcgacttcttgcgccgtggcgccgatttcgaggagtatatgaagaactacctcgaagtcgcaccgtacaaggaaatcgggcagatggtgctggccggcaagtacgccaccgattcgcgagtctcccgcaaagggctggccgagcgactcatcgaacttgacgagctggcctcggccctgcaatccgcacgtgaaatccgtgaaggcagcgagcgcatgtgtacccgcctggtcaagctggccgagcagatggatgccggccaggcgcagacctcggatgggcatcgtgggttcgccaagccaagtcctgccgacaatgccaccgcatccgctgcggattcgcgcgaaaacagcatcatcgccgtgcacgagcatcacaccgaacgccaccagctgcacgatgccgccgacggcctgtacggctcgccgtcgctcgacctgtatgccgggctgattcgcgagcgccgctgccgtggcctgcattcgatcgcgatgggcctgtacgcggctgaccatgcgaacgacgtgcgcgacgcggccatcatgtatggatattcgctgttgagcgcgcttaccatgtgcgccgcgaaggcgattccgctcagccagtacgctggccaagtcgccctgcatgattcgttcccgcgcctcgtgcgcgcggtgaatatcgcgatgacgttgaagcccgaggatctcggcatctccggagcttacctcgacatcgccgccatgcagcatgaaatcttgtactcgaggctctacatgagctaattatcctggctcccctcaaggaggggagccaggataacctcacccgcaaaccacatacctaactaattcccacataaaggagaaaccccatgtcatacgtacgcatcggcgtcgccggaccggtcggttccggcaaaaccgcgcttatcgaacgcctgacccgcaagatggctgacgaatacagcatctgcgtggtcaccaacgatatctacaccaaggaagacgccgagttccttatcgagcactcacgcctcgcgccggaccgtatcgtcggcgtggagaccggtggctgcccccacaccgccatccgcgaggactgctcgatgaacctcgaggcctgtgaggaaatggcccgcacccacccggacgtgcagatcatgttcgtggagtccggcggcgacaatctgtccgccacgttcagcccggacctggccgacgccacaatctacgtcatcgccaccgatgagggcgacaagatcccacgcaagggcggccccggcgtcacccgctccgacctgctggtgatcaacaaggccgacctggccccgttggttcacgccgatctagacgtgatggcccgcgactccaagaagatgcgcggcgaccgcccgttcatcttcaccgacctgatgggcggtgccggagtggacgacgtcatcgcatggatcaagaagagcgtgctgttcgaggacatgtgatgttttggcccgcccgtatccaaaaacggacgggccgaaacataccgttgcaccaagtgcggcataattgcccatgtcatcgtcaggcaccaatcataagaaggcagcgattcgtccatgggcagtagcacttttcgtctatccactgcattccgccacggacgtaccaaaatcgacgatatttatttcgaggcgccgttcaaactgatgaccccgttcaccaacggacgtcattcggatttcgtcgtgatgctcgcctcccctggcttcctgaggggcgatgaagcccatatcgatatcgacttcggcccaggcaccgattcgaccatcaaaacgcaaagctacgagaaggtgttcgacaccgcggacggctcggccgaacgcaccatcgaactcagggcgcgtggcaatgccaaagccgtgttcctgccgttcccagtgattccgttcaagaacagctcattcatgaacctgaccaccgcgcatatttccgccgagtcagcattcgtgtatgcggatgtggcgacatgtggccgtgttgggatggatgagcgttgggccatgaaacgttttacgaatcgtatgcgcgtatatgtggccgaacccgaagccgtgaccaaggccgccgcagccgaattggcgcaacagcacgcacatcgccgaggccggccttccaaggcggaagccgccgctgcccaaccgcgcgaacatctggcctttgctgaccgcatgctgttggaacctgatgcttttgactacaccgaactcggcatgtggcgcgaattcacccactgcggcgttctctacgctcacctgcccgaactcgaccctagcgacgctgtacaagatgccgcaactagagaagcatcctccgccgccatccgcgagcgcatcgagactgcccgcatcgccgccgaagacgcgctcatcactcgcatccatgaacacgcagacgccatcggcttcaccggcgagctcggcgtgagccgcgtaatcaatggcatctgcttgcgtgtactgaccacccgaggcgacgacgccttcgacctcattcgagatgtggccgatttcgtgaccgatttcgtggccgaaggctaaaaccaagtggctctcccctttgaggagagccaccagttctctcagaacaggaagtaccgctgggtaagcggcaactcgtacgccgggtcagagtggaccggttcgccgtccaccgtcacttggaaggtttcgggattgacctgaatgtcggcgagcacgtcgttgaacttcagatccttcttgcctaccgtgcggcagccatgcactggtaacacctggcgctgcagctccagcttgcccttgatatcgtcatccacggcggcctgcgaaacaaacgtggcgcaggacttgccaagcgcacggccgagcgcgccgaacatatcgcggtagtagacaggttccggggtcgggatagaagcattcgcgtcacccatacgagagtaggcgatggagccacccttgatgaccatttccggcttcgcgccgaacatggacggctgccaaagcacgagatccgccatcttaccgacttcgatggagcccacgtattcggaaatgccgtgggtgatggccgggttgatggtgaacttggagacgtagcgcttgacacggaagttgtcgttgcggttgttgtcgtgttcgtcttcggggagcggaccgcgctgcttcttcattttgtcggcggtctggatggtgcgggtgatgacctcgcccacgcggcccatggcctgcgagtcggagctcatcatggagatgatgcccatgtcgtgtagcacgtcttcggcaccgatggtctcggggcggatgcgcgagtcggcgaaagagatgtcttcgggcacattgcggtcgaggtggtggcagaccatcatcatgtcgagatgctcgtcgatggtgttgcgcgtgaacggcatggtcgggttcgtggaactcggcagcacgtttgggaagccagcggcacgaatgatgtccggagcgtggccgcctccagcgccttcggtgtggtaggtgtggatggtgcggcccttgaacgcggcgatggtgtcttccacacaaccgccttcgttcagagtatcggtgtggatagccacctgcgtgtcggtttcgtcggccacgccgagtgcagtgtcgatgacggccggggtggcaccccagtcctcgtggatcttcaggcctgcggcaccggcgcgaatctgctcacgcaacggttcggggctggagtcgttgcccttgccaaggtaggcgatgttgatgggcagcgcttcggcggcctcgatcatgcgggtcaggtggaaggctcccgggttgcaggtggtggcgttggtgccgtcggccggaccggtgccgccgccgaccatcgtggtcacgccaccggcgagggcagtgcgaatctgctgcggggagatgaagtggatgtgggtgtcgagtccgcctgcggtgacgatgaggccttcgccggcgagagcttcagtgccggagcccgcttcgagaccgggggtgataccgctcatggtctgcgggctgccggccttgccgatggcgctgattttgccgtctttgatgccgatgtccgccttgtagatgccggtgtagtccacgatgagggcgttggtgatgatggtatccggcgattcaacgtcgagctgcacggagctttggcccatgccgtcgcggaatgatttgcctccaccgaacttcagttcatcaccgtagtgcgtgtagtccttttccacctcgatgatgaggttcgtgtcaccgagtcgcacgcggtctcccgtggtcggcccgaacattcccgcataatccttgcgcgtaataatcttcatgtcaaaagtccttgctgtttttcagctccccttgtcaggggagctggctcgcgaagcgagactgagaggtagtccgctccccgctggcgggagctgtcagcgaagctgactgagggtggcccttagctcagattcccgagaatccaagctcatgcgccttcttaaacgcggcctcccgcacctcagggtcatccaacttcccctcaaccagtgcgctgaagccgtgaatctcacgcgtgccaccaatatcaatcaaccgcactcgatgcgtttcacccggctcgaacctcacagccgtaccagccgcgatatccaaccgcttgccatacgccgccttacggtcgaacttcaggtacttattaacttcaaagaagtggaagtgcgaaccaatctgaatcggtcgatccgcagtgttcaccacgtccagctcgatgtcttcggaaccttcattgagttccaaatcaccgtcagccagcagatattcccccggcaccaacttctcggtggattcgatggggttatgaatagagacgagcttggtgccgtccgggaacgtggcctcgacctccaccacttccagcatctcggccacgccatccatcacatcttcaggcttgagcagcgtgcgaccgtatgccatgagctccgccacagtgcttccctcacgcgcccgctcaacgcattcggcggaaatcaacgcaatcgcctccacatagttgagcttcacgcctctggctttgcggtctttggcaagctgccccgccaagtacagcatcaacttgtcagtctctcgtggtgtaagtctcataacatcctctgttgttgactggagtttttcaggcacaccaatgtgagccctaacatcgcccaataataagagcgttataagaacgggacgtttctcataacgctctatggccataaacgggggtcgaattaatcacactctcatggattccttggcggcttctacttggtcggggccgccttcgccggtggcgatgaaacggccggaggccaggacgtagtagcggtcggcgcgctcgacggcgaattggaccttctgctcaaccaagaccacaccgatacccttgtcttcggccatcatgcgaatggccttctggatttcggcgacgatattgggctggatgccttcggtcggctcatcgagaatcatgagcttggggcgggtgatcagcgcgcgggcaatcgaaagctgctgacgctggccaccggacagcagaccggcacgtcggccagcaaattccttcaagaccgggaacatttccacggcttcgtcgtaacgggccttggcctctgaaccgtagcggtcggcgaccacgtgcaggttttcgtccacggtcatggtgccaaaggactgctggccctgcggcacgaacgccatgcccttgcggatgcgttggttcggtgcagccttggtaatgtccttgccctcgaaactaatcgaaccggacgaaacgggcagcaagcccagaatcgccttcaacagcgtggtcttaccggcaccgttgttgccgacgatgctcacccattcgccggcggccacgtcgaaactgatgtcgttgacgacggtcactttgccgtaaccggtgttcaaatcctttacttcaagcattgccatgattattcactttctacggcgtcgtgcatattgatgttgaggcgcgttgtatcaccctcaatatgcactgaaaaagcgcattccgggatgcgatggttgttgtcagtgcggtccatattgcgcttcttcctcttacctactcccctcagtcaccttcggtgacagctcgtccgcaattaaggacgggccttgcctgcaacctgctggttcgactatcgtctcgccttcggctacaaacagcccaccgggctgtttgcttaacgcctcggcctcagggaggggagacagggagttagttttctccgccgcccaggtagatgcggactacttcttcgttgttttggatgtcttcgaccgaaccctcggcaaggatttcgccctggttgagcaccgtgaccgaatcggcgaactgacgcatgaaatccatgtcgtgttccacgatgatgaccgtgcggttcttgctgcatcgcttgagcagctcaccggtctgcacacgctcggccggagtcatgccggccaccggctcgtcgagcagcagcaggtgcgcgtcctgcacgagcagcataccgatttccagccactgtttcttgccgtgcggcaggatgcctgcgggcttgtttgcatccacagtcagattgcacacgtccatcatgtattcgatgttctgcgaaacgccgcccatcggctggaacagctcacgacccttcttgcggaagccctcggccagctgcagattctccaacacggacagctcttcaaccaccgatgcggtctggaaggtacgcccgacgcccagcttgacgatgtcgttcggcttgcggcccaacagctgctcgccacggaattccgcggaaccagtggccggcaccagtccggtaatcgcgtcgatgatggtcgttttaccagcaccgttcgggccgatcaggaatcgcaaatcgccgtgctgcacagtcaaatcaagattcttgacggccacgaatccatcgaactcaacgtgcagtccacgaacttccagataatcgctccactggccgccgcgatcatccagcaccgcaagctgatcgtgcagcttcgtacgctcttcaacgatttcggccttcatctgggccgcttcgtcgcgcatacgcttggcttcgtcgcgcatctcaatcatttcggcgcgcaactgctccaaatcggcctgcgatgcaggtgcgggagccgatggattcgagctcatgttcttctcctcactcatgcgttcaccgcctttgcggtagcagtaccggtaccggcaacggcaccagcaccagcaccagcaccagccgaagctccaaccgaactctttccgagcccgatcttctccttaatccaaggccatacgcccttgaactgtcccaagcccttcggcacaaaggcaatcaccagaatgaagatcaggccttcgatgtacgtccacgcggacggatacgcctcagacagctgcgtttccgcaaagcgcaccagcagcgtgccgaccaccgggccgagcaaagtggcacgtccgccgatcaccacgccggcgagcatcaggatggacggcgtcacgccgatatcggacggcgaaatgatgccgaccactggcacgaacattgcgccaccaatgccggcgaacattgcagccaccgagaaggcgaacaccttgatggaggcggggttatagcccaagaacttcatgcggttctcttggtcgcgcacgccgataatcaggtcgcccataaacgatttgcgaatccagtagacgataagcaccatggccagcgtcaggaacgcgcagatgtagaagatcatctgcttgttggcgttatcagtcaagtcgtaaccaaagaatcccttgaaatcgttgagaccgttggtgccaccggtggttttcgactggccgataagcagcacggcgaacgcggcaaccagcgcctgcgaaagaattgcgaagtaggcgccacgcacgccacggccgaacacagccagaccgaggattgcggcgataatgcccggtaccgcagccacgccaatcacggcgatgaccggattgcggaagagttcccagaatccaggaaccttggtgatgccgtactgggacatgaagtccggcacttggcccacgccaatgtcctcaagcttcatgtggatagccatcacgtacgcgccgagaccaaagaacaggccttggcccagcgtcagcataccgccttggccccaagccaggccgatgccgaccgcgaccatcgcgtagcacaggtatttggacagcaggccgaggttgtacacgctcagcacagtcggagaaaggaagatcagcgccacggcaatgaccacaccgatcaaagccttatatttcgtggcgtattcgctcaaagtcatcttcattgtcgtttccttacccttctgaagcactcacgcgaggttcctggagcggatggagaccaagccctgcggcctgaactgcaggaacaccaccacaatcaggaacacggcaacctgaccaatcgaggcagaggtcggcagttcgatggacgactggcacaagcccagcacgaacgaggcgataaccgcgcccttgagctggccaacgccgccggccacaacaaccaggaaggcctgcacgatgaaggtcgtaccgaagttgaagctaatcgagttcagcaggctcagcgccacgccagcgataccggcgatgccggagcccaggaagaacgtcacatggtcgaccatcttggtggagatgccggaaacctcagcgaggtcgcggttctcggaagtggcgcgaatctggcgacccagcggcgtgagcttcaggatcgcgtacagcgcagccacgcagataatcgacagaataaagatgaacagtcggcctgcagagaagctgtagccaaagatggtcaccggattggtcagcgcttcaggagccgaagcgtagaccggagtggcaccgaaaatatcgcgtgcgagctgctgcaataccagcgatacaccgaaggtaaccagcagcgtatcaagcggacgattgcgcatacgctccagcagcaacacgtccagcagtaaaccaagcaaaccggctactacgaaaccgaccaccagcgccacggccagggacactgttttattgccgatgaccatgctcatgacgtatgcggtgtatgcgccggccatcatgaattcgccgtgggcgttgttgataacgcccatctggccgaaggtcaacgacaacccgagggctgcgagcagcagaatcgatccgttggacagacctgccacaatttgtggaaataacatacccatgttgttgtgtcctcttctctcagttgctctcgacgctggcgctcaggctcttggcccagctgtaggtcttcaggtacgggtccggcttgatgggaccgtccgacttccagacggtgtggatgagcttgtctgagccgatcttgccgatgtatgaggtcttgtagatgtggtggttttcgccgtccaccttgaccttgccttccggtgcattgaaggtgacaccgtctgctgcagccttgaccttgtccacatcgaacgacttggccttctcgaccatgcccttccacaggtacacagatgtgtacgccgattccatcgggtcggaggtggggcgattggctccgtagcgcgccttgaagttcttcacgaacgtcttgttttgcgcattgttcagcgtctggtagtagttccaagcagtgagctggtccttgacgttgtcaacgccgatagcggaaacctcttcctcggcgatagacatggaaatcaccggcgtggtggcggctttcaggccggaagccttgtattccttgaagaatgcgacgttggaatcaccgttcagcgtgttcaccaccgcatccgcgccggagaacttgagcttgttgacgatggtggtgaagtcggtggagcccattggggtatattcctcgccgaccacttccatgccattgccctcggcgtacgccttgaccacgcgatttgcggtctgcgggaacacataatcggagccaaccaagaacagcttcttgtagccttgctccttaaggtaatcaagcgcaggcacaatctgctggttcggtgcagcacccgagtagaagatgttcgggctggcttccatgccctcgtattgcagcgggtagaacagcagcgcgttatccgcctcgaacacaggcagcatggccttacgcgaagaggacgtccagccgccgaacaccgcggccacgcattccttttcgatgagggtcttggctttttcggcgaacacagccggctcggacttgccgtcctgctgcactaccttgagctgcttgcccagcacgccgccctttgcgttaatctcatcaacggccatgtgcagcgaatcactcaccgtctgttcggaaatggccatcgtgccagacagcgaattcacgaaaccgattttgatggtgttgcctgaggtgtccacacatgatgaggtgtcgcttgccgcagtcgcgttgttctcttgggcctctttctcggccacggtgcgaccccagccacaaccgctggtggcaagcactgcggcaacaatgcacaccgcagcacccatcttcagtctttgcaatcgagtcatatggctcttcctccccacatacgactacattccgcgaacgttgcccgcccgcggaatgtctacgctgattgccgtaccgtgccctgatgcctgatatcgtgctgaaccacttgccgtatatcgacggctggcttccggccgactgcactatacgatggcagtgcctgcgtgaatttccgttgcctgaatatttcatatgcgtctcatacataacgctcacgttacaaaatcaacggtgttacgcggcccgccgtcgaacgctgtttacattggtgtgcgatacgcgcgcgactgccgcccaagtgacttccccgcgaactacgggtaggctggagagtatggaacttcacgttttgaatcatccgctggtcgagcacaagctcaccgtgctgcgcgacaagaacactccttcctccactttccgcgagctcgtctcggagcttgtgatgctcgaggcctatgaggccacccgcaacctgtccgtagttgccgcaccaatcgaaacaccggtcgctccgatgaccggtaagaagctggccaaaccgcgtccgatcattgtgccggtgctgcgtgcaggtctgggtatgctcgatggcatgacccgtcttatgccgaccgccgaagtcggcttccttggtatgaagcgcgacgaggaacaccccactcagcaggtcacctatgcgaaccgtctaccggaggacctgtccggtcgtcagtgcttcctgatcgacccgatgctcgccaccggtggcacgctggttgctgccacgcactatctggccgagcgcggtgccaaggacgtgaccgcgatcaacattatcgcggcgcctgaaggcatcaagttcgtggaagagcacatcgatccgtccatcgacttcaaggtcgtagtgtgcgcggtcgacgagaagctcaacgacaagtgctacatcgtgccggggttgggcgatgccggcgaccgtctctatggcgtaattgactgattttcctggctcccctcagagaggggagccaatgtgatgggctttttatgcaaatcgacattattgcgccgggacgcgtgaaggaacaatatcttcgcgacgccatcgacgagtattccaagcgactttcgcgctactgcaggctcaacatcattgaagtggcagatgagaaaacgcctgaccacgcctccgaaggcgttgaccgacagatcaaggccaaagaaggcgaacgcatcgccaagcatctgaaggacggcgcgtttgttattgcccttgccatcaatggcaagcagctgtctagcgaagaattggccgccaaaatcaacgaccttggattgcgtggcaccagccatattcagctggtcatcggcggctcaatcggccttgacgacgcgattctgcgtcgtgctgattttctgctgagtttctcgaagatgacgttcccgcatcagctcatgcgcgtgattctgctggagcagatctatcgcgcttataagatcaacgctggcgagccatatcacaagtaaaacgccatacctcatggggcgggaaatcccccatggggcggtaattgccccatggggcggtaaaaccctcatggggcggtatgccaaaatggcttaattccgcggtttcacatattcttcaaaccgccccatgggcaagttaccgcccgatgagcctgtaaccgccccatgggcacatcaataacgccctcaacctcacactgcgtcagggacgaacgcttcgaagatgtggcggtcgaagtagggcgcgcactgggcgagttcatcgctgctgcgcacggtccatgaaaccggcatcgcacccatcgaacgagcgagtttgacctgcggcgaagcgccaccggtccagtcataggccacgaaatcaggacgagacagccagtcgaacgccagtaagccggcggcccattcagccgcaccattcttgctcagcttcgccggccagctcagctgaccgcggcacacctcagggtgatgctccttgtaccaattcaccgcgcccggatggaaggattcgatcacgtacgggccgtcatacgcctcaagcaaggcgtggcccttttccatgagctcttcgctacgctcatcccaagccttgttgtcgctgaacttgtattccacaatcagcggagcctggccggccaccacgtccagcacatcggagaacagcggcacatgctggtagtaccccttcggcgcggcggacggcgtgaccaccagcggcggattcgcgtcggcaccgggcagcggcttggccttcagatcgccgggcttgctgccggggaacagcgggatgcgggtgagctcgtcatatgtcaggtcttcgacgcggcgcgggtcgccggccacgcgcagcaaatcggcgtcatggaccacgaccacttgaccgtcgagcgtaagctgcacgtcgagttcgatgccatagccagcctcgcaggcggcggcgaatgcggccagcgagttttcaggagcgatcggaccggtcatatccgcactgccgtagccggccttgacagccatgcgacgggcaagcgacacataatcatcgttttcggcgatggatcgctcagtggtatcggcttgggcgctgaccgaattatccccaccataatcagcgatatcggtatagccgaccaaaccagaacccgcatcgtgcaagccacgatgggcataccataccttcggaatggagggcacgaaattacgacgcttgtcattgaacgtgcgcggggccacggcccacacggcagcaccggcggcggccacgcctgccagcgccacgtttctccagagcttcgacgacattggaatccttcctgttgggctgcctctagcctaacgcttctgccagccattgtggagtggttggatcgtccggtttcagcgcgcggtccaggtggttggcacgcagcggctcccagctgaaatctgccagcagatcggcgggtttgcaagggattggagtgggttgcagacgcagcaaccaggcgcagtatccgatgatttgctcgggggttacgttgcgggcgcgcaaggctcccatatccagcgaacgttcgcgcttggctaaacgccgaccggccgcattgtcgatgagcggcaggtgcgcatactcggggtgctcggcgagaggcttttccgtgttgccgcattccggctcaaagccgccagccaacagacactggcgaatccacatttgcagcgcggtggagcgcagcagatcacggccgcgcacgatatcatcaacatccatatcgaggtcatccacgaccacgaccagttgatagccgaacagtccatcggctcggcgaatcacggaatcgcctaccttgcgggccaaatcgtagtgctgtggactatagacacggtcgttaaagcatgcgacaccatcaacgattccggcatcgccctgctgttccggcggcacggctcccgacagcgcagcggaatcgtcaggcactgtacgttgcttttctcccgctgccggtttcggcatggcgatacggatggaatgctggtcgccgcgagacagacgggcacggacctcgtcgggatggtcgtgcagcaggcggcggcacgtgccggggtacaccatgaagccgtcgccctcgttgggggccgaggcggcgcgaatgtcggcacgcgagcagaaacaggggtatagcacaccttgcgagcgcaggcattcgagagcgtattcgtagcgctcagtgcgctgggattggaacatcggttcgccatcccagtcgaggccgagccaatgcaggtcgtccatcatgagctggtccgcaccggcaaccacgcgcggcttgtccacgtcttcgatacgcatcagcatgcggtcgccacgcgaacgggccgaaagccatgcacccaacatggcgtacacgttgccgatatgcatgcgccccgacggcgtcggcgccaatcgtccggtcactggctctcccttcgtccgttaacactcactttcctaccatatgcgacagtgaacaccttgatgccacggttcttccactcttggggaacacaattgagacggatcggacagatacttccgtttcaaggggctgatttcgatgttgcaggaggtctacttccatttcaaggggctggtagccaagtagacacggcgcaacaatggcggaatggcgttgccataaagccgctgatactcgcggttcggcagaagagcagcccctcgaaacggaagtagacctccgaaagggggcaaatcagcccctcgaaatcgagatagacccacaaagacgaaaaagtgggtatgactgctaccatacccacctgtttaagagattttgcagagaaaaatcactgttgcgaaaccgcccgaactcccctcagtcagcttcgctgacagctcccctcagagaggggagccagtgattgtcacttatcttcggtgacgttgtccacgctcacatccggatcgtcggagacgatttggtcgctcgcccaggcggagagctccagatgttcgccgccggtctggtcgacgagcacggtgtcgccgtcgtggaccttgccggccagcagcatgcgggccagctggtcgcccacttcggtctgcaccagcctgcgcagcggacgagcgccataagccgggtcgtaaccggtgttggccagccattcgcgagccgagtcggtgacgtccagcgtgatgcggcgatcggtcagacgctgggccacgccagccacctggatatccacgatgccgccaagctcctcacgcgtgagcgggtggaacatgacgatgtcatccagacggttcaggaactccggcttgaagttcatgtggacggcgtccatcacggccttcttcttggcgtcggcgtccatgtcctcgttcacgaggaactgtgagccgaggttggaggtcatgatcaggatcgtgttcttgaagtccacggtcctgccctggccatcggtcaggcggccatcgtcgagcacctgcagcagcacgtcgaagatctccggattggccttctcgacctcgtcgaacagcaccacggaatacgggcggcggcgcacggcctcggtcagctggccgccctgctcgtagcccacgtagcccggagccgcaccgatcaggcgcgagactgaagccttctccatgtattcggacatgtcgatgcggaccatggccttctcgtcgtcgaacaggaagtcggcgagcgccttggccagttcggtcttgcccacaccggtgggaccgaggaacaggaacgatccggtcggacggttcgggtcggagatgccggcacgcgaacggcgcaccgcgtcggacacggcggcgatggcttccttctggccgatcacacgcttgcccaggtagtcctccatatgcagcagcttctcgttctcgccctgcatcaggcggccaacgggaatgccggtccagtcggagacgatctcggccaccgagtcggcgtccacacggtccgggaccatcggctcatcggccgggttggccgcgccggcatcggcagattcggcatccgcgctttccgcggcggcgagttccttctgaatagccggaatctctccgtacagaatcttcgaggcctcagccagatttccctcacgggtgaacttgtccgcctgcacacgcaggtcatcgagcttggcacgcaggtcaccgaccttgttgtggccggcctgctccgcatcccaacgcgccttgaggccgctgagcttctcacgggtgtccgcgagttcggcttgcagcttgcccagacgctccttggatgcaggatcctcagccttcttgagctgcatttcctccatttcaagacgggtcaccttacgctgcagttcatcgatctcctcaggcgaggagtcgagctccatacgcaggtgggcagccgcctcatcgaccaggtcgatggccttgtccggcagctgacggcccggaatataacggttcgagagggtcgcggcggcaaccagcgcgtcatcgccgattgtcaccttgtggtgcgcctcgtaacgctgcttcaggccacgcaggatggcgatggtgtcttccacgctcggctcgcccacgaacacctgttggaaacggcgttccaatgccggatccttttcgatgttctcgcggtactcgtccagcgtggtcgcgccgatcaggcgcagctcgccacgggccagcataggcttcagcatattgccggcgtccatcgagccttcggccgcacccgcgccgacgatggtgtgaatctcgtcgatgaaggtgatgatctggccgtccgcgttcttgatttcgttgaggacgctcttcaggcgctcctcgaactcgccacggtacttcgagccggccaccatggagcctaggtcaagggagatgagcttcttgccttgcagggtggtgggcacgtcgcccgccacgatacgctgggccaggccttccacgacggcagtcttgccgacgccgggctcgccgatcagcaccgggttgttcttggtacgacgggagaggatctgaatcacgcggcggatttcctgatcacggccgatcaccggatcgagcttgccttccttggcggcggccgtcaggtcggtggagtacttctccagggccttgtacgagccttccgcgtccgggctggtgaccttcgcgccgccacgcacgccgggtacggccttgcgcagggaggctgcggtgacgccgttcttctccaggatttcggccgactggttcggcttgctggccgcgatgccgataagcaggtgctcggtggagacgtattcgtcgcccatctgctgcatttccttctcagcctgggcgatggcggcggtcagctggcggctggcttgcggctgcgaagtgctggagccggatgcgctcggcagtgcgaccaaagcgttacgcacggcggcgccgatggcctgtgggtttccgcccgcggcctcgatgagggagcgcaccacgccgttttcctgacgcagcaacgcatccatgacgtgcagggtctcaacctgcgcgtttcctgcggcggacgcactctgaatcgcgtcgccgacggcctcctgggccatggtggtgaacttctgttccatatcgtattcctccatatcatgcggcccgcgcggagcggctcgcgggcttcgaaagccccgcaagcgccaccgcagaccgcaacttgtcgttgtctgatatggtcaaccgacctggaacccattctattcccaaaacttgagtgcaagtgactcaagttttggattttggtggggagggtgaacagtagccccctctgatgagggagctcacatctatttcaggaggccgacggcagcttcggcggcggataggatttcgccggagaggatggcgttggctacgccttcgatttgcggggtggtccaggtatcgcgtacgtcggggccgatttcgttggcgtactggcgcaccacgcggtatacggcggcgcccgccgcacccggacggtacggcttgcggaagtcgaaggagcggcaggagcacagcagttccacggccagcacgcgcgcaaaggccggaatcgaccggcgcagcttgcgggcggcggcccagcccatcgacacgtgatcttcctgcatggcggagctcggaatcgaatcgaccgaggcgggcacggcgttgcgcttcatttcggagacgatgccggcggcggtgtactgggcgatcatgaaaccggagtccacgcccgggtcaccagccaggaacgccggcaggccgcggttgcgcgccacgtcaaggaagcggtcggtacgacgctcggagatagaggctacgtcggcagtcggaatcgccaggaaatcgagcacataggccagcggcgcgccatggaagttgccgttggactccacacggccgtccagcgtgacgcacgggttgtcgatggcggaggcgagttccacgcccgccacggaggccgcgtattccacggtgtcgcgggcggcgccgtgcacctgcggggtgcagcgcagcgagtaggcgtcctgcacacgcacggtggagcccgggcggccggcctcgatcagaccggagcccttgagcatgcggacgatgttcgcggcggaatcgccttggccgcgatgcggacgcagcgcctgcaagtcggcggcgaacacgcggtcgttgccgagcatgccttccacgctcatcgcggcggcgatgtccgccgtcttgagtagcaggcgcagatcggtgatggccatacacaacatgccgagcatgccgtcggtgccgttgaccagcgccaagccttccttctctttcaaatcgacgggcgtgatgccggccgcacgcagcgcttcgccgccgccgatcttgcggccgtcagcgttgcgggcctcgccttcgcccatcgccaccaaagcgcaggcggcgagcggcgccaaatcaccggagcatccgagcgaaccgtattcgtagaccaccggggtgatgccggcgttcagcatatcggcgtagacctgcgcggtttccgggcgcacaccggtgcgtccggtgcacagggtgctcaggcgcagcaccagcaggccgcgcaccacctcacgctccacttccggtccggcaccggcggcatgtgagcggatcagacttttctgcagctgcgcgcgctgttccttggggatggaagtggaggcgagcgcgccgaatccggtggagataccgtaatgcggcacggtgtcgtcggccaaatgatcgataaccgcgcgacttagcgccatctcatgcttcgattcgtccgaaatcgccactttggcaccgccgcgcgctacggcgataacgtcctcgatgctcaatgccccaacgcctacggtgaccgtctgctctgccatgttttcctacctctctatcgtgccgagctccacttggtattggatatattcatctcgccagcatggcatatcaacgttacgggactgtccacaatatgcaccgccccgcgccagcgccgcgcgaacgctcctatactcacggctggtttgttatgcgcctgaccgccgccggtgctgcggcgggtgcttgtgggataagagaagaacatgatttttcaggccggttcgctgctgctcgttatcatcggtgtctacatactcaaacatgtccacattttcggcgagcgtgattacaaaatcgtgcagggtctggtattcaatctgacgcttccttgtgcgattatcctgtcgttcgccacgaacaagcacgacatgcgcatgctgtggatcgtgttgttcggcttcttcgcctgcgcgattccgctgttcatcgtgtatttcggttctcgcggcgacgagaagaactaccgcgccttccagatgctcaacgcctcgggcctgaacctgggcgcgttctgcctgcctgtggttcagacgttcatgggcccgtccgccggtctgccgatcatcatgctcgatatcggcaacgccaccgtggccacggccgggtcactgaccatcacacgcacgctgctgcatatggatgacaatttcaagtcgctaccgctcatcctgcgtctgcgcaatattgccagggacttcctaagctcgatttccttcgacatctacatgctgatgctggtgttcatgttcctgcacatcacgatcccacagcccatcgttacgctcatcaccccgttcgccaatgcgaacgccttctgcgcgatggccatgatcggactgatgatggagattccgaacaatcgcaaggacaaggtggagttgggcaaggtgattgtctggcgcatggtattcggcgcgattatcgccgtggccgcctggttcctactgccattcgacatgaggattcgcgagatcatcgtgttgggctcgttcgcccctatcacgatcttctcaaccaagttcaccgattcgctaaccggcaacgccaagctcgccggcttctcgctgacagtgacggccatcatcagcttggtggtgatgaccgccctgcacgcggtattgccgggagcgtaaggcgcgttcttggttcccctcagtcagcttctccgcctggacggctcccctcagagaggggatccagaacgagtcacgcccgaacgattacgttgcgcagatcgccgatgccctcgacgtgcacgatggtctcgtcgcctgggtcgaggtggccggaggcgttcggggtgccggtcatgatgacgtcaccaggcagcagcgtggagaacgacgaaatcgcggcaatctgctcggggatgccgtgaatcaggttcgcggtggtgccagacgccatcggcacatcctcgccgttcagcgtgaaggaaatcttggcgtccttccagtcgaggtcgtcacgcatcacaatccacgggccaagcgggcaggaggtatcgaagcccttggcgcgcgtccacgtggggtcgatgccctgcagatcgcgcaacgtcacgtcgttcacgcaggtgaagccgagcacgtaatccatcgcgttctcgacggtcacgttcttggcgatgcgtcccatcaccacggccacttccggctcgaagttcatgtccttggagcaggccgggtacacgatcggatcgtcggggccgatcaccgaggtggacggcttggtgaagatcaccatgtcctccggcgcgtgggcgatttcggagtggccggcctcgtgcatgaactgggcgtgcgcctcatagttcttggccaggccgtagaccttggaggggatgaccggggagagcaggcggatgccgtcgccgtcgaccgggtaccggttgccggtgggcttgacctggtcgccggccagcggatgaccgtcaagttcgatgaggtagtccttgccgtccgtttcgtccttctgcacgaaggcgtagcgcggcgaatcattcaaagaaaaacgtgcgagtctcatgcctgtaagcctactccttggcagttccttccgcagaagcatccgtccaaggagcaagcagaccggccttcaatcgaccaaaacgcacgttcgctgggattgctacttttcggtccaggttttgtcgtacagcgactggccgctttgcgtgtgcatgatgacgcgcaacgatgccttgccgctggaggtcttgcacatcgagcccagcagattcgcggtggattgataggtgctgttcatagcatccagtgaggaagcgacggtatcgcctagcgaggcatagcggtcgtcgagcacgtactcgtacaccaaggtgtcaccgtcgacacggtagttgaaggtgatgccggtatctgcaaacgtatccgcttcggattcaatggagtccttgaattccgaatagtcgacgaaatcctgaatcgaatcgtacagcccataatcgccgtcggttagatcgtcatgggtttcgcccaacgtgtcgtccagcgcatcgtcaagattatcttgagctttgctcttatcgctgctatcaccgttgcccgaagaggactgactatagaaggaatcggttttcgcctcatctacagccttgctggtgtacgagacaccgccgacgatcagcgcgatgaccagtattacctgtatcaccatgcccgccgcactgatgatgatgccggcgatggccaagcccttgcccttgccgccctgtttcttaatctggttgaggcccacgatgctcaggatcagaccggggagtgagacaaggaacgagcagataaaaccggcaatagccaggccgttgtacttctggttcgcttcaggcggcacactgccgtaagaaccagaccatcccggctggccgttcggttggccgccttgcatatacgggttatagggcgtttgcggaggcacggccccgccgcccggataccggagcactgacgctgccggagccgtccccggatagggcgaattgggtgctgctggtgcgggcgcaggcgcgggcgctgtcggtgcgggcgcgggcgcagcggcaggagtcactggtggcaaagcctgcgtaggcggtaccggctgattgaccggcgcaagaggctgggtggactgctcggcaggtgtaaacgcctgcgtaggctgctcaacaggagtgaacgcctgagtgggctgttcgcccgctgcgagtgcttgggttggagcattgttggcggcggttcctgcttcccccgtcatcgcatttaacggctcagtcggattggcgtcagctcgctgccccggcacctggccgttcggattggcattcggatcagtcatgacatgcactccttcaactgcatcgcaccccacttgcgagatacgcccctcgtcttacgcgccacattgtgcgttacagacaactgtactcctcgtggcgagccttaagtaccccaggaaatttggcttcccaaaaaacacagaagcctgaaaccggctattgcctcagcaatattcagtcggtttcaagctaaatcgttaatcctctggtgaaacgacggtctacttcttcagcagcggcgcgacctgttcctcgtaggcggtcagggcggtgtcgatcacctggtgcatgtcatagtacttgtaggtgcccaagcggccgccgaacacggtgtttggctcggccgcggccttggcctcgtaccgcgcgtacagggccttgtccgcgtccgtgttcaccgggtagtacggttcgtcgccgcgctcggcgaaacggctgtactcctcccacaccacggtcttgtccgggttctgggcatcgcggcgctccgggttgaagttcttgaactcgatcgcgcgcgtgtacggcacgtccgcgtccgagaagttcatcaccgggcaaccgaaatggtcgccctcatcgtaacggacctccttgaagtccaccgtgcgccacttcaggtcgccaagctcgtaaccgaagtaacggtcgaccggacccgtgtagaccaccggcacgcccgcggcccgcagggccttcttgttgtacggctgggattcgtcgaagaagtccacgcccagcgaaaccgtgatgcgcggatcgtcgatcatgcgttccatccacttggtgtagccgtccgcgggcagaccctcccacgtgtccttgaaatagcggttgtcgtagttgaagcgcaccggcagacgcttgacgatcgacgcgggcagctcggcaggatcggtctgccactgcttgcccgtgtagttcttgatgaacgcctcgtacaggggacggccgatgagctggatgcccttgtcgttgaggttctgcggatcggtgccggccagctcgcccgcctgctcggcgataagcttctgtgcctcggccggcgtgtaacgcgcgtggaagaactgattgatggtgcccaggttgatcggcagcggatagacctcgccgtcatgcgtggcatacacgcgatgcacgtagtcggtgaacgaggtgaaacgattcacgtaatcccacacccgcctgttggacgtgtggaacaggtgcgcgccatacttgtggatctccgcgccggtctcctcatccatatacgagtaggcgttgccgccgatgtggtcgcggatgtcgatgatatgcacacgggcacccgcatgctccaccgcctgctgcgccaccgtcaggccaaacaggcccgcgccgacaatgacgagatcggggtactgcgcgccctccgacgggccgtgctgcgtattctccgccgcatttgccatgactcaaaacctttcatgattccatgtgcaattccacacgcgtttcattgtccaccagtatagcgagaagcacctatgtacatatgcgattccgaattcagcggctcctataggcttccggcttgtgcaggctgggttttcggctttacttggtgcacgcgcgacgtgcgcctaccctgtggcatactgttcatgtccgcataaacagggcggcctgccggctacgaccgcagggcgcagacacgtgaagaaggattcgccatgacgcaggtttcgccgcttgtctcgatcgtcgtgccggtgtacaacgccgagaaatacctacgttactgcgtggactcgattcttcagcagtcgtatgagcatctggagatcatcctcgtggacgacggcgccaccgattccagcccgatgattctggacgaataccagcggcgagacaatcgcgtgcgcgtcatccaccagacgaacggcggcatcgcgaaggctcagaacgccggattggatgcggcgcatggcgagtacatcgcattcgccgacaacgacgatatcctcgaccgtcgcaacatcgagttgctgctgcacgcgctgatttctaccggcgcggatatgagcaaggcccgctggaggcagttcggcgtctcccagatcgaggaagtcgcgatggaagccagtgaaggcgccgccgaacccgaacatgtgagcgtgtccacgaatccgctgcgtgcctaccagaccgtgttctgcaagagcctgcgcctgatcggagacaagctcgggcgcaacacggaggcccgctatttcaacgaggcgaactggtgccgcctgtacaagcgcgaactgtgggacggcgtgcgattcccggagggcatgtacgcgcaggacgtgatggtcgccggcgaactgtacgcccgcatgaacaaagtcgccgacctcaacgtgaacctgtacaactggctgcagtccgccggatcagtcacacatcaggaacgcagcttcggtttctaccatgacaatttcgccgctggcgcgcacaacttccgcttctgcctgaatcacggcgtgctgccgatgcgcagctactacacgatggtgggagcctgcacggaagaggccacgtcccccgacttcaacctgcccgagaatcaggcccagcacaaggccgataaggcggaactcgatcagctgctcgccaacctttcccgccagcagcgtttccgctgcactattacccgccgcatccgcctgctggagaaatacgtctacgaccgcaaggtcaagaacatgaagtaagcaagtagggattcactccatcattcgatccatctcagcatgagctgggcacgctacctccgttgttgtgattgacactgttcctatctgatattggaaacggaaccaatcgtatgtaccgcaatgccccacatacgttcaaaaacaccttcccgattgaagataatcgcaaacaacgatttgcgaattacctcgagcatgagcgcgacgacgaaaacgaaggcagaaatcgccagcatccatacaatcggcaatctcgtctggtagtacttatcgaaggcaaaccactgagtccaaagcaattcgcggacgaacggatgatccgtaataagatacacccccagagtccaagatgccacggaattgaccagtctcgagcggaaccgcatacgggagaaggcgatgaacataccaaaactgacacctaacaccggcaatgaccattctctatccaatggggccggctccggtatgaagctcagcccatcgaaagccggcacgaactacacatcaccgaactatttcatggaaatggccagtgagcacatgaacgcgaaagtgtctccttatctcgcgttcctgtccaccgtacgcaccaagctgcctgccgtggaacgactcgtgctcggcgagggcggtttcacgaacgatacatccaccacatatctggacaagaacggcgatgttgtgaaacgcaaggacctctccaaacagcagaaaaccctgctcaaagagtatcggctcatccaatacgacatgactgccggcaaaggttatctcgccaataccgatttcttcaatgtaccgaacacacagcataggtaagaaggcatcgtcacgtagttcagttcacgatagaatcacgtagcatctttactgttgcgctccgaccacggctagaattacgtgtagcgcatcgtagaaggagtgtcccgtgaagattgcggttgccggtactggttacgtcggattgtcggtggcgttgctgctgtcgcaacataatgaggtgcacgcgttggacatcgtgcctgagaaggtcgagctgctcaacaacggcaagagccccatcgtggatagcaagatcaccgcattcctcgatgcggaccggtccggcgagcggccgttggacttccaggcgacgctcgacccggaacaggcgtatacgggagcggattacgcagtgatagccacgccgacgaattacgacgcccagaagaactacttcgacacgtccagcgtggaggcggcgatcgaggcaatccgcaagtacgaccaaaccgcatggatcgtcatcaagtcgacgattccggttggttacacccagcagattcgcgaacggttccacgatgaccgtatcctgttctctccggaattcctgcgtgagggccacgccctgtacgacaatctgcatccgagccgcatcgtggtcggcgcgccgcaggatgatgcggaggccgtgcaggcggcgcacacgttcgtggacctgctcgcccacggtgccgccccggaggagaaggaccgcgtcaacccggatgggtcgaggggcatcccccagctggtggtcggtaccactgaggcggaggcgatcaagctgttcgccaatacctatctcgcgttgcgcgtcgcctatttcaacgagttggacacgtatgcggaaagccgcggtctcaacacgcacgaaatcatcaagggcgtgtgcatggatccgcgtatccgcgacgattacaacaacccaagcttcggctatggcggctactgcctcccgaaggacacgaagcagctgctcgccaattacgataaggtgccgcagaacctcatcgaggcgattgtggagtcgaaccgcacacgtaaggacttcatcgcctacgaaatcgaggagctcgtcgaccgggccaaggcgaacggcatcgccaaacctgtggtgggagtatatcgtctgacgatgaagagcggttccgataatttccgtcagtccgccatccaaggcgtgatgaagcgcatcaagtcgcgcggcatcgaggtcgtcgtctatgagccgacgctcgacgcccccgatttcttcggcagcaaggtcacgcacgacttggactcgttcaaacgcgaagcggacgtgatcatctccaaccgttggaacgacgacctcaaggacgtggcaggcaaggtctacacaagggacctgttccgcagggactgatcgaatcgttctgagtagtccggaagtggagatacctagaatcgcgtgattcgcgtcagacgaataagcgttgtcccgtctcttcctccgaagaggcgggacaacgcttattcctgcgtttatttccgcacatacgaaattgaggaaagcccaatccccgacatgaacaacataatcggaaggaactgtatcagatacctggaatgcccggattcaaaaatcagtaaaaaaaaatgattgcaccgaccatggcaatggcgagccatacatcgtaagaaacatgttctccgaacttctctatcgaaagtacctcttcctccttaaagaaagtcctagacattctcaaacaattcatcaggattccactcaccaacaaaatatagaaaatctgctctatctgaatcagcgttctgttggagttggaaccgccagtgtaaagatgggatactttttggataaaaagattttcatggacggcgttcagtggctcattcgcaaatggtctaggcaggaagacattgccggcatatcgctgaacgccgaacgagccatccgaggtgaagtttctgaacttcgtcagcagaaaagtggagtatcctacaacgccatattggcgcagcctctgcttgatgacggcattgttcgcatccaccttctcctgatacgtgagatgcgacatggtgaattggtactcggattccaaatatccgccggtgccggtcattcccatcatgacataatgctgtggggacagcgacagctcatggttgtaggggacgagctgctgagtgcggacagcatggttgtagggaacattcgcacacaggaagccaccggccatgagaatgagtgacgccagcaatgcgacgcagtgtcggcgattcattttcagaagcaatgcaaccaacaatgcgattacaggaatcacagctgatggcttcaagttataggtgaccgccagattcaggccaaacaggaagataagaaccggattcttccaactggacagaaaagccttatcaatggttttctgcgacagcagccagaagcagaaagcgcagttgatcaccgtgaacggcatgcaaaaggtatcgctgtacggatgcaggcaccatcccgacaggccgaggaggatacaccaaagcaggagaacgatattggctaccgaatcattaagataccgcttggccactgcatacattccgatagcacaaacgtcaactaccagaacggaaatcactcgcattacaagcaacagcgcttcaaggcttgtcacaaagggaagagccttgtaaatcccgagttcaacgaagaacaggaggtagttgttaggggaattggaaagataggaagctccgtccaaccctttgtccgtaatgacttgcggattgacgacatagtcaataacccattcggcatcaaagcccgttgccggccctaatgcgaagaacatcacgatttgccagcaaatcacgatgacgaaaagaatccacttatacctcaccatcatatgccagatgccacgaacggcctgtctcacttttgcaaacaccgataccgccacaatgaatacaagcagaacaaccagcaaaatcgttgaataacgattattcccactcacatcaatgtcaatcatttgtggcgacgtcgccctgatcgcgcagtaccaccaccacagcatcataacgctgaggcaaaagaagccggaaccaatcagtatccgtcgccatccggtggtcatatcatcgacggtttcactcatatgtttatgtttaattgtcatcattggctccaatccacaaaacgaaagcacatacgaattgaggccggcaatagtcacttagctatattgccgacctcaatcgagctgcagacaccatccgattcgaacgaaaagacgcctcgtcactgaatcatcttgaattgcagagcgcggtcgctcaacaacgcgtaggtcttgttcctgttgtttcggacagcgaagaagcaggaattgtcgtcattggtgaaggcgatcatatccgtcctgttggggtcttcgggattgtccagacgcaacgagacaagcagtttgaaatcactgttgttgaagtcgctgaccggaatctcaaaaccaacacgttgccgtccacgctgcttcatcggcaccgaacccgaatcgcagacgacgccacctcgtttcgtgtcaatcaaagaaatggccagatagaaggaaacatcctccgcgaactcgtattcgacatcgaagcggaacggttcaacaccatccgacagctggttggaaaccggccagatcttcaggaacggaacacgtgcattcagaccggtcggatacgcattatccgcatcgtcttccttttcggttttcttcgttgcgaaattctccaacgtgtaacggtccgccaccacgtccttatcaccacgctcgatgatttcgccgttcttaatcagaatggccttattgcagtacttcttcaccgagtccatgctgtgcgtcaccagaatgaccgtcttggtcggatccttcttgacctcagagaagaagttgtcgcacttgcgttggaacgcctcatcaccgacggcaagcacctcgtcgagcacaagaatgtcgccctgggctttgatggccacggagaacgccagtcgcacctgcataccgctggagtaattcttcagcttctggtccatgaactcgcccagttcggcgaactcgacgatatcgtcatacatggcggcgatttcgtcacgggtgaagccgagcagcgcaccgttgagatacacgttctcacgtccggtcagttcggggttgaaccccacgccaagctcgatgaacggcaccagcttgcctcggacatccaccgtgccctgttccggcacataaatttgggagatgattttcagcagggtggattttccggaaccattacgtccgacgatgccgaagaagtcgccctgatgcacttcgaagctgatatcgcggagcaccttctgttcggtatagcccttaatgcccttggtccagttcaggaaggccatcttcaggccgctggcctgttccgtcggcagacggaaggatttggcgacatggtcgaccttcagcacgaccggacgttcatccgccacatctgcagccgtggcggcgttgccagtattgacgttattctcaacgacagtcatcagagcacctccgcgaacttggcactatgcttgcggaacacgtggataccgaaccacagaatcactacagacagcatgtacggcaacaagcacagcaaacggttgtccaccagcgtccaaatcgtcggcacgtcctccggtgagatgagattatgtcggatatccatgatcgtctgcgtggttggaaccaacatgagcagcttggtcacccaagccagttcaggcgcacgctgggtgatcatcgtaatcgggtagatgataggcgtggcgtagaacatcgcctgcaaaacgacttcccaaatatgcgcgacatcacggaaatacacgtacagcgtggccaacaccagagccacgccgagtgcgatcgcatatagctgcaggatattcaatgggaccagaagcacatgccacgtgtaatgcgcattggcgaagaagccgaacacgatgacgaccagcaggttgatggccagggaaatcatggcgcccatcgtggtggaggcgacgatgatgtagttggggaaatgaatcttgcgaagcagatcaccgcggttcacaatcgcggacatgcccatggatgtggattcattgaagaagctccacaggcaggtaccgcataacagcgagatggcgaagctcggtgtaccgtcggagaacttcaggaatcggacgaacaccatgtacatcaccgcgaacaacatcagcggcttcagcaccgaccacagtactccaaggaaggaaccttggtagcgcaactggaaatcggttttcacaagctccttgaacaccaccagtgagtaatggtaacggtcgcggagtctgtcccatgctttcttcataaacaccttattctactcagacaggggatttcccgactttctccgccgaatccacctgccactcgtctctatcgatgcaaaccggagcgtactttcttcagcaccgcatatgccgtgcgaatcggcacccaagcggctttcctcaaccggctctgcataggtttgggtagcgggtaagtcaccgcacggaacactttaccgagcgcaagatgcgtcgtacggcgcagccggccaacgaacgtcaacgacgacctcaggctgccgaggctctccatcacgctttcgccgcgtcgcacgccactggtggtgtccatgaagccctgcgcggtgtagtacagggagtccacttcgatgcgtgcgtacttgtcggacatcacccatgcagggtaatacccctgcgattgggcgatatagccattggcccgttcgatggcgtgcgagatggtgccatcgacacccatcttgccttccggcaggaagtcctcgtaccgccacccatattcgtagaggggcttcaacgcttccacacggaaccaatagcacgatccgatggcggatacgctgggcttgcgttcatccagaggaacgtggatgtgaagcttgttttccagcagatccttggtgatgtcgaagttgatgccccaatcgtgcggcaccgtatgcgcgaaataaagggcgtggataggcggcggcggagtcgccatacccaagcgcggattattcgcgaacaacgtcaatatattccgcacataatccttggagccgagcgtgttctccagcagcttgtaggcgaatccttcggtctcggtcccctgatgcccgttctgctggttctgcccggacttcttgtcgtgcgcgaaaccgacgacatcatattttccaccgagaacgacgtctttcgctccgacgagcagcgccgacacgtcacgaccgcggttttgcaccgggatgaaatcgaccgtatgagtgaagccacgcttatccattgccttgcggatgtcgtcgattttcgactcattcgtcgtgatgtacaggtcggtgtcctcaggcagattggcaagatatcccagcgtctggtccagcaagtcgaggaaatagacgtggtagatgaacgccgaacgcaccggagcatccccgtcctcacgaggattgacggtacgggtcggcaacacgtagttgagatgcacggcttttgcgatatccgcaatattgtatgccggcagtaccgcgtcccatatcagatcggtgtcgtaatcggtatgccggcgcagatactccaacagttccataccgggctgaccggcggtctggttgaaatagtactggtattcaacgaagaaggaacgcttcttgaacaccgggcatcggtcgtcgcgaatcagggaaaccgggtcgtacagcatcggatacgtcgaacgcgaccggtacttgtcatagtcgatatatgaggcccaggtaaatccaagatcggcgaaccgtttggtgaacgtcatctcatgcttacgtgtcgcctccgcgtagtcttcatacacgggcatggtttcccaataacgctggaacgctttggaagtgatcagggatttccgatacgcatgccaatatgattgcagatgcgtcggaatctcctcgccgaaggcgacgtcgtgcggatatgcggtgatgccccagaaatcaacgttcttgccgtccattgtttcgaacatctccgagaacggaaaaaccggtcccagaatcgtatcgttcaggcagatgacctcatcgtaggcggcaagcttgctccacccgattgaaagcagcgcttggcggtatgcggcgatatcaaggcccttgttctcacgaacgatgatcctatcagcgaatcgttcaagcctcttacgagagtccgcgtccagttcgccgttggcgacgatgaccagctggtccagtgatttcacgagcttgctcaggaaataatccacgtagcgcgctacatgaccgtatttggcgtagatgcagtaaataccgcatcgtttccattgacgtcctttggatggcacagtcatatctccgttccttttaacggtgaagaatccgatgcgcggcacggcgcagtaggttacgtcgttcgctaccttccgggaacaccgcatcaaccacacggcgaatgggcgttcctgttttcaacacgcggcgttgctcttccagctggagttgctgccgatatcgctcttgttgctcggctattttcgcctgtttgatttcgaactcgtgcttgtccagtttccctttcaacgcgaggaaaccgttcacgcgttgctgaataaccgtatcggaaatgccgttcaaatccagactgttcagcaacgtcaaccagcgacgatacggatccgcatccgacgggaccgcatcatggtcgacgaaccactgcgcacgtgccgtaagagaatccaacaacatgtaagcggtattctcatcaccccaaacacggcgcagcgaacgcataccggcaatctgatcggtctccgtcaacctcatcacccattcacgtcccacgattccaagcaccacatgcctgtaccattgcgcgcaacgagtcatgttgtcgtcaccggagtcggccgcataccgcagcacagcattcatggaggaatggattcccgtatggccatgctcgaatttctgcaacgtctcaagaccggaaccggacaccccggcacccagattgtagcgaagaccacggtattccatgaagaaccgcattgttttcgcccgtgaagccaatacgaagaactcgtatgaatcctgcatgcgtccaagcggttcatcatacgttgcggcgaatccactacgaacgaattcgccgtcgaacatgcagtcgataagactccacgtgttgcgggttccgaaatcttcggagaacaccgacctcagcacatcctcaccatgcatgtcttcggtatgtagattgaacgaccgctcctcctggagcgccgtatcctgattggccgaaccgtgggggaccacggtacgaccgaatcgcagaatatcgaaattccgaccggacgcatatgaggaaagcacttcgcatgcggtatcctgcagacggtcgtcaccatccacgaacaccacgtacttaccggtggcatgggagacgcccgtacgccgggcaagatgcgcaccctcatttttgtctttagcgatcaacgagaagcgtgaatcattctgtatcgcggattcgatgaccgatttcgtggaatcggtgctcgcatcgtccacaacaacgacctcgaaatccggattggtctggttttgcagactctgcaggcaatcggcaatatatcgctcgacgttatacgcaatgacgacaaatgaaacggtgggcatacttcttcctccgtgcgaaaacttcaaacggcttcaggcagctttcggcttaacgatgatcttgtcgtcggccacatctttgaggtgcttgccgtacgggctcttgccgtacttctcggcggcctcaaacaactgttcgcgggtgatccagccgttctcgtaggcgatttcctcggccacggcgatgggcaggccctgcgcgcgctgcacggtgcgcacgaactcgcccgcctcgtacagggagtccattgtgccagtgtccagccacgcgtatccgcggcccagcgtacgcacgttcagcgcgcccgcctccaggtacatcttgttcagatcggtaatctccaactcgcctcgcgcggacggtttcacctgcttggcaaactccaccacgcgctcgtcgtagaagtacaggcccgtcaccgcgtagttcgacttcggatgcctgggtttctcctcgatggacacggccttcttgtccgcgtcgaactcgaccacgccgtaacgttccggatcgtccacgtagtagccgaacacggacgcgccctcgccgttctccgccttcgccttcgccttgcgcagcgtggcgcccagtccattgccgtagaagatgttgtcgccgagcacgagcgcgcacggctcgcccgcgatgaactcctcgcccagcaggaacgcctgcgccagaccgtccggtgacggctgcaccacgtaggagaatttcacaccgtactggctgccgtcgccaagcaggcgttcgaagttcggcaggtccttcggcgtggagatgatgagaatgtcacggataccggccatcatgagcacgctcagcggatagtagatcatcggcttgtcgtacaccgggagcagctgcttcgatgtcaccgtcgtcaacggatacagcctcgtacccgagccaccggcgagaatgatgcctttcataaggacctgctttcttcacagtcgtaatcagctcacaccagcttagccaagacagtggcgaaacagaaaaccgcgcaggtcattctgcgcggttttcacactgacatcaggccgtcggaatgggctgacagacctttccggtttgccctatctgtcctacttgccgagttccttgctcacgtatgcttccaaggtttcctcccagtcggcgggcgtgtagccggcggcctcgatcttggacaggtcgagcgcggaatgctcgggacgcgggctgaccggcgacttcgcgttcgcgaagtactcggccgtgctgatcggcttgaccttctccccgttgccgttcgtcagttcgaacacgcgggacgcgatctgcgcccagttcctcaccgcgccggaaccggtcaggttgtacgtgccgtactgggcatgcgagtccagcaggtggaagatcgcctcggccatgtccttcgtgaacgtgagacgcccgtactggtcgtccaccaccgtcacctgctccagctggtcgtccgggttcgcgacacggtccgacagcatcatcatcgtcttcacgaagttgcggccctcaccgatcacccagctggaacgcaggatgtagtgctccggagcgttcgccaccgcgatgtcgcccgcagccttcgtctgcccgtacacgcccaacggcgcgaacgcctcatcctccgaatgcaggtccgcggtgccgtcgaacacgtagtcggagctcacatgcaccagcgtgatgtgatggtccttcgcgaccctggcgagcaaagccgggccctgcgcgttcgccttccacgcggttggacggccctccggggtttcggccctgtcgacggccgtgtaggcgcccgcgttgatgatcgtcccgtacaggctccaatcgtacttgtcgtacgcggccgggtcggagaagtcgaactcgtcgatgtccgtgtactcgaaaccacgcagaccatgcgcctccgcgtacgcgcggaccgcacggcccaactggccgttgcagcccgtcaccagcgtgcgcttcggctccatcggcttggcgtccttgagcatcggatgatgcaggtccgcctcggagcgttcgctctcctccagcgggatgggccagtggatgttcagctccgggtcggcgaggttgacgaacgtgtacgtcttcttctgctctaacgaccagtgcgcgttcaccagatacgtgtacacggtgccatcggccaatgcctgaaagctgttgcccacgccacgcggcacatagattgcgcgagacgggtccaggcgggtcgtgtacacctggccgaagctctcccccggccgcaggtccacccacgcgccgaagatctcaccggtcgcgatgctgatgtacttgtcccatggctccgcgtggatgccgcgcgtcacgcccttcgtcgcgttaaacgagatgttgttctgcaccggaccgaaatccggcagacccaacgcggtcatcttcgcacgctgccagttctccttgaaccagccacgattgtcaccatgcaccggcaggtcgaacaccaacaggcccgggatgttcgtctcctcgaccttcaagtccttctcgaattcgaacgacatacgttccctactttctatcttcagaatcgttttgccacgttgctatgcagcgtgcaggattaagcgttttcaaggcctcccctttatcggggaaagcccaattcgggcattcggggcccaaggcatcgaggatgaagaacatgtcgtatctcagtttcgcgaactcgacccgcagaaggttctcatcatgaccgatacggttgcggatggtacgaaccgatttgaggcggtccaccagttccttgcgcagcctgtcctcaaacgggtcgccgtcgttgccgggaagccttcccttcggcatacgacgcagttccgacgcccatgcatccgcgatgttggggaacgcgcccatgaggacatgggcgagttcagggtccttgccggaacgggacaacatgccatcccacgtgcccaatgtcaattgggagaacacgtcgtcgcgggtgatcgcatccccgtgccttggatgcgtctggtcggaacgccaatgccgctgcttgcgcaatgccgtgttccgggcctccgcgatatagtcgcgctcggggctgttgatcaaagcccgtatcctcccgatcggatcgcttttgccggcttcaagccagtccgggatgcccgttatctgctgcccggacacccattcgcaaagccggtgatcgattgcgtttctgacgaatatctcgatatagccgatataaccgattgtgatggcggatgcctccacgttccagcggtacagcctcaccgccagatcgaccagccgttcccgatcgactgtatccacatgccgtcttgcataatcgagatacacttggaaccgcgcgtcagcaagaaaacgactcgccatcacggcattgtccgcttgctttttcaaattcatatgtgtatctttcttagtgctataggggccacaccttcgaggtgtggccattttcatattccgctcactggccctgctgcttgtacttggcttcggtagcggccttcgcgggctcccaccagtcgcggttgtccgtgtaccacttgatggtctgttccaggcccttctggaagtccgtgtgcgtcggcttccagccgagctcggtccgcagcttcgtgctgtcgatcgcgtagcggcggtcgtggccgggacggtccttgacccagtcgaatgagtcaggatcctggcccatcacggtcaggatgtcgcgcagcaccgtgatgttgttgcgctccccgttcgcgccgatcagatacgtctcacccaagcgtcccttggtcaggatggtccacacgccggtggagtggtcgtccgtgtggatccagtcgcgcacgttctccccgttgccgtacagcttcgggcgcaatccctcgaggatgttcgtgatctggcgggggatgaacttctccacatgctggtatgggccgtagttgttgctgcagttgctgatcgtggcgcggatgccgaacgtgcggtgccaggcgcgcaccagcaggtccgagctcgccttcgtcgacgaatacgggctcgagggatggtacggggtctcctccgtgaacttgttcggatcatccagggccaggtcgccgtacacctcgtccgtgctcacgtggtggtagcgcacatcgtacttgcgggccgcctccaacaggcggaacgtgccctccacattcgtcttcaggaacggctccgggttcgcgatcgagttgtcgttgtgggattccgccgcgtagtgcacgatcgcgtcatgacccggcacgatcttgtcgagcagctcggcgtcgcagatgttcccatgcacgaactccacgcggtcacccaagatgcccttgatgttctccaggttgcccgcatacgtcagcgcgtccagcaccgtgacatgcacgtccggatggttgttgtacacgtaatgaacgaaattcgacccgatgaacccacagccaccggtcacaatgatgttatgaggagtaaacacttcatcagccatgggcactatggtaccgttgcgcccgtacggacgacatcggtgacgtgtagcctctgtggccgttgctccggtcgattcctcacatagagggaacgacgtatcctagacacagcatctgtcagcgaaagaaagtagctcatccatgtctgaagacatcaagctgttcgtctcctgtcataaactggacacgcatattcccgacaatgccctgctgcagcccattcaggtgggagcggctctcgccgcttcccggatgcccaatctgctgcatgatgatgagggcgattccatctccgagaagaaccgctcctactgcgagctgaccggccagtattgggcttggcagaacaccgacgcggattattacggcttcctgcactaccgcaggtacttcaacttctccaaaaccgaatatccgattcatcacgagccgttcattttcggtgatgtgacgttcgaccgcaatgacgatgagacgttgcagcgaatcgacttcaatgaggaagccatgcgcaaggtcatcaccgcccatgatttcatcgcccccgaaccgatcgaagcgttggagaaaaccaccgtctacgaacagtaccgggattccttcggccaccatatcgaagaccttgataccgtgatggataacatccgtctgaagtacccggatatctggccgagcgcgcagaagtatctcaaccagacgaaggtatatgtctgcaatatgttcgtgatgcgtcgcgaactgttccgcgcatactccgcgttcctgttcgacgtgctgtccacgcacgaaaagatgcgcgacttctctcattattctccggtggctcgccgtgtctccggctaccttggagagcgcatttgcggcatgtacctcacgtatctgtatgacaagggctatgacggcatcgatctgcagcgcgtctacttccgcaacaccgatgacggacagcggcctgccactgcaaccggcaccaccggcgaaatcgaaacgctgaattttggcgcgacggtgcgtggaccgggcaaaatctattccgcgattcatgcggaacatctctccgacgattggcagttccgcatcagctcgaccacgtccgacggcaagcaggttcctgcgaaggtcgtacaggccgccagcgacccggtcgcggtgtttcccatcgtcgcgcaatctcagacggtgtccgtgagcgcggtagactcggatggacgcacgcgcgcgcagggttccaaaacgttcaacaggcgagccgcgcagctgatgtcctatgccaataggctgtcgcataacgcggaggcttcgacgattcacaattgcgataaagcgatgctattgggtgattcacatgtcgttgtggatgcgcttatcaataacctcgatgccacagacatcatccacggccatgtctccgttccgctggtaggcgacgaaagcgcgaaggattatgtggatatcatcgcgctcgacggccaaggcaaccagatttccatgggcgattggatttgcatgggcgaagagctcgacaccgatccggctcttcccggattgcgcgtgcgtaagatctcctattcgctgcatatcccccaagtcgatacgttcatcgtctgggtgaagttcccggacagcgaccgtcaggattcgttcctgtgctctttgccgctgcaaacgcacttgatgcaccaccagtgggccacacagacggagccggcctgtgccgctggcgattacgataagtggttccgtacccgccagcgcgcttcggctaacgagctggagattcagcagcgcacggttttcgatgtccagccgaagtattccatcatcgtgccgttgtataagacgccgattcagttcctgcatgccatggccgactccgtcatgaagcagacctaccggaattgggagctgcttctggtgaacgcttctccggaagtcgccgacctcaatcaggccgtggacaaactgtgcgcgaaggaccatcgtattcagcatgtgactttggagaagaaccagggcatcacactgaacaccaatgagggaatcaaaatcgcttcgggtgattttctgtgcttcctggatcatgatgacgtactggagccggatgcgctgttctgctacacgcgagccatcaacgagcatcccgacacggacatgctgtattgcgatgaggacaagctggacaacggcaagtatcgagagccgttcttcaagaccgagtggaatcccgatctgctgttgggcatgaactacgtgtgccatttccttaccgtacgcaagtccatcatggacaagctcgaattgccggacaaggagtatgacggctcgcaggattggcatatgacgttccgtatcggcgagcagtcgcggtacgtgcatcatgagcctcgcgtgctttatcattggcgcgtccacagccagtcgactgccgctcgtgccgaccagaaggactatacgctcgacagcagccgtctttctgtcgaaacgcatttggagcgatgcggcatcaagggcaaggtcgttgattcaccacttatgccgcgtcgtttcaaggtcgattacagcctcgccgaccacccgttggtgtccatcatcatcccgaacaaggatgctgtgccggttctgcacaactgcctgtcctcgattcgtaaattcacgacctacgacaactacgagatcgtaatcgtggagaacaacagcgtggacccgttcaccttcgaatactatgagatggcacaacaggatgacccgcatgtgagggttgtgaagttggaaggtatgacgtccttcaacttctcccgcatcatcaacttcggagccgagcaggcacgaggcgactactacctgctgctcaacaacgataccgaggtcatcactccgaactggattgaggagctgcttggaccttgcatgcgtgaggatgtgggaatcaccggcgccaagctgttgttcccggacaacaccatccagcatgccggcatcagcttcggcccggacggccccggccacctgtactaccagatgtcccgcaactatcccggcaatttcgaagccaccatgctggctcgtgatctgggagcggtcactggcgcatgccttatggtcagcaaggaggccttcgacaaggttcatggcatgaccgaggagcttgcggtgaactacaacgatgtcgacttctgcctgaaggtgattcgtgaacagttgcgcgtggtgttcgtgcccacggccgaactccaccattacgagtccgtgtcccgcggatcggatgcctccggcgagaaggccatccgcttcaagaaggagcgcggcgagttcatgagccgttggccggaagccttcactgtgaaagcgccgtttgagaatccgaatctgcaattcggcattatctatcagacgcttaaccgtgagtataagagggagaaccgttgattctgaaaacaagcaatcagattctttctcaggccaaggcttcactcacgagcatcgatgtcgtagcgtcagccattattggttttgccctcggtatggtgttttccgtaggcaggtccttttatgggtctttaggactgatgtccttcaaagacagttggctttggattcgcggcttttgctatggctgcgccgcagccatagcaattgccgcgatactggttctgtggaattggtatcaagacggccataaaggcatcgaggtacctccgtcaagattctcattgtggttgacgaatctcaccgcatacaaacgcgttgcgctgttcggcatcactatcttcgtcttgtggatacccgcatttcttgcattctatcccggcaactattcgagcgacggcccgattcaggcaacgtatcttctgaatgatggcgttgtcgatctgcattggccggcagcgcatacattgttgcttgtcggtcttatgcagcttggcaatctgttgttcggctcatacaacgcgggagtatcactattctgcctgttgcaggcgttggcccttgctttcgcgatggcgtatgcggccaataaaattatcgaatggggcgctcctatatggctggtcctgctcgcgaatggaatcacggtgttcaatcccgtgattcagacatatgcggtgaccactgccaaggattccctattcgctgtcttcttcatccttacggtgacgttactgattgagatgctccgcactccggaagcactagcttcagtgccatttgccacgaagtgggtactctccgtactcggcatgtgccttatgcgtaagcagggtgtatatgtggccatcatcgtgatgctcattgctctgccattcttgaggcagtggcgccgacgactgaccgcgttgatctctatcgcaatggttttcatcttatcggccgccttctccggtgtggtcgcgaataccgcaaccacgcgcgcggattccgcacgagagatgctgtccgtgccttctcagcaaattgcacgtacctatatgtacgactatgacacgttgacgaacgagcagatacagggcatcggcgcctattatgacttggatgccctcgaggctggacgcaccacagacaagccttgggatcctacccctattggcatgttctacgatacggaaacggggtccggctatttggctccgatttccgaccccgctaaagcggcattgttggatgaggctttcaactcggatcccttgggatacgtcaggatgtacttctctgtgatgaaaggtcacatgtccgattacgtccgtgctttcctttggggtgaaatcgggtacctataccctacgagctcggcagtgaaccgttggaccggattgtctccgtggaatgaattcggcaaaaccattgatgccggcggatcaacgaatcaggtgtccgactacaatgagaccaccaaattgccgggatatcttgcatggctctatgccggaacctggaacatgttccgcggacacccgttgttgacggtttgggtatccccggctctgccgtttttggcattactgctttccgtgattcttctgatcaagcgcaaagggaataaggtcctgctcatcgcttgggctttcccgctcctgtattgggcgacattggctttggcgccagtgatgtgcgtgcgctatgtagtgccgcttttcttcacgctaccgctgattgccaccattcccttacttacgcttaaggaattgtgactagacgatacccgagctttagttcacgacgtcgggggttcttcgtatccattctctacccacaatctccaatggatacggagaattccactctccacatatgcgatgcgggccactgataacgttgtagcgcaccccttttctcggcgtagcaatctgcaagatactccagcatgaaggatatagtggtacccatgcttgaagagaagaatccatccatcgccgttctcctgccctgctataacgaagaggtaactatcggcaaggtggtgcgcgacttccatgcggcgctgcccgacgcggccatctacgtgtacgacaacaactccaccgaccgcaccgccgagatcgccacagcggaaggcgccatcgtacgcaaagagccgcgtcaaggcaagggcaacgtcatccgctccatgttcgaagacatcgacgcggacgtgtacgtgatggccgacggcgacgacacctatcccgccgacgccgcgcccgacatggtcgccaaggtgctcgaaggctacgacatggtgatcggcgaccgcctctcctccacatacttccaggagaacaagcgcccgttccacaacttcggcaaccgcctcgtgcgcggctccatcaaccacctgttccgcgcgcacgtcaccgacatcatgaccggataccgcacgttcagcttcacgttcgtcaaaacctaccccgtgctgtcgcgcggcttcgaggtcgagaccgagatgaccatccactcgctgaacaacaacctgcgactctacgagatgcccatccagtaccgcgacaggccggaaggttccgtctccaagctggacacggtaggcgacggcatcaaggtgatgagcaccatcttccgcatgatccgcgaatacaagccgctgccgttcttcggcaccctcggcctgatcatcggcatcatcggcatcatgttgtgcggatgggtcaccgccgaattcgtaggcaccggcatggtcgtccacttccccacgctgatcggtgccatcatgctcgtcatcgtaggcctcctgctcatcgtcaccggcatcatcctcgacgtgatcgccaagaacgaccgcaaaacctttatagtggatgccaacaggttcgcctatgcaaaaaggcattggccccatcctcttccgcctcgcgatgctgcaccatatcgcaacaaccaataaacgcgatgccatgagttggcttaacacggttcaggttaacggcaatcgaggatttggcagcaatcccaatcagcccttacacaacacgttcccctataagacaacatgataattatacagatgtgaagagcaacattaatgaataaaacgacgcaagaaaacacgcatcttaaaatagaagacattttcaatcgatttatcacactccttgccgcactgattgtcacctgtctaggaattgccgctctatttcatacgatgattttccccttggattactctgaaaagcctacaaattctctcaaatacagcatcgtgggaaccgtaggcttcttcattctcgcgggggcagcctactatacgggcaaacatttaaaattcaagagacttccctcgttgaaaacgttctataggatacagacctatacagctcttttcatcggattgacttggctatcaattgcaaccacatctccagtcgcagatcaaggcacctcaatcacgttatcaatatggctacaaaacaacgatttgggaaatctgcatgcaaatgactacctacaacaatatccattccagtccgggtatatattattctgcactctaatggggcaacttttcggcatgaacaacatgttgccgattcgcctttttaatctcctgatgattatagtttcattgaaaactctatgtaaaatcacggagagaatgttcaagaatgatgccgtcaccaaagcgaccattgtattgtccacggcattcctccccctcattttattcgcgacatttatttacggcaacataccgtcgctcgcgttttgtctccttgcctgcctgctccagatggctgccattcaagcaagcgacgacataagaaaacgtcttgcgtacggcacattgtcagcggcttgtctcttcgttgcactctggtttaagcccaacagtctcatcttccttatcgggatcgaacttatatggcttgtcatcttgtttgcgcataaacgcgttctagtcatcacattcatcatattgggggcagtcgcatatatagcggcttcggcgataccgatcttccttatggaaagtcgaatcaacgttcctttggacaacccgacccccaaaacggcttggattgccatgggcctacaagagtctcgcgagcgtgcgccaggatggtacaacaattatgttgtaaacatttacaaggaagctcctcacgacaataatcaggtagatgcaatggcaaaggaggctatagcccaacgcatccaagcattcacacaggaccccctatatgctgcgcattttttcactcgaaaggtagccactacatgggctgagccaacatttcagtccctatggatttcatatggcggcaccggcggagagcgtgcggacctaacacaatcaaagctagagcatgagataatgcgtggcaggttgcacgccatatatatagtatattgcgacattatacagaatattatctatattggcgcatcctattgtcttatctttagatggaggggcttgaccactaaacaaattactctgattgtgatatttcttggtggattcactttccacctattctgggaaactaaatcggattatgtgctcccctatttcttgctgctgataccttacgcagctgcaggatggcatgatatcatcttcactaatcgcaaaatgatttacagccaacttaagcaagtacaatctaaataattccacttattgcaaggggtttgaaaccgagataacggcccagaaccccttgcacactcctaccgcttcgctccggtcaccgggtcgaagtagtacttttgcccgtcgatatactgcgtgccatacaccatctttccatcggagccatagtatacggtcttgcccccattggaattcagatactgccagcctgtcttacgagcgccggtcaccggattcaggtaataccaagcaccgccaatcttctgctccccatactgcatcttgccctcaggccagctgtaatacacgattttggagccgaggttcttccaaccgtacgtcacacgtccgttcgacttggaggtgccatcatcgaagaagtaccagtaacccgacacctttccttctccgtgcagcatcgcgccatccgaaccgtagtacacccacttatcgccacgatggtcacgcgtagtcacgactcgtcgccatccggcgaaacgtgcaccggtaccaagtttcagataatactgtttcccgtcaatcgtctgttctccgtatgccatctttccgtcggaaccgtaatacacggtcttaccgccgttggatttcagccgctgccagccctgcttgcgagcgccggtcaccggatccaggtaataccaagcaccattaatcttctgctccccataaaccatgtagggggagtagtatacattcctgccgtccggcaatacaacccaaccggtcatcctcgcaccgctaaccgggtttaggtaataccatttgccggcaatcttctgctcgccatacagcatggcaccatcttgatcatagtaggtccacttgttcacgtcacccttgaggtacgtccaccccgtcacgcgcgcccccgtgcccgggtccaggtaataccatttgccggcaatcttctgctcgccatacagcatgtgtccatcggtcggatcgtagtacacccatttgccgccgctcgacgacaaccactgccaaccggtgaccttcttgcccgtcgtcgcgtcgatgtaataccactttccgtcaatgagcacttcccgatatcgtgtggccggagtccggtacccgaacgcgtttaaatccacgttccccgtgattccgctaatctgtccactgctcgtgtactgccagccgcggtcgttcgtggggaacgcggtgtactgcatggtggagccgtactgcgccacccagcgggtcttgccgtggatgttgccgctgttgagcgcactgttcaggtagcttgtgtacgagtagacgctcagattgttgtaaccggccgcctgcagtttgccgtaccaggagttcaccataccgtcgtacacgctcggactcgttgggctcttgtgccccgtgtacgtccagttctccagatcgtagaacaccgggtaactcaggtcgcccggattcacgcctgcctggcgcagcaggtccaccacgtccgcaccctcggatgcgccgtcggccgcactttccgcatacgagaagacgtacacgccgaacgggatgccgagacgcttgcattcgctgatgttgcgcttcgcctgcacgtcgaagccattgccccagccgtagctcagacggatgatcgcgccctcgacgcccgcgttcttcaccgcctgccagtcaatcgtgttctgccacgcggacacgtcgatcacgcccttcgcctgctgggcgaacaggttgttgcgcgcgtcgaagaacgcctgcgtgccgttgtacgtgccccagtgcgcaccgtactcgttgttctgcaacgcggcgagcttcaccgacgcgttgtcggcacgcgtcttcgaggagaccgcgttcacgtcaccgccgttcgcagcgaccttctctttcacatccgcggcgctcaccggaatgaacgactcgccatccgtcttcgccaacggatcgggctgcttgctctccgtgcccacgatcttcggatcggtgaccgtctcgcccgtctcgatgtccttcaactcgccttccggcgtagccgcatattgctcggacaccaccgtcgcgtcatcggagatctcggcggacaccttatccggcagctcggcattcggattgtccggcatcgcgtcggcagccgtctcatcggcgaccgtcacaccgttcgcgaccggacgcgtcgcggaagtcgcggaccgcgcctgcgagcgcgcgtcggatgaggttccgtccgaggcggccgcggaggccgtcacggaggccgcggaccggacgccggacgcgtccgcatcggcgttcacatccgcgagcgcgctggccggagtgacgcacaccgtgcccaacatcgccgccgccgcgacggacgtcaccgccgcgatcacgccgcgccccgcaccggacgccgccgcacgcgcacgcaacgcacgcagcatgcccgtcgcacgcgccgcacccgtcgcgcccttcgaatccgagccgtcgagccacttcttttccaccatgcgtaactccttgacgcacccatcccgcgcacccgtacaccgccacgcgttccgatggtcgaccggactctcacacgcgggaacaggcaggcgggaataggcgtaatcccaacgttttcaaccgcgtctcagtctaatgtgcgcggcggataaggcgggcggagcgaagcggacaaaatcagcggaactccaccgcacattccggcgacggcatcatcctatcttttgagaagatacttcctgtttctgctgcgcggcggcgcagtggcgagaacgactccacgctcaacgagccggctcaacgccttacgcgtcgtaggaaggcctctccccgagcgacggccgatttcgtggacatcaagtggcgtatccgccgacaatacggacagtatcgcggattccgatgccgtaagccccttacggcccccattcggctccccaccatcgaccttctccgctagtgcgtaccgatcagggccgatttcatcggccaaccccgcttggaccaatctatgcagaatcaccctgatgtcgtcggaatccagatacagcgcgacatgcaactgcggaaccgtcatatcgccatgcctcttcaacaagagcaacgccatacgttcatgacgagtcaaggggacgcccacatgatcaagccagtcacggttctcctgctgctccacgccgtagcgtccaagaacgaccgtgaaccgatcgggagtcgcgcggaacacaggttcccccagtgcgtgggatttcatctcgcgaatcaccagagggatgccggagccaccgccttccacggtcacatcattcgcatcgtcatacggtatctgatgaagcagctgcatcaacgtcgcattgcggcagcatgacacgccgctgccgatcgtggccagcgtgaccccaccccataatccgccaggattcgacacctccacccgatcggggtagatgtccacggtcacggattctccgaggaattgcgcatcatattccctgtgaaccacggcattggcgacgacctcgcgcagcacctcctttggaatctcgctatcggtacgggctccgacccccacgacgaacgtgggagcccgcaggtttttggcgatggtctccaccgcctgttcgattgcctccggcatattgccgtcgcattgcacacgatccacgaaacgcggaccctcaaccgccgatttctcgacacccggatgtgcgacgacgtcaatgatcagcttgggatagtactgctgcgggtactgtccggcggccaacagtcccgcaagacgcacctctccaaccttgttcaccatattcaatctggtcatgcgctcaagacgagtatcagtcccgcgcagcgtcttggaattacgatgctcagcaagcaccctgtccaccgcctcggcattcagatcggagacgtcggcttcagggacaaccatacgatccgcggaactgagcgtcagggcatgggtcatttcgaacacttcggttggcgacaatctcaaatccttgtcgtccacacggcggtacccaccggtttgcggccctctcgccgtaagatagcagggtttgtgctgaatgccgttttcatggatgtcgatgaccaggaacgacgagccgttctgctcgcatcgggaaacgtcatactccggaggattcgtcaaccgtgctccttgcggattgccatctcccataccatccatgaactgcgatgcaatatggttggcgtcgaatcccggaacaggcgagaaatccccgtcctcgctgattcccaacaacagcacgccgcccttggtgttggcgaacgcgctcacactctcccacacgctggcgccgatggtccgagcacaggatttcgcctcgaaacgggcatcatcgttgccttggacgcgtagatgttccagcacctcggcgatatcgtcattcgtccacatcatcatcccccttgatcagctcatttgtcttatttgttgcggccacatggatccaagcggtcgcctccaatcgacttcaaacccacgtctgaaatctcatgataacgtgaagataaatactctatgatgagcttatcatgattgcatcatgataagctcatgacatcaagaaccggtttatgacaagcggcacgaacacgcatgccgaacagcaacaggaacctgaacgcaagcatcaacatgtaaataccgaaattgaccgaaccaagaaaatcacgggaaatcacgcacgacattacgcgggtaaactatctatagcacatgagtatgggccgggaccgggatgagacggcttcgaactgagtatgaggatgggaagatgatcttcgagacaaacacgcagaaatcggacatcacgagcgccggtggcgatggttccggcgagcgcgccgaccgccgcgaccagccggtcgtgtatttcgtgcttccctgctacaacgaggcggaagggctcgtgcacacggccgacgtgctggccgccaaagtcgcacatcttaccgaaaccggacggatcagcaaacaaagccgcatcctgttcgtcgatgacggttccaaagacggcacctggagcatcatccgcaatctgcacgaacgcgacgcacacttgttcggcggcgtaaagctctcccacaaccgcggccatcagaacgcgctcctcgccgggctcatgaccgcgcgcgcctacggctgcgacgccgccatctccatggacgccgacctgcaggacgatgtgaacgcggtcgacgggttcatcgacggattctgcaacggcgacgaggttgtctacggagtgcgttccgcacgcaagaaggacacatggttcaagcgcaccaccgccgaagccttctacaaggtgttcgagtggatgggtgccgagacggtacccgaccacgccgattaccgtctcatgagccgcgagacgctcgacgcgctcagcgaataccacgaagtcaacctgttcctacgtggcatcgtgcccacactcggctaccagaccagcaaagtctactacgagcgcggcgagcgcgaagcgggcgaatccaaatacccgttgaagaagatgatcgccttcgcgattcagggcatcagctcgttctccacgaaaccgctgagcttcgtcaccggtgccggactgctgtctatcctggtagcgattggcatgttcgtgtacgtgctcgtctcgctcgggttcggccacgccatcgccggctgggggtccatgatgatctccatctggctcatcggcggactcatcatgctctccctcggcatcgtcggcgaatacgtcggcaaaatttatatggaatccaaacatcgcccccgttaccgcatcgaaaccacactgtaggaggggccggcggccagcggacggcccctcctacagtgcttggattatatctattttgtcctcatcacacgagtcaacgcgtatagcaatgccccctgcttgaggcagaaatgagaccgtcgccgttctcctgccttgctataacgaagaggtgaccattggcaaggtggtgcgcgacttccgtgcggcgctgcccgacgcggccatctacgtgtacgacaacaactccaccgaccgcacggccgaaatcgccgccgcgcccgacatggtcgccaaggtgctcgaaggctacgatatggtcatcggcgaccgcctctcctccacatacttccaggagaacaagcgcccgttccacaacttcggcaaccgcctcgtgcgcggcttcatcaaccacctgttccgtgcgcacgtcaccgacatcatgaccggataccgcacgttcagcttcacgttcgtcaaaacctaccctgtgctgtcgcgcggcttcgaggtcgagatggaaatgaccatccactcgctgaacaacaacctgcgactctacgagatgccgatccagtaccgtgaccgcccacgaaggctcagtgtccaagctggacaccgtaggtgacggcatcaaggtcatgagcaccatcttccgcatgatccgcgaatacaagcccctccccttcttcggcagattgggcctaatcatcggcatcgtcggcattgtgctgtgcggcaccgtcaccttcaaattcgccaagaccggcgtggtcacgcacttccccacgctgatcggcgcggtgatgctggtcatcacggggctgctgctcatcatcgccggcatcatcctcgacgtcatggccaagaacgaccgcaagaccttcctcattgacaccaacagattcgcatacaacaaaagacactgactaagcgccatatagaaacgtgatggggagcgcaacctacggttgttgtgtccccatcttttagcgtctagctcagactgtgaaaaacaatagaaaagcagaaagaacagcattgtggtatccatgccaccaaaactaccctaccgtcgtcaccgcctaacccgcttcacccacaccaaacagcgaaaggccgatttcttttatgcatcactactaccaccaacacctcacatatagtgggacatatgtctgatgcttccgatgcctctgatgctgtttctgctcctttgactgtgttctcacgagtggcggcgaacgctgcgtggaagcggtgattctgctgatgggtttcgtgctgattgcggtgacgcctgccgggcatattccagacgtatgggcgcacacatatcgcattgacggcatcgttaacggggatgtgctggctcggccggtcgactcgaccagcatcctgcattcgggcagcggcaatgtgggcgggtgcgtgagccgtgattggatccggttctccatcgaccattacgacggttacgatccggctgccgtcaatgccgattttcttgaacggtacggcacgggcagcactgcagcgggcagcggcacgaacagcaccagcaccgcaaacaccacctgcgtggacacgccctacaacaatgcagcggttaattcacccttcgcctatctgccgcaattggccgcctttgccataggagcagactcaacgctcacccctggcaccacatacgtactcgcggaagtaatcatgttgctggtgtacgccggttgtatgttcgccgccgtagccgcactcccccgctggcgcttgcctacggccctactcttggtctcaccgccgttgatcttccgctattcgttcgccatctcggccgattccatggcacaggcgctgtgcctattgttcgcgtgtctgctgttttcctgcatggccgatccgcgtgccggcaacggacgattgaccgcgctcatgaccgtaggcgtgctgatgggcatgtcgaaattcacgttcaccccgcttctgctgctgggattcctggctttgataccgtggcatagcgccgcatccgaatctacagccgcaccttccgcagcagacgctgcacgggcttgagtaccacggtgtcggcgaccaccgcgaacgccagcgccgcgagcaacgtggcggcgaacatcagcacgctgatgcccgcatacgaccatccgtccgtgggcgcgggaatccgcgggccgatcagcaccttggacaggggcgaatgcaccagatagatcgtgtaggagtaccccgccagccaggtgatcgccctgcgcagccgcgccgacgtgatgtgcacgtcgtaccggaagaacaggaacaccgcggccaccaccaccgcgaaggagaccgtgagcgtgcggcccacctggatctgctggccggcgaacaggtacggcgtggcgacggtccacgccagggcgaacggcgccaacgcatacaagccgcgccgcgcccgcgtggacggcggatagtattccaacacgaatcccaacagatagtagaccagcagtccccgccaggggaatgactgcaggaacgtcaacgggtatccggcaagattgcagatctgctcggcggcggccacggcggcggccagaccgatcagcagccaggcacccgaccggcctatcgcgcgcaccatcgcggccagaaacggcgtcgccaacacgaaaccggcgagcatgaatacgaaccaatagacggaatcgtcatacccggaaaacagatcaaacaacgttccagacacagcgccgccaaccgaacgatgatcgatcaccaggtaggcgacgaatcccatgccgcccgcgtacagcagatacggcacaatcagcgagataaaacgtttgtagtagtagcgcacgtacggcgcgaggctgctgggatcggcttggccggcaccgccgcctgcccgggcatcagagccagagcccggcagacggcccgctgagtgggtgctcaccggccggtcggcatcgaatgtcaggttgaaccggcccgacaccataatgaacagcggattgcagaccatgaacaacgcgaacagcacggatcgcaccgtttccgcgctgccggcgagggtcatcttgacgggcatgtagttgttgatcacgtggacgccgatgaccaggcacatcgccaccacgcgcagcagatcgtagttcacgtcgcgcggcctgccggcgacgccggaaacggtggcgtcggaaacggcgacgccggaaacggaatcgggcatggtcatcacatggatcccgtcagggacttcagatcgaccgggcagctgatctggctcttcagcttgtccaaggtgtccaggccggccgagggatcggaggacgcgcccttatgcgcgtcgttcttgccgccgttcgcaccatcggcgccgttcgcaccatcggcgccgttcgcaccatcggcgccgttcgcaccatcggcgccgttcgcaccatcggcgccgttcgtatcggccgggcactcatccgtcaccttaccgttggagcccgtctcgacgccatccgcattcaccaccggcgtggttaccacgttcagtggatgtgtggcatcgctgctgacccgaacggtataggcaatcgtcaattcttttccgggctcgatccactgctggttgaacataatgtactgacggtcatacaggctcgcggtgttggtaccccatgaatctatatcagcctgcacagcggtgatttcgccaccgtacggggcggtaagcaccacgcggtacagcatgccaccgagcactggattctccgagccgccattaacgaaatcaggcaacgattcggccttagccttagtcagcgtgttcttcatggtgaaggtgaccgtgtattcgtcaccgagctgatcttccgtaaactgacccagctgcgtgttacgcacagctgtcgtgatgcgcttatccagcacgccagaatacagggcgttccggctggccgaggcgtcgccgcaggtttttgtgaccgtggtggaggtcttcagataccaatcctgcttgccttgctgcagctccgaaagatagatgccggtttcaggtacctgactgtcagcagacaactcgccactggccttatcgtcgataagtccggtggcaatcagcgcctcctgctcatccggatcagccatccatagcttgaaatgaccgctagcgctggtatctctgattgccttcaacagcggggatgcggtggaagcattcgcgttgccaagcacatggttcataattgcttgagccgcttcggaaacgaagttgttctgctgctcgaagtccgggtaatccgtgtacaggtctgaagcgaagaacggcaccgtggtggtgccatccagcactcggccgtccgaaagcttgaccttgcctgtggctcccagcaatgcctggaggaatacgggatcgaatgacaatacacccgctacgttctcgtcttcgttgcctttctgatacagccacatgtatttgttcatctgtgccacacgctggaattcggggtcgatggtcgtggtggccgggtactggtcaaaagtgtcgccaaatacctggcgctccttcagcaccgtagcatccattggcttctcaggaatgtcccaaccagaagtggtggcgaaatcaccgatggtaatcgtgcccttatctgccgtgattgcggcgatggtgcccaccatgccgcccgccgaacgcagctcggccgggttctgcaccatcaccagatacgtgcgcttgccgtcctcgccaagcagttgcggtagcaagttaatgaggccatcgtattcgctgagcatcgaatccacggtcttgagcgcagccttttcggattcgagcacggtggccaccttggcgacgctcggagtcggcaccttgttgagcttggtgagctgctgcgagatatccttatgcacctgcttgacgatatccggcatatccatcagggcgctgacgtccaccgagccattcttcagggagaagccctgcaatcgtttggacaggttcagcagatcagtgaacggaccgttgaccagcgtatccacggaagccagcatttcgcgagcagcggtgatgtcgctgccaaatcgcgaatggtcgcggaagaagtcccactgcgggccgttcagctcctcgttgagatcactggtggcattgaccaactcttgggagatgtccgacagactcttatcgctgccgcagccaagtgccgaattggccagactttcggcggatgtcagcacacgctgcgcatccgtggccattctcgagacggatgccgcgtagagcgtgcccacacaggtgacgctggccagcaacgtcagcagcagtacaaccaccactcgcacccatatcggtgtacggctgatcagcgaacggccgtcgccacccacgtgctggggagtcttcaggtttacgggacccgtctgctgatttgcaacgctattcgtagatgcggagcgattggatttcccgttaccggcatggcggcttctcctacgccccacagccttatggctcgaatgccctgaagtgaatcgcatacttatcctacccgaaaatctgctcagctcatactcttatccaacggcgcaaggccacgcttccggatgccggactccgggcgaatccggaatcgcagacatgccggagcacacgtgacgccacgcatatctcatgccagtgtaccgatgccaccgaaatagaccgagggtttatcccataccgggtgcaaatcccctcatgaccaccacatcgctgtcagaatgttctcagacttcattgaggagtataacagtattgcgcaagaaaacggtcactaaacgcaacaatagttaaagccgtattgatttgttcggcttaggagaacgggagaggcaattagatgttcgtcctcagcaacgcctggcgggccctgacacgttctaaaggacgtacggccctgaccgcgttcatcaccttggcggtcaccttcggcacagtcgccggactggccatcattcaagaagataccaacgcacacaccaccgcgtacgatcagcagaaggccacgttggccattcgcccgactgcggctacgtggaagaaggtctccgctacggactcggcttccaccaagcattacatgacgtggacctcatacaccgaatacgccacgctcgtccggtcggccaccaactcgttgaactttacggttaccgaaaccgtgccggcccgcgtgagcggtgatttgaaggccctggacggcggatcgctgggctcggcctccgatgatgagaacggcggccagctcatttggcgagccttctggaccgaggatgccgccaaggccagcgacctcggtaccttcgaaatcgtggacggcaaggacctgagctacgacaacaagtcctccaacccgaacaccaccggcgcactggtctctgaagcgtttgcctccgccaacaacctgaaggtgggcgatacgctcaaggtggcggccgcctcggacgcccagaccacggccaagctcaaggtgcgcggcatctacaagtacacatccgaatccgccgtcgccaatccggtgacggccgcccgcaaccgcgagaacgcgatcttcaccaactatcagaccttcgccaaggccggactcgacccacagtccaacgacaagaccgcctccggctgggcgataccggatctggacgtggtgttcgacaccggtgatcccgctacatacaagtccttggtatccaccctcaagaagtccaagctgcccgccaagggatacgaggtgtcttccccttcgctggaatcctacaacgcttctctggagccgctggatacgctatcctcgcgcgcgaagaccggcaccattgcgttggttgccgtgggcggcgtgctgttgctcatcctcgtgctgtcaggcgtgtgggcgcccaagcgtgatgacgagatcggcatggcactggtgtccggcgtcactcgcgggcgtttgggatggcagttcatgctggaagtgttcatcgtcaccctgcccttctacgtaattggtctggtcggaggcgcgttcgccgccaagccgatcggacctgctctggcatccggccatgccatcccggtgacatcggacctgatttggaccatggtctggtatggactgggttcaatcctgatcctggcgattcttgccgccctgcgccttgcgttcttcagcgcgaacaagctgttcgccgccgatggcgactggggcaccgtgagcgagactgaggcgattgaaacggccgaaaccactggcgctgccgagaccgatgaagctgctgaggccaccgctcatgatgctggcaaggccaataagacgaccaccacaaccgacgatgcggaggcacaggcatgagcgacaagaacaacgatcaggaactcgagaagaccactgacgcaacggctgacgaagtgacttctgagactgagacgaacgacgccattgaatccgttccggctgactccgtgcagttcagcgtgaccttcgatgacgttgatgacgaaagcactgttgacgatggtatttacagcgcactggcatctgccgaaaccggagaaaccgacgagaccagtgaggccgaagcagacgccatcgcttcggccaacgcatccgccgaagtgaccgagcgcaatgccgcccgcgtcaacgaaacactccgactggccaaaaccgatcacaaaggcgcattggccgagcatgcggagcctcagggcaaagcgaccgatcccaccatgacgctggcctcgcgtatcgatcgcgtgttggtgggcggcggttccgacgacattctgctcaagacctacccgacctttgccctgaacaaggtgacggtcgccggccccaagggcaaggtcaacatcctcgatggcgcgaatttcttctgctactccggacacgcatacgcgctgctgatcagcgacgaccccgattcgggcatcaccgccgacgccaaacgtcgcgcgctgatgggcgtgatgagcggtttggccacgccggtgtctggcacggtgatgaacaagagcgccaacattgttgagctcgagcccgtggaactgcgcggccaccgtctgggcatcgtaccgcagctgcacgccgtgcagccgaatctcgacgccgaacaaaacgtgctgtacgccatggatgcgtccaaccgcaacttcctgaagcccaagccggtgatcgcccgcgaactgctggccaaggtcggcttctccgaggccaccagcggcgtggccgtcggcacgttgcctttggtgcagcagcgtttggtggccatcgcccgtgcaatcagcaccgaggccgaagtgctgatcctcgacgagccgacacgagggctgaacgcggatgacgaggtgaccgtgttcgccgcgctggccaagctggcgcacaccggcgacccgaagcattgcgttatcgtgctcaccgcatcacgcgagatcgccgaagcagccgacacactcttcaagatctgatctgtccggcagcaatacacactagacacaccagcacaggctcttgaagctcacgatgttcggatacataccaaacatcgtgagctttttcgatttcgaggggctgatttgcgtgttccgggaggtctacttccgtttcaaggggctggtcatccgccaaaccccgagtataaacggcttcatgccaacgtcattccgccgtttttacgccgcgtatacttgggcaccagccccttgaaacggaagtagacctcaggaggatgccgaatcagccccttgaaacggagataggcatgtcgagatgtccgaatcagctcctgacaatcctgccgcggctcattgccgcgctaatctgaagataaatctgaccgtacgaggcgaaacctgataatcatgaccggatatattcccacactggagcagatcgacgagttgcaccgcaaaatcgcgccgtccaaggcggcgtacgagctggtgcacacgcattgcgtgattgtggcgaccatcggctgccagatcgtgcgccggcagaacgcgctgttcacgcgccgctgcacattaccgaaggacgcggaggtaccgcccaccgcaggcgtcaccggcggccatgtgccgccgcgtctgctcgacgagcatttagtactcatcggcgggctgctgcatgacatcggcacctaccgcgtgttcaagcatgacggctctgacgacgaaccgctcaaattcagcaagaaacgctacattctgcacggtcttaagggctacgagtatctgctcgacgagggcgtggacgagtccatcgcccagttctgccgcaaccataccggcgtgggacttacgcgcgaggatgtggtgcgccaggagctgccattgccaccagccgactatgtgccgatgaatctcgagcaggaagtggtgatgtacgccgacaagttccatagcaagtcagtgccgccgaagttcctgcaggtcgaggcgtatacggcccgagccgagcgatttggcggagagaacaaacaacgatggctggatctggtggccaagtatggcgtgccggatattccggcgttggcggagaagtatgggatgcggatgatttgaggctctaggggcctccccccccccagtcagtctgtcggctgacagcccccctcgtcagagggagcttatgaagctatttcagatggaacggagacggtaggtgccgttgcggttggaggcgatgatcatctggtcgttctccagcacgttccagccttcctgctcatagccggaagaggagaccaccacaccggcggagtcgccgttgtcgtcgcgcagctcacggtagcgcatcacacggtagtcggcggcctgcgcgccacggccgtactcatcgtagatttccacgatgcgcgggctggtcttctcacgaccggcggcgcacagggcgatgagctggtcctcggactgaatcatgcagttgtagctggacttcgggtaggcttggcgcagttcgcgcacggcctgggccacggcctcgtcgagcgggaagccgaaaccgatgtattccagaatcaccgcgaagaagatagcggagtcggaacggccgccggtggagaggagcacgctgtggttcaccgggtatgagcggttggtgacgatgttgcggccattggcgtccgagatatcgccattgtggatgaagctcaggccgttcgcatagaacgggtgctggttctccatgatgagcggcagattggagcttgccaagcgcaggtgccagatggcaccgcgagacggttcgtcggccagcgtctcaaacgtgctgtcatgacgggccgcgatggtcgacttgtagattcgggtgccggtttccggggtgggtgcgccaccgtcgcgcacgtgcggcgcttcggcgggatcggaaagctgggctacaccccagccatcattgtggatttcagacagttcacggaaatcctcgacattgtcttgccccaacacggcgttgagactcaggttgaagcctgccgtcgcgtatcccagtaatctgcacatggtatttcaacttaccgaaaccgtgtggcgacgtgcggcgactgttataggcattctttatagagcgcatcagcgccgctgcaaactggtatgttatcgcttctgtttggcggagcgctgaggcttggcggcgggtttgccgttcttggccttgcccttatcgccctgctcagcgaccgcagcggcggcagcggtctcagcgatcttccgctcctcggccgatacggcggcatcgagctcctgtaccaatcgcccgagcccggacgtggtgtccatcgggtcggggacggcggccgggtcggccactgcacgagtcggcgtgggcgtcgtgatggtcttggccgtatcggtgcgcttcagacgcggtgggcggcgggtggagacgaacagcggctgcacctcgaccagcgggttgtaaggtgccagaccgaaccacttaaccggcgagccggccatgcggcggattgcgtacttggcttgcaacgacagggcaccgcgtgcggaaaccttggattccggcatcagggccttgtgaatcagcacgtaacggatggtgccgatgtccggatcggcgtcgaccttggggtaaatcgacttctgcttaggcagttcgccggttttggacaggtcgtgcatgatctggtggatgtacgccgggatggactgcgaaaccttgaagcccaaacggaagcgcacgcggtagatgtagttcgtgccgaagtcctccaccgagtattcacgggtgaacggctcgtcggtggtttccacgctgactgcccaccaagcacgggcacgcttggggtggtcggcgaagatggagaagaagatgtccgtgtcgagtcgcttggtttccgagtcggaggtcaggtacacgatgttgtccgcaaaatacgggatgcggaaatcaccgtgcagcttgtcgagcgcgggtaggaagtcgttgggccgcatgtgacggcgttgcgcacgttcgagcttggtgccctcattccacgtgtacatgacgaacagaatcgcggcggtcagcaacatggtgaaccaaccaccgtgcaggaatttggccatagacgcgatgaagaacatagcctgaatcgccaagaacagcacggtgaacacgatggcaccgacccgcttgccggaatgccataagtagacgccgagcaacacggtggtggtgatcatcgtaatggtcaacgccaggccgtacgcggcggagatgtgttcggaatccttgaagatggcgagcacggcgagcgtggccacgcacaacacgccgttgaccaccggaatgtacagctggccgcgcgtacgggccgggtaacgcacctgcagatggggcatccagttgaggcgggtggcctcggaaaccatggtgaacgcgcccgtgatcagggcctgggaggcgatcacgccggccgaaacagacagaatcacggccaggtaccgcacgttcggggtcatcatctggaagaacgggttgagcgacttcatcgcggtgtattgcgggttatcgctattggccaacatccacgcgccttggccgaagtagttgagcaccagcgcaaccttgatgaatggccaggtgaagtagatgttgccgcgccccacgtggcccatgtcggagtacagcgcctcggcaccggtggtcgagaggaacacggtgcccatcagggcgatgccggcagcattgtccgggctgaacaggaatttgatgccgtacaccgggttcagggccgcgaacacagaccagtcgttagagagattcgtgacgcctacgatggcgaggaagctgaaccagaccagcaccatcgagccgaatactttgccgatgctttcggtgccgcgcgactgcacggagaagagaatcacgatgatcacgacggtaatcatcagggtcaggcttgggttttcgtcgaacaacccttccaatggcggcagggtctgcaagccttcgactgcggaactgatggaaaccgccggggtaagtaccgaatccgcaaggaatgccgcgccgccgagcatggcgggaatcgcgagccatgcgccgtacttgcgaatcaacgagtacagtgcgaagatgccgccttcgccattgttgtcgatgcgcatggcgatgagcacatatttgacggtggtgatcagcgtaatcgaccagaagaccagcgacagcatgccgagcacggcctctcggtttacgctgccaagccctccctgaccggcaaggaaggtctgcgcggtgtagaggggcgaggtgccgatgtcgccgtacaccacgccgagcgccacgatcgccatgccccaggtaaccttgtctgggctggattgcaagcgggcccaccatcggccgaggccgcctttcgaccatgcgctggcgattttctcggcttccttggtttcggcttccctctgcttggcgagtgcctcgcgctcctccttggtgagagtgcggcgggacaccttgggagcgttggtaaaggtgtcggccctcagcagtgcttcttcttcctgtcgggccttggctttggcggcgccagcctgggctgtctgggcctttgaggctttttgggcgcgtgcggtcctttggttcgactcagccatacgttcagtcctccattgaggtggagatcatccccctcgcttatgtcaggtacatcatggtagacctcgttcacaattctgacaaattttacaagtcaacacatcgccgcgacggccgcacacccggccctcacagtccgtatacggcgcgggcggtatcgcgggtgccgcgcgccacatccgcgatggacaggtcgagcgtatcggccatggcccgcaaggtgtaggggatcatgtacggcgcgttggtgcggccacggtacggcatgggcgtcagatacggcgcgtcggtttcgaccatcgcatggcccagacccacaatccgcagcgattcgcggataccgtcattgcctttgtagctcacggtgccggagaagctcagataccagccatgttcgcgcgcaatctcggccatctcacggtcgccggaatacgagtggaatacggtgcgttcgggcgcgccgtcggccagcagggtttcgatgacctcgcgatgggagtcgcggtcgtgaatctgcatgggcaggcccagttccttggccagggcaatatgcgcgcggaaagcctcgcgctgcagttccttggcaccttcgccggtgcggaagaggtccatgccggtctcgccgatagccaccacttgctcggggtatgtggtggcgaggcgatgtacttcggcgagcgcgtcctcgaaagacgtgtcatggtaaggcttgtatttgagaggcagaccatccggccccggcacaccgcgatgcccgtggagcacggactcattggggtgtattgcgagcgccgcgtgcacgttacctggatgatcgagggccatctggacggcggtcatcaggtgcggcagctcgcaaccgcagtcgatgatacccccaatgccgacagattgcgcctgcgccagcaattggtcgacgtcgtacaccgggacttcgggctgccccttctcctgcgcctcatggctcatagcgcgcgcgaaagggattacggaggccacgtgagtgtggttgtcgatggtctgggcgtcgtccggcaatgcttcaggtgccggggcccagctacggtcgcgatggtggtgcttgctcatggtttctcagtgtaggctaccgtcagcaacgctcgtaaggcagtccggtaagacgttcgactacacgacgggtatcgccaatctcggccgcctgaacttgccgtctcttgccacgagcgcaacattcccgggaaagtagcgcaaccggcaagcgagatggccaccatcctgccgccttttctgcctcatcagcccattttctacctcatcagcccattttctacctcattttgataaaatatgatgcagaaaaattcgtatgatgcagaaaatgaggcggtatgagatcattcgactacatcgaatactgatcgaacgcgcgtgttccgcctacacgcaagcaatccgagatggacataccgatccattgcttgccatcgccatgttcattctcgatttcacctgcatacatccgttcaatgacggcaacggccgcatgagtcggctactcacgctcctgatgctgtaccgcaatggctatatggtcggcaaatacatcagtatcgaacaccttatcgagcaaagtaaaagcacttattatgaggcactggccgcaagcacccaaggatgggacgacaacgccaatgattatgcgccattcacgaactacctgcttggcatcatactgtccgcgtgcaaggaattcgacgaacgcatcaatctcacggcaggcggcagagcgcagggagcaccgcgagtagccaccaagggaatgcggattgaagcactgcttgatcgatccctagttccactctccaaggccgatattctcgctcgcatgcccgataccagcaccaccaccattgagcgcacgctgaaatcactgttggactccggtacgatcatcaaaatcggtgccggtcgcagcacccgctatgtgaaacgccgctaaacgcatccttgtgcgcaacatctcgtcactcttccggcgctccgctggccacgcgaatcatcgcgtactgggactcgtagaggcggtagtacgcgcccttggcggcgagcagctgcgcgtgcgagccgtgctcgacgatctggccgtgatcgatgtagaagatctcatccgcgttctcgatcgtcgacaggcggtgcgcgatgatgaagctcgtgcgccccttgagcagatgctgcaggccggcctgcatcgcctcctcggtgcgcgtgtcgatgttgctcgtcgcctcgtccaggattaggatacgcgggtcggcgagcagcacgcgcgcgaaggcgatgagctggcgctggccggccgacagggtcgatccgcgctcctccaccaccgtgtcgtacccgtcgggcagttccatgatgaactcgtgcgcgtgcacggccttcgccgccgcctcgatttcctcgtcggtggcgtcgagcttgccgtagcggatgttctcgcgcacgttgccggagaagatgaaggtgtcctgtagcatcacgcccatctgccggcgcagcgatgcgagcgtcacgtcgcgcacgtcgtggccgtcgatcgtcaccgagccctcggacacgtcgtagaagcgcgacagcaggttgatgatcgtcgtcttgccggcgcccgtcgggccgaccagcgcgatcgtgcgccccggttcgacgtggaagtccacgaggttgaggatgttgcggccgtccttctcgtagcggaacaccacgtcgttgaagtcgacgcgcccgcggatctgcggcagatccgccgcgtcgggcttgttgcggatctccggcgtgacgtcgagcgtctcgaagatgcgctcgaggtacgccgagcaggtgatgagctggttgtagaagttgccgatgttgatcaccggattccagaagttgttcgcgtagccgacaaacgcgatgagcacgccggtggtcacgttcacgcccccgaagcccatcacgccgacgaagtagatgaacgagatggtcatcacggagatggtctgcacgcccggccacatgaggaactggatgtgcacggcgtgcatccacgcggaacgcacctcgccctgctgctcctggaaggtcctgaactgggcctgctcctgcgcgaaggtctgcgtggtcttcactccggcgatcgactcgtggatgtaggcgttcaggttgctctgcttgttggagagcttctggaaggcgcgccgctggaagatctgcagcacgcgcacccagatgatgagcaccgggaacaggatcaagctccacagggccagctgccagtcgatcacgaacatcacgatcagagtgatcacgaaggtgaacacgtcggagatcacgttgatcagaccggagctcagcgtgtccgaaagcgtgttcacatagttgaccacgcggatcaggatcttgccgtgcgggcgcgaatcgaagtagctgaagggcagcgtctggatatgcgtgaagatatcgcggcgcatgtccttgagcatgagctggccgacgcgcgtgatcgccaccgtgcggtagcgcagcccgaactcgtacagcacgatcagcgcggcgaggattacggcgaggatgccgagcttgccgaggtccttgttcgggatcgcctcgtcgatcatgatcttggtcaggtacggcacggcgacgacgatgcagctcatcgagatgacgacgacgagaatgcgcgccacctgtgccatatacggtttgatatatttgccgacgcgagcgatgtcgtggaggttgatggactcctccagctcctcatcctcgcggaatgtattgcgttgtgccataagtcctcttctaaaacccctgtgcggcgccggactggagtccgagctgcttgtggtagatgtcccagtagcggccgtgtgcggccacgagttcggcgtgggtgccgcgttcgacgatacgtccgtgctcgagcaccagaatcaggtcggaatccttgaccgacgagatgcggtgggcgatggcgacgatggtcttgccgccgtccatctccttgaggtgcttctggatctccgcctcggtctccatatcgacggccgaggtcgtatcgtccataatcaggatcgacggattgtccgcgagcgcgcgggccagcgacaggcgctgcttctgcccgccggacaggcccacgccgcgttcgcccacgacggtgtcataaccctgcggcatcgacctgatgaaattgtccgcgccggcgatctgggccattttctggatatatcggtcgtcgctatcatcgctggcaccaaaaccgatgttgccgccgatggtgtcggagaacaggaacgtatcctgcgccacgatgcacacctgcgagcgcaaggtggccagcggccagtcgcgtgcgtcgatgccatcgatgagcacatggcccacggtcgggtcgtagaagcgggagataaggctgacgagcgtggacttgcccgcgccggtttcgccgaggatgccgagcttggagccggcgggcacggtgaagtcgaggtccttgaggatcggggtctccgggtcgtccgggaaggcgaagctgacgtggtcgaagcggatgtcgcccttgatgcgcagcgggcaggacttgcgttcggcggactgctgggcaccggatgttccggaagcaccgggcgctccggtagcctcatcatcgtgcttgacttgctcgacgatcgtgaccgcctgcttgacggcttcgaccgcgtcgggcttctccacgatgcgcggctgttcggtgagcagcttacgaatcttgatgcagctggcgttgaatcgctgccagtcgttgatgagccagccggactggcgcaccgggccgtcgatcatccacaggaaggagttgaaactcaccagattgccgagggtcatgtagcccttgatgacaagaaagccgccgaggccgagcgtgatgagctgcagcgagaagccgaggccgtccagccaaggcatgtacttgcgcgagttgtaggccagggccatgttgcgctgcatgtaatcgtcgttgtgctcgtcgaacttttcggtctcgtacggttcgcgcacgaatgccttgaccacacggttgccctcgatgttctcttcgaccatggagttgagggaggccagcgagttgcggatggcgaagaacagcgggtgagcgtgcgtggacaggccgcgcgtgagcacaaaaatgaacggcgtgacgcaggccaggacgagcgcgagtcgccaatcgatagcgaacatcacgcacagggcgcccacgaacatgaccacgcagtcggcgatctgatagctcacccaactcaggcagtggcggatcgcgtcggtgtcggaggtcagacggctcatgatgtcgccggtgcgtgtgtggttgaagtacgtgaagtcgagctcgtgcagcttctcgtattcgtcggagacgaggcggtagaccgagttctggccgaaacgctccatccacatctggtagccgtatcgcgcgcccacgcggatgatggtcatgaggatcatcagtccacacagacgtggcagttcgtcggcatgtccgccgacgatgacgcggtccacgatgataccggacagaatcggaatggtcagggccatcgtgttgttggcgatgaacagtaggagcgcgcctaccacgcggggcaggtctggtttgcaatatggcagcacccatttgagattgcttgcgctggtatcgattcccggatcgacgtacatgtgaggagatcaccgtttcttggggattgtttgcttgtggtatggtgcggcatgctcctgcgccgcacgcggcaatcgctgccgccgcgattcacgatcagccgtgcttcgcactgcgcctgtcattggtcgcatgaccggagctctccttcatcggtcgaagcacgttcgactttcgcaaacgcgtattagtctagacggcctgcgtccaatcgcaacagcctgcaactctgcgtgttccccgcattagcaacgcggcacgacccaattcgcgacgcattccccggaatgtgtcgcgcgaaacgttgcgcatgcggcaatgcacgctcgagacctgttgcataccagtcgaccaaattatagaatcataattaagtaaattacgattctataatttgcgcgtgtgcaccagggcagacagcaaagcaaggagacaagggccatgttcgtcgggcgagataaggagctttcggcactggaacgccgctggagctcacagcagttcgagtgcgtcgtggtctacggccgtcgccgcgtgggcaagaccacactcatcaaccgcttcctcgaagatcgccccacgattttcttttcggcaatcgaatccagcgcttccaagaatctcgaatcgttaagccgcagcattgctctgtatgaaaagggctcagaggcgttcgagacaacgcccgtataccgcagctttgaatccgcactggaagcggtgttcgcgctggccgcaaagcaacgcatcgccttcgtcatcgacgagtacccatatctggctaaagcagaccggaccatcaattcggtcctgcagcatgccatcgaccgccataaggatgacagtcagctcatgatggtgttatgcggctcttccatgtcgttcatggagcgccaggtgcttgggtatgagagccctctatacggcagacgcaccgctcaaatcaaagtggagccattcggctacgccgatgtccgcaagttcttgccaagatacagcaacgaggacgccgctattgcttacggacttaccgacggtatcccgcagtatcttcggcaactggacgacggcatcagcatccgagacaacatccgttggaacatcctcgacccaagctgctatctgtttgaggagccagacaacttgctgaagcaggagctgcgcagtccggccgagtacaacgccgtaatccaggccattgcctccggggcatctcggtcgaacaccatcgccaccgcatgccatatggaatcgtcctcatgcgccacctatttgcgcaatctcatcgatctgggaatcgttcgcaaggagacacctttcggcgaggacgctcctcgcaagacgatctaccgtatcgaggactcgttcttccgattctggtaccgatatgtgccgaacaacatgtccctcattcaatccggtcatgccgatctcgccgccgaccgtgttatgcgcactatctccgactttatggggcaggtgttcgaagacatctgtgttcagtggatatggtcccataacggtaccgaggcattgcctttcctcatgcttgatgccggacgttggtggggcgccaatccgaccacccgcagtcaggaggaaattgacatcgtggcttcaggagaaaaaccgaaaactctcctattctgcgaatgcaaatggcgcagcgtgccatccggtctgcagcagttggaagtgctgcgcaatcgcgccagactgctgcaccccgaaaccagccattacatgctgttctccaaatcaggcttcgacgagcatgtcgccgcccgcgcggcgcaagacggtacagtgacgcttgtcgattttgcggatatggattagtcggttcactccattgcggacggcaagggtgaagtaacaggctgggtcaatggaccgaaccgctagaccgggcaacagacccaatccgtgacacattcccgggaaagtggcgcatgtcatatcacgctcaaacaacccagcatgtatatgggcaggtattcggctcgtccaacagtctccgcgttgccatcatggaacacgtaggcatgtcctcacacgcttgtatctcgtcaagaaacagcagagtcttgcccggcgtaatttccgcgccggaaagtaccgataaccgcagtatcaggtcttcggtgtccttggccttgcttaccgtttcgaccgcctgaggcatttcgatgaaattcacctcagccacatgctcataatggtctgcaccgaactgcccaatcagcgtggtcttgcccacctgccgggcacccgtgaccaataagccctacttggttttacggttcttccaattcagcaaccggccgaaccatatctcgcggcttcagtcatccttcatcatcagtattcggtagcggccctaaatcagctccgccatccggctcataatcactcgccaaccacgggcggaagcagctcccgactatccacagtgggacattggtcagccaatcctgctccttgtaattccgcatcgacgtacggtaaccgcaaatcccgtatttgtcgcacagccacttcaagctacgcttatgacgctcggtaccagcttcggcctccaacggaatgattgcgccattacctgcaaagacaaaatcaacttctcccgtactgttcgcattcgaccagtacatcggtgtgatgccggcggccactaattgctggcaaacatactgttccgttaacgcaccacggaattcggtcagcccgtcatcaccaaggatcacgcttgcgggagtcagatccagggccgctgccagcagcccaacatcatggagatacagtttgaacgcggaatcatcacggtatgacggcaatggtgccgcaggtttttcgacgcgatacacccgcaacgcaagaccagaatcgacaatctgctgaatcgcggattcatattgcgccgcccgagcgccacgagcgatgtggccaaaaataaatttataccgcaatacacacttttcctagggttgcaattcgcgtattctacatttttcctagggttgcgattgtccaaaattacatttttcctagggttaataatgcagaatactgcacttttcccagggttagtaccctgaccttccctaatcacacggtgttgtaaaggcgggcggggaaggcgtcgcggtattggccaggggtgagtccggtgcggcgcttgaagacgcgcataatagaatatctcaagcatcgatgaatacggagatgatcacaatggctgattccatcggaacagtcaacaaccaatcttcaacacagcccaacggtcacaattcacatagcaacaccaccgagtcgctatggcgcggcacggattatggcaaatggttcgtagcggattcatgcacgtcgctgtcatcaagtatccaaggtttcgcaatgccactcatcgcgcagaccgtcacgggctcaccggcacaggcgacgctgctggattcaatcatgaccatgatatcgtcggtattgcggctgccaggtggtgtggtacaagataagtacgaccgcaaaaaacttatgattgcgttcggcctgattggtttcgcactgttcggcatatgcgcggccctaggatgggcgggattactcatatacccggtgctgatggtacttgcgatatgcctcggcatacgctcaggcctcctaggaaccacgagcaacacgatgctacgaggcatcgttcccgatcaattgctgcccaaggcgtcaagcctcaatgatggccgcgatgccgccctcgaactcgccggcgcaccagtaggtggcgtattgatcggcggcggtctatggctgccattcgcagtcagcgcgctgctgaatctattggaaaccgcggcggcgatgcggatcacaaaatactggcatcgtggcgggcggaccaatgcggagggtcgcgcccttgccgacgatgaggccgatgagaatggcgatgcggccaacatcactcaggccgctgacgagcaggcaacgaccacgacatcatccgcgtcacagtattggcgtgagatgttttccggattccgctggcttcttagcgagcgattcgaacgtcgcctgattttgtcgagcgcgctggcgttcgcgtgcttcaactcgttcctgctgattacggtgctctcgatcggctccgacccatcacatgtggtgtcagccagtttcatgaacgtttctgtgtctgtgggcgtcatcgttggctcgctcatctcttccgtgctggttcagcatgtgcgcggcggcatagtcgccgtatcgttctacgtgctgatgagcatcggcgcgctcggcgcagcgctggctccgtggattcttgcgcgtatggcgtttctggcaatttcgctgctggccctaccggccggcaatgcggtaatcaacggattccaatcattgctcatcaacaaggagcatatgggccgcgtattcgccggcatgggcatgattgagacgattgctgccccggtgatcacatttctgtccggcatcgccatgcaacactggggttactcagtcacgtccgtggctttgggcttgtgcatcgtggcggccgcgatccctgccgtgacaatgagggaactggtcacactgcctaagccgggtggctgggaggaccatatccgcaaatccgggctcaccaagttctgacaacaagtaagggcgactatctcccggatttgtgacgctcggcaaccgtcagcgtcacaaatccgggaagaggaaggtggatacggtttcagccgcgcgggcagcaaggtggacaaatcgttgccggggtggaatcgcggcaagtatgcaaaagcctcccgttcgcgcgcgacgcataagcgcgcaaacgggaggcttcccaaccgcagcatcatatgcagaaataaggagagtaaggcatatgctgccgcggtcacaccccgccgggaacctgccgcaggccgcgtccggcatcgaaagccctgcagtcgatgcgtgcggccggccgttcccggcgcggtggccatgtcagacgtcagtcagacgtcatcacttctgccagccgatgtcctgcggcaggttgccggcgaagccggacgggccgtagttggccaggcccttcttcgcaccgaggtacgaagccgggttggagaccgggatggtgccatacagcttgagggcttccttctcggcggcgttcacagccttggtctgctcgtcatagtcggagaggctgccagccttcttgacgagctcgtcgatcttcttgctgcccacgtaggagaagttggacgggccgtcggaggtgtacagctgcggggcggacgtcacgaaggtcatggcgctcggagcctgccaagccatcggcagcacctggtagttgccggaagacacggtgtcggagaacttggactcggccacgttcacgaccttgaccttgatgccggccttcttcatcatcgcctggtaggcgttggcgagggcctgctgggtggcgttgtcaccgaagaaagtgaaggagatctcaagggtcttgccgcccttggcgtagtagccgtccttgcccatcttgtagccgtcggcctcaagggttttcttggcgttgtccacgttgtacttggcctcggcgggcaggttgttctcgtagcccttctggaacggcagcagcagctcggagcccggctgctcggccttccagttcaggccctggaactgcacgttgttgtaggtgttcacgtcgaaggcctgagtgatggccttacgcacctgcaggtcgtcaagcggcttggacttgctgttgtactccagcacgcgggtcttggtgctgtagccgatgcgcagctgggcgtccttgacggaacggatggccttgatgtcgtccttggtgttggcctccacggcgtcgatctcgccgttctggaaggcgttgagggaggcggtgtcggccatctgcttgtagacgatcttgtccagcttcggcttgttgccccaccacttctcgttcggcacgaaggtgacctgggagtcggagaaggagtcgaccttgtacggaccggcggcccactcgttgtgcgggttcttcacccagccctgggtgaaggtcttcgggtcggcggccttcgggttcaccagagcgccgaagacttcctgccacgggtagtacggggtcttgtaggtcaccttgacctgcttcgggctgtcgccctgctcaacgctagcgatacggtcgaagccgtcggtgctcggcgggttgtagtccgggttggagccgttgttggcttcccacgtggccttgaaggcggtccagtcgatgtcggagccgtcgttccacttggccttcgggttgatgtcgtactgcacgaccatcgggtccttgctcacgagcttcatgtcggtcaggaagtccgggttcaccttaatcggggagccattgacctggtcggtcatgagcaggctgggctggtaccagctccacagctcggacatgtagccggtgttgccgtcggaagacaggtagttccagttcgggccgatttcgacgatggacagggtcagcgtgccgccgtccttgacgttgtcacggctctggtggttgtcgtaacgctcggtgaccttcggcatgggcaggtcgccggtgtacgacgaatcgatgccggccggcggttcggtggcgctcgaggcgttgctggaaccgttgccattgcccgcgccgcagccggcaagcagcatggcaagcgccgcagtggccgcggcgagcgcggtcagcttacgtgtcttgttcattgttatttcctcctctatatggttccgaccgtcatgcgaaatggcatgcaacctgatggccgctcggtcgggaagtgtcatacggccgcagcgccgggcgttcgccgcggcagcgggcctgttgttcggcgctcagcttgggcatgagcgggcagcggcccatgaacgggcagccttcgaacgtctcggtggggctgggcacctcgccctgcagcacgatgcgctggcgggtgcgttccgccttcgggtccggcaccggcacggcgctgatgagcgcctgggtgtacgggtgcaacgggtgctcgaacacgtcttcggtgtcgccggattccacgatgcggcccaggtacatcaccgccacgcggctggagatatggcgcaccaccgacaggttatgggccacgaacaggtaggccacgcccagcttgttctgcaggtcctcaagcaggttgatcacgccggcctggatggacacgtccagtgcggagaccggctcgtcgagcagcacgagcttcgggttgaccgacagcgcacgcgcgatggcgatgcgctggcgctgaccgccggagaactgcgtggggaagcggtccacctggtcggggttcagctccaccagacgcatgagttcaccgatgcgttcgcggatctgctctttggagtagtgctggaccttcatcggctcggccaggatgtcgtagatcggcaggcgcgggtcgagcgaactcatcgggtcctggaagacatactgcacggccgaacgcagctcgcggcgcttctcgcgcggaatcttgtgttcgagcttggtgccgaacatctcgatctcgccgtcctgcggctgcttgaactccatgatctccatgagcgtggtggacttgcccgagccggactcgcccacgagcgccacggtctcgccttcgcgcacgtccagcgtcacgtcgtccacggccttgacctcgccgattttacggcgcaggaatccgccggcggtcagcgggaaggtcttgcgcatgtgcttgacgtcgagcaccatcttgcgttcgtcgcgcgggatgccggcgaacttcgacttggcggcctcggccaccgtgtacacgtcgtggaaggtcaggcccttgtccacgatctcctgggtgcggtggcaggccacgaactggcccgggcggccgggcaccggctccatggccggctcggtggtgtggcagatgtcggtggccagcgggcaacgcggcgcgaacgggcaccccttgggcatgttgaccaggttcatcggggagcccggaatcggcaccaggcggctgttgcgttcgcggtcggaacgcggcacggcacccagcaggcccatggtgtacggcatggccgggtggtcgaagatggagtcgacgtccgccttctcgaccgggcggccggcgtacatgacgacgatgtcgtcggccacgccggcgatcacgcccagatcgtgggtgatgaagatgacggccgcgccggtttcacgctgggccttgcgcagcacttcgagcacctgggcctggatcgtcacgtccagtgcggtggtcggttcgtcggcgatgatcacgtccgggtcgttggcaatggccatggcgatcatcacgcgctggcgcatgccgccggagaactcgtgcgggaaggacttcaggcggtcctccgggtccgggatgccgaccaggttcatgagctcgatggagcggtcgtgaatctgctgttcggtcatcttcggattgtgggtgaccagcgcttccttgatctggtcgccgatggagaacaccggggtcagagcggagagcgggtcctggaagaccatggcgatgcccttgccacggatctcgctcatctcaagatcggacttgctgagcaattcctcgccgtggtaggtgatggagcccttgacgctggcgttcttgtccagcaggcccatgatggccatggaggtcacggacttgccggagccggactcgcccacgatgccgagggtcttgccggggtacaggtcgaagttcatgccgcgcaccgcgtgcacggtgccggcttcggaggcgaagctgacggtgaggtcgcgtactgaaatcaccggttcggatgccatgccttgcgctcctgtggtgttggggttggtgttggttgttacgttgcttgcgttgcgttcgtcgctcatgatgcccgtctcccctctcactcggccttgccgccagaacgggagtacgggtcgatggcgtcacgcagtccgtcgccgatcagctgcacggagaaggtcaggacgaccagcaccacggacgggaagatcagcacccatggcgaggtctgcaccacggactggccggcgttgagcagcgtaccgagcgaggtgtcgggcgccttgatgcccaggcccaggaagctcagcgaggtttcgctgttgaccgcaccgatcacgccgagcacggtgttgatgaccagcaccgaacccaggttcggcaccagatgacgcacgatgatggtgaaggacggcacacccatgaacttcgccgcgcggatgtattcgcgatcgcgcaggctcagggtcagcgtgcgcagcgtacgggcgtagccgatccaaccgaatgcggtcaggccgatggccagccacagccagtcgctgccgccggccgccatgccgacgatcagggcgatgagcaggaaggacggcacgacgagcagcatatccagcagccacatgcccacgcgctcgaaccagccttcgaagaacgccacggccgtgcccaccagggcggcgatgatcgtggtgccgaacgagctgaagataccgatggtcaacgaacggccgaggccgcggatgatcatcgcgtacatatccgagccaccgaccgtggtgcccagccagtgctgggcggacggcggcgaggcgagggcggcgaaatcgggctcatcgtagctccactgggagaatttcgagccgaaaatcgccaaaagaatcagcagaatcagcaccaccagacccaccacggccgaggggcggcgcatgaagcggcgcacgtacagctgcatgcggccggtgcggtggaagtcgtcggcgctggaagcctcctgggcgttcctggcgtcggcggactgcggttcgctgccctgcggatcggtgagttccatatcctgggcggcggcgtcggagaccatgttttcgttgtcgttcatcatgttagatcgtcctttgcgcggggctcagctcagtcggatacgcgggtcaagccaggcggagaagatatccgccagcagcgcgccggacagcgtgcacacgccaccgaacgcggccacggccacggcaccgttgatgtcgttgttggcgatggtctgggtgaagtacatgcccaggccgttgatggcgaacacgttttcggtgatcacggcgccggtgaacacgccggcgatggagaaggccacatccacggcggtcggaatcagcgaggtgcgcagtgcgtggcggcgaatggccgcgttgagcgtcaggcccttggcgcgggcggtgcgtacgtagtcggcgttcatggtgtcgagcagatacgtacgctgggtgagatggtagcccaccatgcccggaatcgtcatcacgatggtgggcaggatcaggtgctgcagatagtcaaacacccaaagcaccgggttggagccttggtaggagtgcaggccggtcacgtagaacgcgcggctgcccacgatgttgttgaagttgatggccagcagcaccaccatcaggcccatgacggcggccgggaccaccaggaagaacgttgcggtggtgttgagcacgcggtcctgccacttgtactggcggatggccgtgtacacgccgatgctcacgccgaagaggatggagagcacggtggcgagcgtcaccagctgcagcgaagcggagatacgggaggcgatggccggcgccaccggcgactggtccgggctcaggccccagttccactgggtgaggatgcccttgagccagcggaaatagcggatgacgaccggcgtctggtcgttgatgttggccagatcgagcgaccggttaatcgacgcgatcggcggatgcggattgcgcgacatgtagttcgaacgcggatccatgaatgcgctggccaggaaatacgtcatcgatactgccacgaacagcatgatcacgtagttcacaatgcgcttgatgatgtacttgaacacccaaccacctcccagataactgggaaagtgatacccccccccgctcaaaaccacaaattgagtccaatatatggaatatgggtattgacttttccgactttttcctgtacagaaaactgcgaaaacacttactgtgtattgggcaaacatccgtttgttaattttgtatttcctgagcctttgctggacatgccttatactttcgtgtcagcagtccgccggcccggatggtgacagtccccgccgccggcaacggattatccatcagcatcatcagcatcagacaggggcatcatgacgacagacgccagcgcacgggccatcaaacccgaacttctgcgtacgtacaccgaggatttcaacaaggaccgcgccaacctgatcgcggcggacgcggcggtttcggccggcgtgctcaaggcggccaccgactatcgcggcgtgcgtgcgctgccgcgcgacttctccatcgaacttaagcaaggttcgatcaccaatcaggagcgttccggccgctgctggatgttcgcctccctgaacacgctgcgttacgaactcatgcatcgctggaatcttgaggatttcgagttctccgagacctacctgttcttctgggacgcgatggagaagtcgaacacctacctggagaatgtgctgcgcacgctcgacgagcccaccgactcgcgcctgttcgaggccatcaactggggcccgtccgatgacggcggctggtggcagatgttcgccgcgctggtgaacaagtacggtctggtgcccaagagcgcctacccggagtccgagaactcccgtaattccgatgatttcaagcagtacctcaactccaagctgcgcgagttcgcagccgagctgcgccgccgttcggctgcgggcgctggcgaggacgagctgcgcgcgctgaaggacgagtacatgggcaccgtgtaccgcatctgcgccgtgtcgcttggcgagccgccggagaagttcgacttcttcgcgcgcaccaaggatgacgccgaggacgataagaagtgcgacggcaaggcctgcaagtgcaaggccgaggtcgacgcagacggcaagaccgaatcctgcaagtgcggcgactcctgcaaatgcgagggcaaatccgacgccaaggcctgcaagtgcgataagaacaagtccgacaagccgaaaaccggtaaggacgagcgcccgcagattcgcgagatcggcatcaccccgcttgagttctacaagaagtacgtgccggtggacgtcaacgatttcgcgacgctggccaacgccccactcaagaaccgcccgttcaaccggcgctaccgcatccgcttcagcgcgaacgtggccgaggcgggcgatatggagttcgtcaacgtgccgctggacgtgttcaagaaggccgcgcttgaccagctcaccgccggtcacccgatctggttcgcctgcgactgcacgcagttcgcgctgcgcaaggatggcttcttcgaccagtccgtggtgcgcgtcgaccagctgttcggcactgaattcactggcgacaaggcccacggcctcgaatacggcgacagcccgagcaaccacgccatgactttcaccggcgtgaacctcggcgaggacggcaagccgaaccgctggaaggtggagaacagctggggcaaggacgccggcaaggacggctactacgtcatgtccgacgcctggttcgaccgctacgttaccgagctcatcatccgcaaggaatacctcgacgacgccacccgcgccctgctcgccgccgaaccggtcgagctcgacccctggcagcccctcacccgccgctgccgctgacgttccgccggcgggagcatatattcgaatgccccttctctctgttcagagagaaggggcattacgttatgcgagtacgcccggccgcacctattcgagactatcgcggctgagctgagcaaaagtgccgtcatcatcggccaattgccggtaggttccggcctcgctaattgttccgaactagttatccacagagttatccacatctcccgcaagctagagccacataccccggttttcatagcgagcatgtgaccgctgcgctacggtggcgtcatgaacgacatattgcccactccaccgcccggcgtattcgacgacgaaccgtccggctggacccagccccacacaccgggcgttgcgtctgcgcgcaccatcaatcctgagctacgttcatcaccacgtatggcgagttccgcgccaactgtgattacaggccctgtgtcgccagcaatgagcgaaaccctcacccaacgtaagcgggaaatgcttaaacgatgcacggacgccgcgcaacagctcgggcaaccggtgctcttcggcatggccacatcgctgatactgcaatccgtgccgcttcccaaggattgcgatatcgaccccgccgagctccataccgtctccgactcacaccgcacacgaatacgtgccatcgtgccgccaacgacaccacacatctggaagccgctgagcgatgcgcacaatgtgcgtatcaacaaacatgtgtacgcactggatctgatacacacttgggcacaactcgccactcatatatcgctcgaatcgctggtcatacttggcgacgcaatccttacggcaatcgcccgcaagccgggtctggcgaatggccgcactgctgacggcatttatcaggacttcgtgcggcaagtcaccgaactcccgaaattcaacgcaaaatccaagtgcatgatcgctcttgcattcattacgccccgcgtggactctccgatggaatcaaagacccgcatcgcgacgacgaaatacgggcttccgccagccgtgacaaattacacggtgcccggcgcgacattcagcaacggcgcgccgataacgctcgatctcgcttggcccgaatttcgcgtcgccatcgaatatgacggcgatcatcatcgcaccgacaaaaaccagtggcggcgggacaacgacaagcgcgaactgctgcgacatcatcattggatcgtcatcatcgccactgccgcgaacatggccgatgagccatcccaagccgaactcgcctaccgggtcgggcggcagttggcattgcgaggtgccgtattcgatttcactttgacggcaacgccactcgatgagatcgcccggcggaggcgacgaagaatataacgtttatcgcgaaagtcgtacagtatccatgttgcgccgacgctgcgcgactcggtgtccgtgtccgatgtcccggtagcgatgtcaatcgatttatgtgtggaccgggccagatttcgctgtcccggttctccatttcgcccctttttgagcaaccaagacaaaatttcattcacctatcaccccaccgtgcaatattcgccatcgtacatcggcggaattccggggttttgggattacggataatgggcgtttacaaggggggctgtcccggttcccaataagaagccgaaatcacgaaccgggacagcgaaatctgtcccggtaatcgcgtcaatcggttgccgtcatcaccggaacatcacctgcgcataggtcgaacgcttcaatgcgcaacaggcatgcgaccatatcgcgatagcgatattccgacggaagtatgggactcaccacgcgaccaatattatttactgagctttggtgcctcgtgctggatgtggcggatcacggcatcggggaaaccggcgtggatgtagtcggacagcatccgcaatagcctctcgtcaaaggtgtgccgctcatcactgctggcatcgatcaggatgaaatcccatgagtattcggtgtcaccgtcgttgatgatgagtccgcggccagtgatttttgcggccagcaacgcggcgatctgtatggcgcctcgcttgaccaaggccgattccgcttgagtcaggttgcccgaaaatgtgacggtatacatcatcagtccccccttctttgttattttctagaacagcaatgccttattgtaaacagacagcactctgccataatccttttttcaatatgcggcccatggcattcccagcattaaaaaaaaagaaacccggcggagggggccgccgggtgagagagaagagagaagaagggttcaattatggggttcgaagaacctcgccaccggtatgaacttcattccgttgacatcttctatataaccgctccatgcttggcgaattgatgtgcttgtctgggaaaagtcttggcggagtgtgacgaatttgtgacgcccgccgacaaccggcctcgcattgtcggggcttgaccgcacatacggcaacgggccacctcgcaacacttcatgtgcgaggtggcccgtcagctacgagctagcaatgccgaatcactcggcggcgagcttggccttctcggcggccagacgctcggcttcggcggcacggcgagcagccagcgcttcatcgaagcgagccagctcctcttccacggcctcggtcggaatcttggcgaagatcggtgcgggcttaggcaccacggcgccgacctcgatcgcctcgctcttccacgggtgcacgttcacaccgagctcgtaatcgccggtgatgatcgggtacgtgaagccgggcttgtcgagatcctcgacttccttgagctcaggcagcggcgagaaggtaccggtgccgccgagcgcctcccacaccttctgtgcggagtgcggcaggaacggcgcgagcaggtggttcgcgtcagacacggcctgggcggccacgtgcagcacggtgccgagacgagcctggtcgtccttaatcttccatggttcggtggcggaaatatacttgttgatgtcgccgaccacacgcatcgcctcggacagggcgtgcttctggtggtgggtttcgatggaggagccgaccacgtcgaacgcggcggaagcctcttccagaaggccacggtcttcgttggtcatcgaatcctcgtccagcggcggaatctcgccgaagttcttgttgatgaggttggccacgcggttcaccaggttgccccacgaggaggcgagctcctcgttgttgtggcgcacgaactcggcccaggtgaagtcggaatcagaggattcggggccggccacggaaatgtagtagcgcacggcgtccacggggtagcgggcgaggatgtccttgacgtagatcacgatgccgcgggaggagctgaacttcttgccttccatggtcatgaactcgctggccaccacctgctcaggcaggttgagcggacccatcgggccggtttcgccgcccttggagcccttgccgttgtacgcgagcatttcggacggccagatctgggagtggaaggtgatgttgtccttgcccatgaagtagtaggccgggcactttgggtcgttccaccattcgcgccacttctccgggtcgccctggcggcgggcccattcgatggaggccgacaggtagccgatcacggcgtcgaaccacacgtacagcttcttgttcgggttgtcgatccagcccttcaccggcaccgggataccccagtcgatgtcacgggtgatggcgcgcggcttgacctccttgaacaggcccagcgagaagttgatgacgttggtacgccagcccttgcgggtctccagccatgccttgttggcttcggcgagcgccggcaggtcgaggaagtagtgctcggtctgctcgaagcgcggggtttcgccgttaatcttggagacggggttgatgagctcgtccgggtcgagctcgttgccgcaggcgtcgcactggtcgccacgcgcaccttcggcgtggcaaatcgggcactcgccctcgatgtagcggtcgggcagggtacggccggtggacgggctaatcgccacctgctgggtgcccttgtagatgtagccgttctccaagcactgcttgaacatctcctgcaccacgtgctcgtggttaccggtggtggtgcgggtgaacaggtcgtagctcaggccgaggtcgcacagatccttggcgatcacgcggttgtaacggttggccagttcctgggcagtgaggccttccttctccgcctcgacgagaatcggggtgccgtgctcgtcggtgccggacaccatgagcacgtcattgcccttcatgcgctcgtagcgcgcgtagacgtcggagggcacaccaaatcctgcaacgtgaccgatatgacgggggccgtttgcatacggccaagcaacattcaccaaaacatgactcataaggcttgattatccggcgcggcggggacacgcccggatagctgccgcgccgccatcctcatcccactcacctatccgcccgtaacttcccccacatacttatccgtacaccgcttgcgcgcttatccgcatacgcattcgcacacgtatccgtacgtacatccgcacgcacgtccacgcacccatccgcacgcacgtccacgcacatccgcacacacttccgcctgtcgatatccaccgagttatccacatcattcgcgcacctagtgaagttatgcacttatccaccgttttcgcttatccggtggcgcgcaagccgtacttctgcatattgttcgatcatggatatcacagcaggtccgatgacggacatcacaacagtcacctcgccggcaaccgcgcagcccgcggtgccgccgatactgtttaccaaggatctgccgggaccgctcagccttaaccgtctggccgccttcggcgcgttacgtaagctcgacgattccgccggatactggatcgagcattcgggcacactgtatggtcgcgcaaaaatcgtcgcggaggtcgccccgtttggcactgtggtgtgttcgatgaccgccgcttgggtatggctgggaggccccgactttccgagcaccatagacgtgatttccacatcgcacttccgctcggcatccgtcagccgccgtatccgcgtattcaaaagattgacgttgccggagcaaatcatcaagctcggcgggctgcctgtcaccacgccagcccgtacggcttgcgacctggtgatgagtcctgaagacatccccgatccttccaccgtcaacgcactggtgtgtcagctgatgtccgcgtaccagtttcggccaaacgactgtctgcaaatcgtcaaggagcatcggcatcacaagtatgccggacgcgcacgcatgttttttgaatcggtgcagaaggagattgacgaaccggctttggagcaatgcgcatgacgaggggattcatcgccaaaggacatcgcagaggccgccatgccgctcaccgtttacggcatttgcggcaggcgcaacggttgcctcgccacgcggcggcggcacactcatccgaatccgcatcgcgcgcaatctcggatatgaccgcgccgcctgaaccacccatcagacttacgcccgcggtggcatgttcgcccgatacggatgttgccgtgctctggcacatcgcatatcacgtgcccgaactgcgtaaatggctggttgccaatcccaaagccgacgcgcctttgctggaattggtctcgcagcgtggtgggcccggggtccggcaggcgttggaaatattgttcgagtcgatggaagcgtaacggggagataatcgccggctgctgcgctatcccttgattttcagcacagccgcatacacctgcttgcgattggccaacgatccgtcagccagtggatgctcctgcaccacttgcgcgatggcgtccttgatacgcaggccgtcctccaaagcacggtcgatggccagcacggccatgtcatccacgctcaacgtactgggcgcggccgcttcggcctcctcgttggacgcgccgccgacgaccagcaccatctcgccacggggcggatcatcaatcacactttggcgaatctcgccaatcgggccgcgacgaatctgctcataatccttggtgagttcgcggcacagggccatcgggcgattcgggccgaacgcgtccagcagatcgtccatcgaatcggcaatgcgatgaggcgtctcgtagaacacgatggtgcggcgttcgggcaacagcgtgcgcagatactgcacgcgctcggaatgctttcgcggcaggaagccctcgtagcagaaacggtcggtgggcaggccggagagggcgagcgcgtcgagcacagcggaggggccgggcgcgcaggtgacgggcaggccgcgttcgatggcacggcgcacgatggccaagccggggtcgttgatggtgggcatgccggcatcggacacgacgagcacggtggcgccggtttcgacctggtcgagcaggccgtcggccttgtcgcgctcgttgtggtcgtgataggcgatgacgcgaccgttcacatagacgccgaggcgacgggcgagatcgtagaggcggcgcgtgtcttcggcggccacgatatcggcccgctccaagagggccaccagacgggcggaggcgtcgccgacgttgccgatcggggttgcggcgagcaccacggtgccggcggggatggtcacggccgattcgcgggattgggtggcggcggattcgccggcatgaacttcatcattgcgttcaggcacttgcgtcacgctaccgtcagcgtcatactgctcattcaactcatctgcgcttgtcatactcccagtattgcccataccacagagcaatccacgacaatccatggcggaatcgaggcattctccctttgcaggggctgattccacatgttccggaagtctacttccgtttcaaggggctcctcatccggtgaagcaccagtacaaacggctttgacgcaacgctattccgccattttggcggcatatctacttgaccatcagcccctcgaaacgcaagtagacctccggtaaaccccaaatcagccccttgaaacgcgagatggcagaatttcaacgaagacaaataaaaagaccctctgcggtggaatgaatgcagagggtctcgtggagctgacggtagtcgaaaccgcgacctcttcgatgcgaacgaagcgctctaccaactgagctacagccccttggatgttactttgctccgcaaagcaactcgcaacaatatagtacggagtgcggtcaaacgcaatttgacgccgaagtgtcgcagacggggtaaatcacccacaccgctccgcatggataccgcggtggcacccggcaacgtcatcatgcttccagcacatgcagcactttcttttcgttgtagaacgcgaatacgatgccgcccaagccgcacagcacggccgcgcacacggcggcgatgcgatagcccgcgccggacgccatgccgatggtggagacgccggtgaacagcagcatggccacggactgccccatcttcatcgcaaaggtgcgggccgcgtagaacatgccctgacggtcctggccggtggtcttggagctggcgtcggcgatattcgccacgatggcttgcggcagaatgccgaacgcggccatcggaatcgcgccgaccaccgagagcgccaaaccctgggccatcgccggaatgaagccgagcgcggccgaaccaagggcgccggcaaatgcgaacgcacaggtgaagatcacgaaggcaaccagcagcaggcgcttcttgccgaccttattggccaagatattgaccggcagatagaacagcacggagacgccggtcatgagcacgaagtagatggtcgtggtggtttccggcagcttgagcaggctggtcacgaagaacggcagaccggtctggaaggtggtgatggccacccagtagaccacgtcggaacacacgaacttgcggaattcgccgtcgccgaacgtctgcttcagggattcgatggccgattcggaggtgggctgggagttgacgtagtccttctcgcggatggccagcggcggcaccagcatgcacacgaacgccacggcggccatgatggtgaaggtcacgcggatggcggtgatacgccccatcatcggcacgaacgcgccccaaatcaccggcgccacgtacgcgatggccgtgccggccacccaagtgaaggagatggcggtggagatggtgagttgctgcttggagtcgtggccgagttcggcgatgagcgcgttgtacggcgtgcagtagaacgtgaggacgatgtagtagccgatcacggtgacgaacaggaacgccgcgttcacccagccggtgccgttgatcggactccagaacacgagtacggtgaccaccgcgagcggcagggcggcgaatttcaggaacggcatacggcggccggatttggcgtcgcaacggtcggagagggacgccacggccgggtccacgaacgcgtcgaagaatcgggcgaaggcggtgatgccgcccaccacggtcacgatgccgagaacgaccaggccctgcggcacgaatacggtctgaccttgggagatggtctcctggtcaggttggtagaaatacacgagccagttggagatgatgccggaaagcagcgcccacccgaactggccgaccgcaaacgcccacactttggcgatggggagatctttgatggctgatttcgccggtgcaacttgcgcgcccgttacacttgctgtagtcgtattgcccattccccataacctccgaatcaacattgacacagtgtcaaaaaccagtatacaccggggttataacctgctagattgattatttgctttagtttgttttcgtgtgatataattaagtcatgcgtgtcagggaatgggcgaggcgtgagggcttcaacgagcagacggtgtggcagtggtgtcgcgagaaccgtatgcccgtcccgttcgagcgcatgaacacgggcacgattatcatccacgacccgaaatacga

SEQ ID NO: 2613 - DNA, 16545 bp, Unknown
  R222_15m  MAG No. k141_20890
cgtggtcggcgttatcggaagggatagcgggcgcgatatctcgatgcagtgggattcacttaagggctacggcaaatatgattcgtagcgattgggccagcgcaattcgaatggctcatgactttgtgcgtcgtttgtggtctctgaagttgtttgctgggtgacggttttgtgataaaatcgctcatatcaaaatgtttgcgtaaacattttggctgcgccgaaagaaggagtcgacgtaggtcatgtatcaggcaaagaggccggcgcagtgaagcaaaggccgatttttccggtataaggcggatagcaggaacactaaggagaccaatgaaggtactgagcaaatcgcttgctgcaatggttgcggcggcaacactagtgggaggaggggcgtttgcggttgccggcactgcgtatgcggctgataacgatgccattaccgtgaccccgaacccgtggtatgccaacagtttcgatggctggggcacctcgctggcttggttcgccaacgccaccggcagcctcggcgaggaatcggccatcaccaccaatctcggcgatgacgcttccaaggctaaggctgtggaatacggcaaacagctgcgcgaacagttctaccagtccatcttcggtgatgaaggactggacctgaacatggcccgctacaacgtgggcggcggcaatgcctccgatgttgcctacggctacccattcatgcgccaaggcgctgccgtgcctggcacgtggaaagatgacgccaccggctccggcacgtatggcaatggcgtaaccaccaagcaggccgacaaagacaagatggctgcggcattcgacccgactgacgacaaccagtatgacttctccaagtccgccgcccaagactggtggattgagcgcggtgccaccggcgataaccctgacatcaccgacgtagaggccttcgccaactccgctccgtggttcctgaccaacagcggttacgccactggtggacgcaactccggtaacaataatcttgcaaaccctgagaaattcgctcagtacatggccaagaacgtcgagcacctcgaaagccttggcgcaaacgttgacacggtcgagccgttcaacgagtccgagaccagttactggggcactccgggcgacatggcttcgaagtacaccgatgagagcgatgacaacaccaagctcattaacaactactgggataagtactactccgacaaagataagtccgtcaccccatactccaacgcgctgaagaagccgcaggagggtatgcatgtcagcaacgcccagcagcagcagacgattaccgcactcgctgaggcgctcaaggacaatgatgacaccatcatcgcagccaccgatgccacgaactccgccgacttcgtcaagtcgtacaaccagtacccgcaggcgatcaaggaccttatcggccagtacaacgttcacgcctactccgacagcaaccagatgcagtcgcgcgatatcgctcaggcagacggcaagaagctgtcgatgagcgaggtggacggctcctggcagtctggctcctacaacccgtacggtttcgacaacgcgctgggcatgatgagcaagatcagctccaacgtcacccgcctgcagtccaaggacttcaccttctggcaggtggtcgaggacctctacaacatgcagatgggctcgaatgtgaatccggccggtgagaacaccaactggggcaccgtgctcatcgacttcgactgcaccgtggctggcatggacggcaagctctactccgagcgccgcgtgaacaacaacggcggtaccaccgatggacttgaaccgtgcacggttattgcaaacgccaagtacaacggcgtcaaggccatcacccacttcatccacgcgggcgacaaggtcatcgccaacaacgatgaagacaacaacatgactgccacctccgacgatggcaagacacagaccgtcatccaccgcaactccggcacctctgaccagaccttcgtcatcgacctgtcgaagtacggcgagattgccgacaacgcttacggtgagctctacctgaccaccgaaacctctgccgaagacaagaacgcgggtgtcgattccgccactccggaagtcttcgccaagaccagcaacgtcaagcaagctgaaggctctgtgatgattgacaaggctgccaagaccgctacggtcactgtgcccgcccgttctatcgcctccatccagctcactggcgtgaccggctacgctaaggatgctgccgtcgagaccggcgacacttaccagctcgttggtaagcagtccggcaaggccgtggctgataccacttctggtgattccgcgctgtccctggccaacgtcgcttccgatgccgagaacgccaagaagcagacttggacctttacccagatcgagcagcccgccgactccgagcgccctgatctcaaggcttatgtgattactaacgccgaaggcaaggtgctggtgtccaaggatggcacgaacgcgctttccaacgaaacggttgaggccgctaagtccgacccggctgccaagtggattctcaacacttccgatggttcgacctaccagctgctcaatgccgcgactaagacgaacctcgatgtggataactctggtaccacagtcggcacgaaggttggcttgtggcagtcaccgagcggcacttcgccgtccgccaaccagacatggactctacgcaatgtaacgccgaccagccagaagaccgtgaacgtgcagaccgccgttaacgagaaggccgcgctgccgaccgaagtcacgctctactacacctggggcgaaggcaaggccacggttgccaactgggatacttccaaggtcgatgtggccaaggaaggcacctacgaagccaccgctaccgccaccgatgtgtacggcaacgagttcaatgtcgccgctacggtctacgttggcgcgctcaccgtttccgatccggtatcggctacagtgctggccggcaccagtgcgagcgaggcgaaggccgcgcttgaggctgcgccggtgtatctgcacgtcaaggcatcgcctgcattcgagggcgatgcggctaaggttacgtggaacttcgatgggcttgataccaagctcgccgatgccaaggctggcgacaacattgccgtgaccggtacttaccagctggacgacgcgaccacgattgcgctgaagggcgcgatctatgtcaccgccgccacgcctgagaatgtggccgacactgcttccagcctgaccgtgaccaaccagcagacggaatacagcaagggcgatcagtggaagaagctcaccgatggtgacacgtcagctgaagcctgggtgacgtggaactctgctggtgactattccgccagcccgaccgccacgattgacttcggctctgagtgtgagcttagcagcgtgaccattacgtatggtgacaaggctccggcttccgccaaggccgagtacaccactgatggcgagacgtggatgcaattcggtagcgatgttaagcctgccgcaggccagacggtgacgttcaaggccgataagggcacagtgaatgccacgaaggtgcgcattgtgaacaccgtgaacaacgactacatgaacgccaccgaaattcaggcattcgtgacgccggttcagggtgctgcgaagaacatcgccgcggcctctggcacgaacttctcggtgaacttccaggagggtgcctccgcttccaaggccatcgatggtgacactacgtcaaagggttggtccacttgggcttccaccgcctcgacggtggacccggtcgccacgttcaccttcgacgaagctcagaccatcaccgaagtgaagaccttcttctactacgatggtcgtgcgtcttggccgaagagccagacgctggaatatcaggatgaggctggcgaatggcatggagtcggtaccaaggatggctggaagatacaggccggcgatgccggctctggctccgacggcatcaccgccgccgacaccccgaccgttgacttcgtgctcggcaccccggtaaaggccaaggccatctgcctgactaacacattgcaggacaccaaggtgtacatcaacgtggctgagatccaggtgttcgcacaagacagcacggtactcaccccgcagccagcatccgatgccacgctgggcgacctgcgtcttgacggcgaaaccgttgaaggcttcgacccggccaaggccgactacacggttgatctgccggtcgacgccgaggcaaacccggtgctgcaggccttcgccaccgacaatgccgccgccgtcaaggtgactggcgacgcggttgagaacggcaagcttggcggcaaggccgccattacggtgacctcagccgacgagtctgagacgaagacctacacggtgaccttcaacgccttcactttggcttcgctcaaggtgatcggacccacgaagaccgagtacgccatcggcgacaagctcgataccgccggtctgaaggtgactgccgtctaccagagtggcgacaagaccaaggaagtgccggtcgctcttgacgacccgcagcttgcgattggctcgttcgactccaccaccgcaggcaagaaggcgattaccgtctcctaccgtggtgtgaccgcgaccttcaacgtcacggtcaaggccaacgcagtcgcccctggccctgaagaacagaagcccggcaacaccaacaagcccggtgccaccggcaacggcaacaagaacacggtggccaacaccggttccagtgttgccgccatcgctggcgctgtcgctctgctggccgctgccgcgggtgcactgttcatgctgcgcaagcgtgcatagcaccctcgcgcagtaatgggtgaaggaacaagccggcaatattgactattgccggccggttcctccgctctttgaccataattggtccgacaagttgaatactgagttttcagtatcggtatattgatttgtcgaaccttttctggcttcgcggatagcgacataactgtttgttcaaaaaaccgttatcatcaatcaaggaaccaaatcaatgaagataaacaataagggcaagggcgctcttatcgcggcaattaccgccgcggcaacgctattgtcatgcgggctggccgctgcaagtgccagtgcggcaggtgtggattacctgcctaccatcggccaagtgccgacatacaccaagttccagcccacagccgatccgggcaagaacgctagcgattacttccagccatattggtatgccaagaacgccaatgataatggcggcacacacatccaagcgcacggtggccaagtggtcaaggttggcgacgcctactactggtatggcgaagaccgttccaacggttacgacaacagccccggtgttcatgcttatatgtcgacagatctatacaactggaccgatcttggtgtggcgctgcgtgcggtgaccagcaaatctcagttgacggataagagcaatgccgattacgcctacttcgacaaggcctacaacctgaccaagtccgacggcagtgtggatgctgccaaggccgacgcaatcttcccgtacctcaacaccaaccccgatcaggatggtgatggcgcggttgattccgtacagggcattttcgagcgtccgaagatcatctacaacaagaagaacaagcaatacgtgctgtggtggcattccgatggaagcaccacgccgggcggttccaactatgcacgtgcacttgcgggcgtggctgtttccgacaatccggcgggcccgttcactatggtgggtgcctatcgtttgcctaaccagaacaattggaaagaagccgcaggtaaccccagctggggtgagaacggtgacagccgcgatatgactgtgttcgtggacccgaaggacgacagtgcctatgtactgtattcttccgaagccaatgccacgctgtacatcgccaagctcaacgatgattacaccaatgtagtcaagaccacgaatgtggaccagtccgaggggcaaaagcagtactctgctgacgggcagtacccatacattcttgcagacgctactacggatgccccggtgcgtggcgaagatttccaaatcgtcaaacaaaatggttcgctggaagctcctgccgtattccaatatgacgggcgttacaacatcatcgcatctggtgcaaccggctgggccccgaacaagcagacctactacaccgccgactccatgctgggaagctggacccgtggcgtggaaaaggacgatgtcaacgagaacacgtggtacaacaacatgccggaaggcgcggatggtctgttgtccgtgggcgatacccgcggcaccacattcggttcgcagtcggctagtgtgctcgcagtagaccaggagaaaggtcacttcatctaccttggtgaccgttgggattccggtaaagccgattccacctatgtttggctgccgctgaccatcggtgagaacggcaccatcgaaatgcacaatcctgctcaagaaggcgagcccgacggttgggatctgagctattggggcaaccatggtagcgccaagggcaagctggtcaactggactgtggaaaccggcgatgatttcccgaagaccgtgaacacgggcggaaccgttactctgccggacaccgtcaacgtcaaggaaggcgacgataccattgctaccaaggtgacatggaatgtggaaggcggtacggcagtcagcaagtcgaccaaggctgctggtaacacctacgcattcaatgtgccgggaacctacaccattacgggcactcttgccgagagcagtaacttcaatccgggccgtacattccgtagaaccatcgatgtttcctgctccaacccgatttccggaagttggaaggaagctcattggaagggcggcagcgcgtgccaggtttctgcgtccggcggtgcttatgacttcacgattacggacaacgccaatcgtggcgtctggacggatcgcaacgagggcagtgcggtgtaccagcctgatgctctggacgtgaacgaaacgctggaaaccacggtcaagccgctcgacttgggcggtaatggcgatccgcgcgccggtctggtggtccgtaacggtcttactggcgctaacggcggcaagggatatgccacgttacttgccagcccaagcggcgtttacatgcagtacgattccaatgccgatggctacatcgataaggaaacatcgcatgttggtaccggcttcggcgaccaagtgcagctcaagctggagcgcacctcaaccgatactctgaaaggctactggcgtgcttccgcgaacgatgaatggcaggatgtcgctacggtaacgctgaccggtgcggacgtaaccgggctcgatgccggtgctttcgccacgtcgaacagcaatgccggcgcattcaccgtggccttcaacggcactgcgttcggttcgcagactgctgctgtggagtccatcgcggccaagggccctgaagccactatcgccaagaggcagacgctcgcgcataaggacgtgacggttaccgctacgctcaccaatggcaagacgcgtgtactggagccagatgaatacacgttggaaggcttcgacaccaccaaattgggcgagcaaaccgtgacggtacgccttgtcagtgattcttcagtaactgccacgctcaccgtgactgtggaaagcaaccttgcccggttgttctgctcgtccgccgcagcctcgaagtatgagccggccagcagctgggcctccgcttctacggccgacctgacttgtgacaacaatctgagcaccaactggtcgaactggggcaccggcgacacctcgccgtggctcagctacaccttcgataaggcatatcagctgggcaggctcagcgttgcggtggataaggccaagggcgaggccgctccgaagagcttcactgtatcgtacctagctgaagacaacgccacgtggactgatgccacgctgccggcagtcactgtgaatagtgctgctggagccgtgacggaagccgatgtgagcgctctgcccgccaccaagggcattcgcctcaacttcacctacgccgatggcaatgactatgccaagatcgctgaagtacgcatcgccgaaggtgaagcaacgccaaagccgcagccgtctagtaacgccaatcttgctgatctgactgtggatggcaagacggttgacggattctccgcggatatcaccgaatatgccggtgcgctggccggagacgctgcttcttacccgacggtggaggcgactgctgctgacgcgaaggctacggtgcaggtggagcaggcttcgaccgagaacagcggcgtggccacggtgactgtaactgctgaggatggcacggcggaaacctacacagtgacattcggcgaactgcctcagttggccgagcttgctgtggaagtgaccaaggattcctatcaggtaggcgataagttcaacgctgccgatgtgaaggtatccgccatttacaaagtcggcgataccgaaacgctgcgcaagctgattgatccaactgatggtgatctgaagttcactggctttgattctgccaccgcaggcacgaagaccatcaccgtctcttatcgtggcgtgaacgcgacgttcgaagtcacggtcacggccacggaggtcactcccggccctggagagcagaagcccggcgataccaacaatcctggcaacactgctaagcccggtaacactgccacgaataagccggctgctaatggcgctgcgcccctttcgaatacgggtgttgccgtggctgccattgcggtcgtggttgtggtgctgacagctgcggctggtgccttgctcgtcatccgcaaacgccgcgcataaccatggcaactgctgagtggcgtggattgcgttgctattgagcaatctgcgattcacgccactcagcgagtgcacccgagtgcgcccgagcttgcgcaatgcaggcgcaatacagtgcaaacagtacaaagcaacaataatggccggtctgagccagctgctccatgcgagggcagctggctcagaccggccattgtgtctgcaagtacatgcaattagagcatgaacatgtggaagccgttgagcgttactggttgttttgctttgttgttgcgctcagcagtgcgacggacgtccgtccgcagtgtagtgcagcgctccgtgaaccagcgccgatgtgaaatgcatgttgcacatgcccgcttcttctgcttcgtgcgtgcagccggcgatgctgcataggttcataccccgaatcatggtcataccccctctttgggatggcatccgtgccgccatctgccttcagagcatagcggacaattgttgcattgcctaggcggtacaacgctttctgtggcctgtatcacatccttgccggcgttctgcggcgtggttgggcgtgtacatgtgctcttgtgcggttttgttgtgtgtgatttgggtatacggatagagtttcttctctgcagtggcaagggcctctcggccggcgagccggctgatttctcccatgcgttgctcaatgatttccgttttgcgagtctgaacggcaaaatagctctggagaagtgccacttcttctttcttaggatcaccgttttgagcaatgagatagcaggcgtatcgggtgagcttgacgtccgcgatggagcgggtggcaccgctgccgagagtcacgtctcgcgtagtgtcacggaaatgggattcaacggatacgccggaattgtcgcaagcttgcttggctcgtgtaatagctttgctgaagttttcccatctgtcgtaccccatataggtcattagctcgcgtgcataccaatactcaactttggagtcctcggtggtgtgtgcgatagtgctgagttcgctggttttgcgtgtgatttcgtcgcggttcatgggtgtgtccttatgtttttcatgaccattttcgtgactccacgaaaatggtcaaagccaataattgcaatggttttgaggtatgggcgcgctccgcccaactggtctgtcttcgtccgccttttcgaccagatacctcatggagcacaatgccaacgtcgctaccgttggcccagcaaatattcttagacgacgccccgaagtgaatatctatgcggctttcagaatatcaaagagcgtggagtgtgtgcattatgcgttccaaaaatagtttctagtaatgaattgtttacggtgtgagatattcttggggtgtttgcggcgctctgccgtgtggcgaatgggaatggatggtgctcttatgggatttgagcaggaagcagttagtgaactgtatgccagcgtgtggggcaatcgttcgacgatgcagagggaattcactcgtggagcccatggtgagcagttcgtgctccgggagctgtccatgaaggggacgcaaacgccatcgcaattggcatcggcgctgcaggccagttccggccgcatctccactgtgctgtcgtctctggagaaaaaaggctgggtcacgcgtgacattgattccaaggatcggcgcattattcgcgtgaatctcactgattccgggcgcgagcagtctcatcggatgatagaggaaatgcgttccgcaatttgctggattttctcgcaaatgggggagcggcgcacgcgcgaattcgttgacctggtgtctgagttcaccacatatatgtcgatttgccatccggggcggcctcggccgacggctgaacaagtgcgtgaggcattcgtggagcgggacaagcgcgtggctgaacacatggcagctaagcgcgcggaggctgagcgagactagcttcctcccgctggcgggtctctccctccgtcactgctgcgcggtgacacctccctcgtcagaggggggtaaaggtaattgaggacgctcacagcgaacatacagaagtgcgtataatatctcacagtgtaagtaatcaaacaatggaaactattaagacatcgtgaaccgataatcaccgataacccagccaacttaagaaccaatcgccaataaccaataaccaacccaaccaacacaaggggaaaccaatgtttcgcatcatgaaatacctctccaaagcggagatcggtcagatgctcatcgccctggtgaccatcgtcgggcaggtctacttcgacctgaaactgcccgactatatgtcagacatcaccacgctggtcgagacgccgggcagcgacatgaaggacatctggatcgcgggcggcaagatgctgctcatctcgctcggatccgtggcgtgtgccatcatcaccggctacatcgctgcgcgcgtggccgcctcgttcacccagcgtctgcgctcgctcgaattccgcaaggtcgagtccttcggcccggccgagatgagcaagttctccaccgccagcctcatcacccgttccaccaacgacgtcacgcaggtgcagatgttcatcaccatgggcctgcagctcatcgtcaagtcgccgatcatggccgtatgggccgtgtgcaagatcgccggcgaaggcttcgaatggacgctcgccaccggcatcgccgtggcggtcctgctggtgtccatcaccgtcatgatggccatggtcatgccgaagttcaaggtcatgcagaccctgaccgacaacatcaacctcgtggcccgcgagaacctcaccggcctgcgcgtggtgcgcgcctacaatgccgaggactaccaggaagccaaattcaccaaggccaacaaggacctcaccgagacccagctgttcaccaaccgcgtcatggcgttcatgatgccgttgatgaacaccgtcctgaacggcctgatgctcgccgtctactggatcggcgcttacctcatcgacgccgccgggctcaaggacaagctcaccgtgttctccaacatggtcgtgttctccaactactccgtgcaggtcatcatgagcttcctgctcatgagcatggtgttcgtgctctggccgcgcgccgacgtgtccgcgcagcgcatcatggaggtgctcgacactgagccaatcgtcgagaacggcaccaaaaccgccgccgacgtggccaaaaccggccagaggggcaccgtggaattccgcaacgtcagcttcacctacccggattcgcgcgaggcgatgctggaaggcatcaacttcaccgccgagcagggccagacggtggcgttcatcggctccaccggctccggcaagtcgtctcttatcaatctcgtgccgcgcttctatgacaccagccaaggccaggtgttggtcgacggcgtggacgtgcgcgactacgacctgaaggccctgcgcgacaagatcggctacgtgccgcagcagtccgtgctgttcaagggcaccgtggcctccaacgtgagctacggcgatcagccgggcgacccggcggaggtcgagatggccgatacctccaccccggccgggcgcaagcgcgaggccgcgttgatcgccgctggcgaggccgcggaaggtgccgatataccggccgagcagctgaatcgcgtcaaggccgccgccgacgtggcgcaggccagcgagttcgtggcgcgcatggacggcgggtattccgccgcgatcgcccaaggcggatcgaacgtgtccggcggccagaagcagcgcctgtcgattgcgcgcgcggtgtaccgtcacccggaaatcctgattttcgacgactcgttctccgcgctcgacttcaagaccgaccgcgaagtgcgcgacgcgctcgcccgcgaggccaaggattccaccaagctcatcgtggcccagcgcatcggcaccatcatgaacgccgaccgcatcgtcgtgctcgacgacggcaaggtcgtgggtcagggcacgcacaaggaactgctcgacaactgcgacgtataccgccagatcgccgaatcccagctcagccagtcggagcttacggcgtagggggcggcagcggtagctccccatgtcaggggctgagccgtaaagggaacagcccagtgggctgttcccaggcgaagacgagctgataagcgagcgaataaaacagcacagctgactgaggggtagtcgcgtacggcttctctccctccggcgcttcgcgccacctccctcatcagagggaggtcaatacggacttttaaggagtaaaacaaatgccaagaggaccaatgggcggcaggcgtgccgtcgaaaagccccatgatttcggcaaagtcatgggcaaactcgtgaactactgccgcaactatcttcccgtcatcatcatcgcgctcatcctgggcgcggccggcaccgtctgccagatcgtcggcccggacaagctcaaggacatgaccaacgagatcgtcaaaggtctgcccgccatcgtcaacggcagaccggtgatgaactcggtagatttcggcacggtgggccacatcgcctggactttggtggccctgtacgtgggctacgccgtgctcggctacgtgcaaagctggatgatggccaacgtcacccagcgcaccgcccagcgactgcgcgagtccatctcggtcaaaatcaacaaactgccgctcaaatacttcgacaaggttagctacggcgacgtgctgtcgcgcatcaccaacgatgtggacgccatcggccagacgctgggccagtcgctcggctcgctgattacctcggtgacgctgttcgtgggcgcgctggtgatgatgttctacaacaacgtgatcatgaccctgtgcgccatcggtgccagcctcatcggcctgatcatcatgatggccatcatgaagtcctcccagaagtacttcgcccggcagcagatggcgctgggtgatgtcaacggccacgtggaggagatgtacgccggtcacctcatcgtcaaggcatacaacggcgaggccgattcgattcgtcgcttcgagaagtacaactcggacctctacgagtccggctggaagtcgcagttcctctccggcctgatgatgccgctcatgaatttcgtgggcaacttcggctacgtggtggtgtgcgtggtgggcgcggcgctcgcgctcgacgggcagatcgagttcggcgtgatcgtggcgttcatgatgtatgtccgcctgttcacccagccgttggcgcagttcgcccaggccttccagaacctgcagcgttgcgcggcggccgccgaacgcgtgttcggcttccttgaggagccggagatggaggacgaatccggcaagtccgctttgcttgggaccaacggccacgaagtgaagggcgacgtggaattcagccacgtacagttcggttacgaaccgggcaagccgatcatccacgacttctccgcctccgtcaaggccgggcagaaggtcgccatcgtcggcccgaccggtgccggcaagaccaccatggtcaacctgctcatgcgcttctatgagatttccggcggctcgattgcgattgacggcgtggacaccaagtccgtgccgcgctggaacgtgcacgaccagttctccatggtgctgcaggatacgtgggtgttccgcggcactgtgcgcgagaacatcgcctactccaagcccggcgtgaccaacaagcagatcgaggatgcgtgcaaggccgtgggcctcgaccacttcatccgctcgctgccggacggctatgacaccgtgctcgacgacaagtcgtcgctctcccagggccagaagcagctgctgaccatcgcccgtgcgatggtgcaggacgcgccgattctgattctcgacgaggccacctcctcggtcgatacccgcaccgaagagctgatccagaaggccatggacgcgctgaccgtggggcgtacgagctttgtgatcgcgcaccgcctctccacgattcgcgacgccgacatgattctcgtcatgaaccacggcgacgtgatcgagcgcggcacgcacgacgagctgctggcggcgggcggtttttacgccgacctctacaacagccagttcgcactcgctgactgacggattgtttcctgcgttagcggattagcggattagctatactcggctcccctctccgaggggagctgtcagcgtagctgactgaggggagcaacccatcggtccacccgagggatgtgatactgatgatttcgtgcattagtgtgtgaaaaagccgccgggaaaattgggggattgggcggcggtgcggttggcgttgagaatggcgcattcgaaggggaagtgagcgcgcagctgggtggccggggtggtgaacagggcggtggcgaggccgtcggccagtgtgacagggacgtgtgccgcgacggtgttcgacgaatcgtcggtatcgcggtttgccgttgtcgaggcattgctgccatgcgtcgatgtcttcgtggttatggcgctcgatggcggcgtgacggccacccatgtggcggctacatcgtcaaccggtagtccgtcgatggcgttgagcagatggtgaagttggtgacctgcggcgtcagaccagtggcggcggctgggggagctcgcgcagaatgcgccgtggctgatttcgaccgtacctacggcgttggccggatcggcaggatcttcaagggcgatggtgattggttcgtccgtgtgcactagcaaatcacccccggcgtcgatgacgtattgaatgggttgagggtgacccgcgccatcacccaacatccccgcaagcaaatccaccaaataccccttaccgcacgcgccgaaatcgagcgcgaccggtccgcgcgtcaccagtgttgtgccatgccgctcaacgtcggctgaccaaatggctcgtccgtggatcgcgcctgcatgttcagcggcatctggcgcaggcgtaaacgaatacgactcgtcatagccaagccgaatcaaatcctcgcccacgcatgggtcgatggtcccattagtcgacgcaaacagctggtcgtacaggccaaataaacccaatgcccagtcaggaaaatcgaacgtgccgccatgcgtggccgtgcgcatccggccgaccgtcgaatcatccttgaaccgggacaatgcggcttcataggtgctgatgaacatatcgatgcagttactgagcccgtcgtccagcgcgacatcggtatgcagcagcaacccggtgcccagcgcttcggggaaagcggcgacgtgcggtagtcgttcggccagaccagtcatggctctcatcgtagagcctgcggatggctgaggggaaggcggctcggggtgtggattgtggtgtgcggttttgccctgcagggaattgagtgtaaaaccgttgtagatgactttgttttagcttgtcgctagagcgaagtcatctgcatggcctcgttgccgaggccagctccaagactcacacggcttacgccgtcgcttggttcgcgtttcacaggatgccgcgttgcccgacgcgatgcgtcggtccgtcttccgcttcctccgcgcgcgtttaacgtctccggggcactcccggcgacttggatgttgatggccgcgttc

SEQ ID NO: 2614 - DNA, 21545 bp, Unknown
  R222_15m  MAG No. k141_22878
gatggcgctgcgcaatgccgataggctgatatccagtccgacgcttcctgtggtgtcattggccgcggtcaccgtttcccgactgatggttatcgccaaacgcccgttgccgtcagcagccaggtagccgcggactgtgccatcggcgagcagctgttcggctttccgcacggtgtcggctgcggtgatggtcagcaattgctgattgatatcggcgtatgccgtgccgtccaaagactccgacgatgaggccgtctctccagacaaggcatccacaaacgtacgcgctccgtccgcctgctgccagcggctatcttcgacgacggccattggtatcggtttgagctcgtatccctcggacagtccgccgaagaacccgttgaacatggttgccagcacgatcggaaacacaatcatccagaacagtgcctgacgattgcgcaggttcgctttcaatgcgaccaaaaatgtggtccacatgatgtctccttacctgctcccgctggcgggagctgtcggcgaagccgactgagggtggttactacgggaccgcccccgcccgcttcgcgggagcccccgccagcgggggcaagattgttagtcccttaacgccttgccggtgagttccaggaatacgtcattcagggtgggcgggcgactggtcaggtggccgatgttggcgccggagcgtttcaccgcgtcgagcacgtcggtcaggttgtgttcgccgcgccggcatcgcacgtcgagttccttgccgtcgtaggtggcttcgatcacgcacggcagcgcacggacctcggccatcgccgaatccgccagatcgagcgtttcgatggtgatgcgctcgcccgtgtcgatcatgttcttgagctcgtcggcggttccgagcgccaggtgccggccgtggtccatgatgaggatgcggtcgcagatctgctcgacctcctccatgtagtggctggtgtagatcaccgtggcgccggcctggttgagccgctggatgccttccagaatcgaattgcggctttgcgggtcgacggcgaccgtgggttcgtcgaagaagatcaggtcaggcttgtgcgcgatgccgcaggcgatgttcaggcgtcgcagcagtccgccggacagtttgccgggccggaacttgcggaagtcctggagaccgacgaattcgatggcctcctcgaccagcggcgcacggtcagttttcttcggcacgtacagcgagcagaagtagtcgatgttttcggtgacggtcagttcattgaacacggccacgttctgcggcacgatgccgatacggtgcttcagcgcgtaggaggtcggcgtcatcggctggccgaacacgcgaatcgtgcccgaatcgtaggtgagcagcgcgaggatgcagttgatcgcggtggttttgccggacccgttcggtccaagcagcccgaaaatctcgccctggttcacgtcaaggtcaaagtagtcgagcgccaccatgtcgccgtagcgtttgaccagttggctgacgtgcacggccagggccgggttggttgtcgagtcgtgttcggaagctctgttgtcggttgccatagccactcccttccttggtgattccatcatcccaagaaggggccagacgccgccacaggcaaacgtcacgacttggccgcacaggcgtgacatttgtcattacagtccttcggcgtcggtctgcatggccttgtacaccttatcgaccggcatcaggctgatctcgtccatcgaatagttggacgccctgtggctttgcgcaatcatcggtatcatccctttacggttgtgtcgacaacatccgacgcttgtgcctcatctattcgggaagtgtagacccgttgtcttggaccgtcatgcgaataattccgcacgcccgtcaagttcgtcgtgttccgcacaccgctagactggtggtggaagagcgtcgagccggggaggtgccatgcgcgtgttggccgagaagggcttgctgctcgtgttgggcctggctttggcctggcttgtcggggtgcggctcgatggcgtgttcatcgccggcctgctgttggccgtttccgtcgccggattggtggaatggctgcgtcccgcgcaatggtcttgggtcttgtgtacggcgtatctcgtcatcgccgtggcggtgccttcatggtgcgcgttcatgccgctcatcgcctacgatactgcacagctgccggccctcgcctcgaccggagcccgggctggggcacggactgcggcaagcggccgctcccccagtgtctcgcggaccgcggcctctcgccgttcccttgccgatgcaatacgttcggccccgtggctttcggtcgccgcgcgctggatatgggtgttgccgccgatcgcgctctggttcgcccgtggcaccgaccgtctccagacgctggtgatgacgatggtcgccctgcttggattcgttctgggccgggcccgcgcctcctcggacgaggcgcggcgcgcgttgctgcacgcgcaggacagggcgcgcgaatcctcgcgggccactcgttcgcgcatcgccgacatcgatgaggaacgcgcccagtcgattcgcatggcgaccctcggcgagcgcacgcgtatcgcccgggagatccacgacaatgtgggccatctgctgacccgcgcgatcatgcaggcgcaggccggcaggacggtggccgaggcgacgaacgatacggtcgccgcgcaagggttcgccacgttgggtgcgacgttggatgatgcgatgacgatggtgcgccgttcggtgcatgatcttgaggatgacggcactgatttcgccgcgcagatcgatgatgccgtcacgtcgttcgacggcatctcccccggtttcgccgtgacgctggccaacgacatcgccaaggcgcccgcgccggtctcgcgctgtttcgcgaccgtgattcgcgaggcattgtcgaacgtggtgcatcatagtgcggcgcgcgaggcgagcgtgacgttgcgagacttccccgcgttctggcagttggtcattcaggatccggggccggccgtgtccgagtccgatgggtcccggacggccgctgcccgcccgcgtgcgatgcgtgccacgctcgtcggctcgcgactcgccgccgacagtgttgccgatatgcgcggttcggccgatgagctgatgcgcggcatgggtttggcggatatcgaatcgcgcgtacgcgcccttggcggcaccgcggtctgcgggccgtatgagggcggctggcgtgtgttcgtatccgtgccgaagaagcgttggaccatggaatcgagggattgatgagaatcgcaatcgtggatgatgatccgatcgtctgccagtcgttggagacgattctgacggccaccggcacggccgaggtgctatggacggcaaatgacggcgacgccgccgtgcgccgttatttcgagacgccggcgagccgaccggacgtgctgctgatcgatattcagatgccctgcaccagcggtttggatgccgcgcgcgaggttctggccacggacccggccgcgcgcatactgttcctgaccacgtttgcggaccagtcgtatatcgcgcaggcgatggggcttggcgccaagggctatctcatcaaacaggatgtggcggcggtcgggcctgcgctgcaggcggtgatggccggtcaggtggtgctcggcgcggaagtgctcggcaagctcaccgaacggactccgaatcctgccgattccgacgattccggagataccgccgattccatcgagggcctgcttggcgagcgtgagcgtgagatcaccgcgctggtcgccgagggcctcgataaccgcgacatcgccgccagactgttcctgagcgaaggcacggtccgcaatcgcatcagcgcgatactggacaagctcggcctgaccaatcgcacccaactcgccatcctctggctcaacgcccatcggtgaggggcctttggtcaagtaggtctctccctccgtcatcgcttcgcgatgccacctcgaacgcgattcaggacagcttgcagctgacctcttattcgctcgttgttactcacccttgcctaaaaacacctccggcgttttcttcacggctcggctcatcagagggaggttgtgaaaaaccaacctcagctgtttttcatgacgatactgtcgatggtgttggccacgcgctcgcagtcgtcggagcactgttcgaggtgacggtacacgtcatgccaggcgaacacctgcagcggatcggtgcaggtggtgtgcagcgtgcgcatcgactcgatgaacaggtggtcggcgtccgtttcgatcgtgttgatggcgaacaccagttcgcgcaacgtcttggaatgccggaatcgcggcagttcgttgaccagctcgcagatgctttccgtggcgcgcaccaccatatccgacatctggaccgcatcgtcgcgcatgtcggtcacattgtcgtagtacatgcggttgagtacgccttcgatgctgtcggtcacatcgtcgagcacgtggccaagctcgtcgatgtcctcacggtcgaacggcgtgatgaacgcggtcaccagttcgtccatcatgtcgtggcgcacctcgtccgccgacttctcaatcgcgtgcatgctgtccatgcgttcgcgcagctggtccggattgaagtcgtgcatgacctcggacagcagcttcgcggcctggcatgcgtagtccgcgctgcggcggaatccgtcgaagtagaacacgtctttttgtctcgccatgatgggtggattcctttctagaacacgaccatgaacagtttggccattacgaagctgatgagaccgcaaccggggaaggtgaacacccaggtgagcatcatgtcgcgcaccacgccgaagttgatggcggagaggcggcgtaccgcgcccacgcccatgatggcgctggtcttggtgtgcgttgtggagacggggatgccgagcacggtcatgacgagcaggcacagcgcgcttgacagatcggccgagaagccttggtatttctcgagtttcaccatgtcctggcccacggatttgatgatgcgttcaccgccgacggacgtgcctacgcccatgatggtgctgcacagaatcatgagccagaccggaatcatcacaccggtcacgctgggttggccgttgcagaacgccatgccgaggaacagcacgccgatgaacttctggccgtcctgcgcgccatgcatgaagctcatggccgccgcgcccacgatctgcgcgtaggtgaagaacccgttggtgcggcggcggtccatgccagcgcaaatcagggtcacggccttgcataccaaccagccgacggcgaagccgaacaggaggcttgcgaccagaccgtagagcaccttgacccattcgcccatgttgatgccgccgatgccgccttggatggcgatggccgctccggacaggccggcgatcaggctgtggctttcggaggtgggtatgccgagcagcgaggcgcccacgctgtatacgacgatggagaacagcgccgcgcatagggcgatgagcgccgcgttcgtgtcgccgccgaaatcgaccatgttgctgatggtggaggccacggaagcgttgagctgcgtcatgatgaagacgccgaggaagttgaagatggccgccatgatgacggcggagcgtacgcgcatgcatcgcgtggtcacgcaggtggcgatggcgttgggtgcgtcggtccagccgttgacgaagatgactcccagcgtcagcaacgttgtgacggtcagagccgggttggaaagcacttgttggaggaaatgcgccagtgagacgtccaaagggaatcaataccttcttcttcgggggcggaagccgtcacactgattgtaacggaagaatggctacgtagttcccatggcgcgcgggttttatggtgttgttatgctgcgcgccgcgcatcctttcgtgaaaacagagcgggacagtcgtatgcttcgattcggcgcctgcatcgacaactatcgtcatctaccgaggattcggtcatgcgtgtgcgaaaatggacacggtgtcaatcaggaggtgcacagtggttgtaagcacggattcgagccgcacaatgcccgattgggtgaagtacggggtgttctggcacgtgtatccgctgggcttctgcggtgccgatatcaggcccgccggcccgcgccagttccatggccgcggccttgacgcgatgatcccttggctggagtacgtgcgcgatctaggcgcgtccggcctgctgctgggtccggtgttcgagtcggcgacgcatggatacgacacgctcgaccatatgcacatcgatgtgcgattgggcggggatgccgcgttcgaccagctgattgcggcctgccgggacatgggattgcaggtggtgctggatggcgtgttcaatcatgtgagccgcgatcatccggccgtccgggcggcgcttgacgagaccgccggacgcttgaatccggccgacaacccgtggcatggtctggtccgcgcgcatgtcggtgataatgacgaacccgctttggatgtgttcgaggggcacggggatctggtggcgctggaccattcggctgacgagaccgttgactatgtggcccatgtgatgagccattggctggatcgcggagccgccggctggcgcctcgacgccgcgtatgccgtgccgagcccgttctgggcgcgcgtgttgccgcaggtcaaagccgcacacccgtattcgtggattttcggtgaggtgatccatggcgattacccgcgcatcatcgaggaatccacgatggattcgatcacgcaatacgagctatggaagtcgatccagcatgcgctggagacggagaacttcttcgagctggattggaatctcaagcggcacaacgcgttcctggattccttcgtgccgcagacgttcatcggcaaccatgacgtgacgcgtatcgcatcgcagattggcccggccaaggcggcgttggcattggcggtgctcatgacggtcggcggcgtgccaagcatctattacggcgacgagcagggctatgtgggcgtcaagcaagagcgtttcggcggcgatgacgacgtacgtccgaagttccccgactcccctgccgaactgtccacgctgggagagccgacataccggctgcatcaggcgctgatcgcgctgcgccgtcgcaacccatggctgatggatgcgcgtaccgaggcactcgaactggaaaacaagcatttcgtctatcgctcagtgagcgccgacgcccaacactccctaaccgtggacctcaacatcgagcaatcccccaccttcaccatccacaacgccgacggctccgtagcgtaccaatattaaccagcgcttggccccctccctgaggggagccaaggaacgtcatcgacgtccgttgcgggtaccggacgagcggaatggcgagctgttcttcttggaatggtgacgcttcgggccttgtgtattgccgtatttggcgatcatacggcgctcgtgacgcttggccccctcggaacgctcatcacgcacgatgcggttctcgttcttgcggtggatacgcttgctgccttcatgcttacgcgagccgaactcatcgcttcgatcgtaatcgaatctgtctcgccgatcggacttgccgttcttggagtacttatcgccgcgacggtcatcataacggtcatcagatttcttaccgcgacggcgatcctcatatcgagtgtcggcacgatcctcgcgtcgattgccacgacgctcatcgccatgctcgaacagataatcgcgacgctcggcctcgggattgctcatgccggcgcgacgttccgcacggttgcggttcttcttcatggccttcttgttggctttgccgccgtgcttgtgctgcggctgatcatcgtaggactcgccgccgacattctcgtagcgagtttcggtctcggcaacgttctgctcgccacggttgcgattgcggctatgcttacgcttgctgccgcggccagactcatcgccagccatatttttggcgcccttgttcttgcccttgcgcgggttgccgacgggctgcgacttgtcgagactccagccgtccacgcgctcggctcggtcgcccacaagctcaagcacttcgggcgaatcgtgagtgacctcaatcatcttggttttgataccggcctgattcagcagtcggcgcgtttcacgacgctgttctggcagcaccagggtgaccacgtcgccggacttgccggcgcgggcggtacgaccggagcggtgcacaaaggacttcgggtcggccggcggctcgacctgcaccacgagctccacgccgccgacgtctatgccacgggcggccacgtcagtggccaccatgacgcgcacatcgccggaatcaaatgcggcgaggttgcgatcgcgctggttctggttcaggttgccgtgcagctcggcggccggaatgccgttctgcgtcagattcttggcgagcttcttggcctggaacttggtgcgggtgaacaggatgcggcgaccttcgcccgaggcgagcacgcgcacgagttcgtgcttgtcgccgcgcgtggtctcgaacacgtggtgggtcatcaggtcaggttcggtggtggccgaatcgacctcgtgcaccttgggatcatgcaggaaggtgttcaccacttcatccacgccgtgatcgagcgtggcggagaacagcatgtgctgggcgtcgggcgagatctgctcaagcagtcgcttgaccggcggcaggaagcccatatcggccatttcatcggcctcatcgatgaccacgacttcgacggacgagagcgtgagcgcctgctggcgcagcaggtcctcaaggcggcccgggcaggcgaccacgatatcggcgccggccttcagatcgcggatctggtggatgtacttgacgccgccgtacaccgtggtggtgttcatgccgaacgtgtgggccagcggcatcagcacgtcgttgatctggttcgcgagctcgcgggtgggggccagcaccaggccgcgcgggtgcggcaggaagtcgtcggcgcggcgctcttccaagctggccttcttgcgacacttgatttccttgcggaactcctccatcgcgatttcgccaagcgaatcataggagccaagccgggtgaccagcggaatggagaaggcgagggttttgccggagccggtgcgccctcggccgagaatgtcgcggccggccagtgaatcgggcagggtgtcggcctgaatggggaatgcggtcttcttgtcatctgccgcaagtacgcgcaccagcggtccgggtacgccaagttcgccaaaggtaagggggcgggattccgcgctgtcgttcatctggaaatcagcggaatcgtcacgatcatcgaaattattacggggcacagtggcctttcatgtcaaaggttacgcaaattacgcaagctttccgagcttagcgtaagccccctactttgcttgatgctcgccacgctgtcatcccactctttactgatgaccccatggggcggtaactcgcccatgaggcggtaactcgcccatgaggcggcaacttgcccatggggcggtttgaagaaattgtgaaaccgcagaataaagccattttcgtctaccgccccatgagggttttaccaccccatgggatgtttgccgccccatgggccaattaccgccccatgggttctaccaccacgtaaggcgagcaccgccccatggaacacgcaaatggcccctacccgtgaaggtagaagccattgtgcaaaagggctgagccacaatacggcccagtagccctaaaacacactacaaaatatccggatcgtctttggcgatagtgccggttgccttgccaatggccttcaggccgtggtaggccacaagaatcacgatcgtgccaatggcaatgccgttgaaggaaatgccaccaacagtgaacgcgaattggccgatggcaataatcatggtgatggctgccaccatgatgttcagcggcttgtcgaagttgaccttgttctcaacccagatgcggatgccgatcatgccgatcatgccgtacagcagcgtggtcacgccgccgagcactccggcggggatcgtgttgatcacggcgccgaacttcgggcacaggctcaggatcagggcgaaggcggctgcacaccagtaggcggcggtggagtacaccttggtggcggccatcacgccgatgttctcgccgtaggtggtggtgccggagccgccgccgaagccggcgagcgtggtgcccaggccgtcggccatgagggcggtgccgatctggttgtcgtagtcgcggccggtcatctgggccacggacttgacatggccgacgttctcagccacaagcacgagcacaacagggacgaacatgggaaggatggaaaaatcggcctgcggcaggtggaacttcgggaagccgatccatgcggcgtcaccgatggcggagaagtcgacctggccgcggatgcaggcatatacatagccgatgattacgccgaccaaaatgttgaggcgacccagcaagcccttgaacagcacggccacgagcagcacggccagcagggtaaccagtgcggtgtccggcgcggcttggaagttggtccacacggaaggtgccagattgaaaccgatgatggccacaatcgcgccgttgaccacgggcggcatgatgatgtcgatccatttggagccggcgtaatgcacgagcacgccaatcagggccagcagaataccggtgaccatgatgccgaagctggcgaccgcaatgcccttgttggcggtggtgaccgcggtgatcggtgcgatgaagccgaaggacgagcccaaatagctcggcagcacgttcctgttgataagcaggaacagtgcggtggacatagccgtgaagaacagggtggtggacgggtcgaagcccgtcagaatcggcactaggaaggtggcaccgaacatggcgatgacgtgctgtgcgccgataccggcggtgcgcacccaagtcagacgttcatcgggctcgacgacctcgccgggcgccagcgtcttgccgtcgccatgcaattgccattggaagatattggacattactactctcctcgctctcgcttggggcacggcattcacaaccagccgcactacgcgccattctagctcacgaagattttgtgaagtctctcttccgggaaaggctatttgccgtaatactccagcaggtgcggatcgacggcctgcaccacatccaccaaatcgccattggacaggtacgggcgcttgaattcgcgccacggctccaccttgacctcccagcggccggtcgtctcgtcgagcacgggccgggcggtctgctcccagcgcacacgcttggaggtgcggccggtttccgggtcgcggcgcgtgtagtgcaggcaggtgcagttggtgatcttccagtcgtccgagtcggcgcgatgcaggaattcctcgtcggccagatcctcgatggtgagcatcagggcgagcatgaagtcgccgtgggtgaccatgaccacggattccgaatcggatttgcggctcagcgaggtcaggatgttgtgcacacggtcctcggccacatcggcaatcgactcgcctgccggcggacgccagtacagcggatcggtattcttgaagttccagttgcgtgcgtagttgtttttgaattcgtccttggtgatggtgttgatttcaccccaagaacgttcgcgcagcacacggttctcctcccatttggccttgggcagggccatggtggccgcggtttcgcgggtgcgcacgtatggcgagaccatgtaacggtcgaacagctgctgctggctgacgagccagcgtccgatgcagtcggcctgcttgcgtccggtggcggtgagtctccaggagcggtcgggtacggtgacgttgtcctgcgtatacagggagttgtcgccctgttcgcccgcctggacgatgacgttcgcttcggattcgccatgccggattacgtatagatcgagcggcatgctcatatggattcctctttcgttattggttacgttgtgttgttttctgctgtttcctacttgacctgcgtaatggtgttccccttgaccatgaacgcatgccgggccatgtcgatcatcggctgatcgaacttggagtcggtgtagaactcgtcgatgacggcgtccggaccgtacagttcacggaaccgtttggtcttgttggtgttgaagttgaggtacgtgaccttcatcgtctccacatccacctcgctggccacgagattcctcacgccgagtctgcggcaggcctcccccaccgtcagaccgaaggatgcggtgaggatcacatcgtccgactcaggctggtaccaaggcttgatacgtgcgtaatatcggtcccagaaatcgtccacgagctgttcgacgctcgccacccgtttggatcggctcagttccgtgagatagccttcggtcatcttgcccacgccgtattccatttgttcaagcgtggcccggccaagcttgtatttgaccgcgtaccgcagcacgggggcgatatagcggaacactttcgggtcgtggcgggcggaatacaggtacaagtcgaacaggctttcgccatcatagatggttccgtcgaaatcgaatacgcgcataccttctgcttctactctgttattccttgtctaaggctaatctcggtaagccggcgaaagcgcaaatacgcagtgaatttcacatgaacactgttttttggattgatttcggtacaggtaacgtacactggtgacagcgtggaaggaggtgcgtaatggcggcgtctgaaatcgaacaatggtggattgataagtttcaggagaacctgggtccgattcgcaaggtagccggatggacgactcagcaactggccgacgagctgggagtcgcgcgacagacggtgtctaacttggagaccggcaaaagcccgatgaccaaactgcagtatctcgctttacgtacggtgttcagcgccgagatcgcacgtcgtgaagaccgcgatctggcacgcatcatcaagactttggtcgacgatcccattgagcaacgcattcgcgaacggcgcgcccaagagcaggacggcgaggccgttgccgacaatgccccagtcaatacggacggtggcaacgctgccgacaatgccattgccgagaaacgcaagcccagtgccgccacattgaaggcttcaaagactgccgcaacgggcaagcccacgctcagcacggcgatgcaggctctcgccgtcatcaccggcgcattggccagtggaaccgccgccggcatcatcacttacttgatgttcccggacggcggcccgaacaagcgctgagtcgccgaaatatcgaatccgttactcgcaggccacgccatcgtgatcgcggtccaacttgccgttgtatccaggctgcccttgatacaacggagcagcaccagccgcacggacttcagagcaattcgcataatgcacattttgctgcgcttgctgttgctgttgtgcctgtcgagcggcctcctcagcttgccgctgggcctcggcctgcgcggcagcctgttcttcagcggcctttcttgcagcctcttcttcagctgccttcttggcggctgcctcttcagctgccttcttggcggctgcctcttcagctgctttcttctcctcagctaccttcttcgcttcttcctcctgcgctatatcgctggctttacgaacattgataacaggcttgtccccatcttccacggattgaacaacccagttcgaagctctgagcaccattttgtccgtgtcgcttttcacctcataatcagaggaggaaaaaccggcatccttgagctcgtctttcacatcggccagcgaacgccctttcttggcgatggcgacaattttcgaatatgtggattcctccttgccgtccgcaccgtcagaagaccccgagcatccagcaagcacaagacccagaaccatcataagaatcacggtcaacgcccaaaccgcacgattgacacgcttcatgttcccgaaacgaaccctgttgttcaacattattctctcccttgtagtcgcagatctgcggatggtcggaaccacgtcaatgtgaatccaaccatcctgataattactgcttattcaatgatatattcatccattgttttcgccgatatatcgcaccagcgtttccttcattatcaactatttcaagttgcgtgaatacaccgtttataggccaagaatttcgtgtttttttgcatcaaattcttcttgggagagaatgccgatatcaaccaattccttcaatttcttcatcgcctcgacttgttcttccacagacatggatgtcgtgtgagcggcgggagcagcggcttccggcgccggcgcaagtgccggcgcttgaaccggggcggccgtcataggattgatggattgcgccatattcataccaagcaacatgccaccatcgccaaagccgctgtcttgaataccttgcgcaatgcgctgctgggcagccatattgccagcttgttgggaaacgccctcgtatgcggcaacattcatcttattcgaggcgaactgctgcacgagttgacgtgattgctcggtgaactcgatactttcgatgcccacactggacacttcaaagccaaaacgatcattccacgtacccgcattggcccgatcgccacgcacgcatgccgcgatgtcattcgccttgccgggcaattgcgaaatacgatattcattggacagcaaattgatggccacaataaacgactgtacgaattcagacagaatctgcctacgtggcccttcatcatcgaatgaatacgacacggtagtggcaggcacaaagttacgaacgaatcgaactggatcagtgacctttagcgacatggatccgcgtgcgcgaatttccaaatcgacgccatagaaccggtcgttatacaccagcggcgcagaagtgccgaatttgatgccacgaatctcacgcaggttgacgaaggccacatatttggtgcggccaggctggcctccgaaggtgaatcgatcggcaacctgattgaagaacgatccgatgccatctccggcgagcacactctgctccccgttgcgatattcataaccgcccgactcggtgatgacgttttcgatacctgtttcagagaaaatgaacgccgcagtattctctggcacatagatacgcgaaccattggtgattattccctcggaaccgtattcattcgaaccgcgatcgttgttgcttccgcggggaatgcccggcacaacgacggtgtgttccgtgaacggaccagcggtgatgatatcacgccacaggtccgcgaatgtaccgccgagcgcgccggcgaacgccttaataactgccatctgttttttcctcgatatctcatgcatatggccgatcttgcgactatgcaatcgcaagaccggccgttatgctggcatgttggttatagctgcgtttcgcgatcgcagtattcgcatcgaacgacttctttgcgatgaccggaaagcggagcgccacaaccttcgcaattcaccgaaaccacgggttcggtaatcccaagcccactacggaatgcgccaaaagtgtctttcagggtcccggccagagcctccgttccggggatggccttgttgaagaccggctcatccattggcgtgtactgtctgccgcgtatacccatgtatcgtcatcgttcctttcttggaaaaccgttacctcgatacgccagtctgatcactggcccaccgatgcgagcttctgcgtgcatcgagtcatgacctcggtgtagtaggccgaatcctcactgctgagggagttttcgtcaatggcgtctaccttctgggagaactcagagtaacgcttcatcatgctggcatagtcggtagccatgctgaccacgttgtcggatttctgatatttgttcatgaagtcaacatactcatcgataaaggcctcgtagctgtccatcgtggacttgaagtcagcactgtcattggtgttccgctgcgccttctgatccgaagactggtcgctctgcttgttggcatcgctggaatcagtgcccgtatcagtgctcttatcatcctgcttcgcggcgtcgccgtccgtagacgtatcttccttcttttccggaacctggatagtgatggacatgatggtctcgtcgtcagtgttacgagaaacgctcacactgtatccatcggcgttcttggcattgaaactgtcagcggacttgctatagtccacggtgaaaccgttgtcttgcacggacttgacgtagtcggcatactgcttggcgtcggtatcgcacacctcgatgtggaagtagtccgaagactcacttctaatttcaccctttgtggatttcggctgcggcagcagcgccgcgatatccgactccggccatgaatatgcttcgcacttggtggcgagcgatgcttccaattccgcccgatcagccttggccttcgcatcgtcacgaattacgaacacgccaccgattaccagacccacaacggtgataccgactgccacccaggccagcactcggccttgcaccttgccactcgggcgggtcacgtatacggcgaagcctgagagcagtgccggaatcaccgtggcgaacagcagtccgccccaggatcggccagaaacatccacaaattgggcgagtacgaacaacactccccaaataatggcgaacacagccagcttggaagtcttcttcaccccttgtgcattcggatcaatcacggcaggcgcagcggcaccagcaaaaccagtggcagcaccggcaccatgtgtggcgggtgcaggagccacaccaatacgcttgtccagagcggcgaggaactcatcaacgcgcttggcgctttcgtttccagtcgcctccagacgaatggcggcccctgccgcaccctgcgggactacggttagcgtgcagttcaccccatcataggagtggaaggaaaacgctccggtctgggtgttttcgttatccaaggtaaacgtggcgccagtagtcagctggtcgtgaataacttggaacagctgttgcggactgaccgcatatacacgatcaaatggcgcgccggcgggccgctgcgatgccgtagccggagtcatcggagtggtggtagcaccatcagacgctacgttcggttggccagccggtacagtattcggcacggtaggcgcattcgcgcgatcttccggtgcgtcattcgtgccttcggacggtggaaccggctgaggttgttgatcaaatggcgttgtcatgatgcccttctttccttaagcagcagcattaccagcacagaagaggcaagcccggcaaccgttacggtcaatccgactgccatggcaagccggtatcgttcgctcatcattgcgtcccttcttattgctcgctttgctctgcgatacatcgaaaccagtgtatggcgttgttattatgtacgcaaattagcattttgtatgcatattagctttattgtcgatgcttgataccgcgcatgaacatcctttccgccaccgcacctacacggatggcatcgaccattgtcggcgacacgcgcgggccatacatcagctgacaactgaatttttcggcgtgtttccgaaaagtcggcgtcctgtacgctgagaatcgagcaaccgcgtacgatggcgcagcacagcacccgcaacacagcgacaaggagcatgggcaatggcagacatccccgaagaacatttgaccgaggaactgttggatcggctgctcgccagcgccagcattgagcagtatctcgatgagggactcgtcagcgcacgcacgctgaccgactatctgttcgaccgtatggaagcccatgacctgagacgagccgacgtggtgcgggcatccggcctcaacgccacagtggtttatgacattttctccggcaaaagccgccccggccgagatcacgccattatgctggctcttggtctcaagtgcacattacgtgaaacccaacggctacttcgtcttgcaggcgtttccgaactgtggtgcaaacagcgacgcgacgcgattatcatctggtgtatacgcaatggattcgaccgcatcgccacggacgacgagttgtatcgtatgggagagacgacgttgctaccggccgattgacgacattcggcccaacaacactcaccagtgagacgcaagtaagagggcatcaaggagagacatggacgataagcaggcgatgcatgcgatgagcatcgacgatgcgtaccatgtcgagcgtacgctcgctcgcggaccttccggcgtcaccgaactggtgagcattgacggcaacggcccgttcgtacgcaagaagattccctctcccctagcgcaacgcaatgtgtgggcggcgctcagcgcctgccagagtaatcgtctgccgcgtgtggaagcgacgtacgagctgcccgaccggttcgtcatcgtctacgattacgtgccgggcagcacgcttgcgcaaattgcggaggaaaacgggcggcttgcaccgaatgtggccgtgcagcttatcgaccaaatttgcgaagccgtgcaggagcttcaccagcacggcgttatccaccgcgacatcacgccggccaacatcatcgtggcccaggatggcgcgcatctcatcgatttcggcatcgcgcgcatccggtcagaggcaagcaaccgttcacgggataccacggcgcttggcacctacggattcgcctcgcctgagcaatatggctttgccaaaaccgacgcgcgttccgacgtattctcgctgggccggctactcggattcatgctgaccggcgtatatcccgatgccagcgactacgagcagcgacttgccgatgatgccgcagtaccggctcgactacgcgccgtcatcggctatgcgtgcgcattcgagcccagcaaacggccacagagcgtccaagagtttcgccaggcgctgttctcccagtccaatccgcccataccgaacgcatcatcggcaaatccgccatcaacgagaacaacgaacggcagcgcgtcggcgtctcgactattccggcgtctgcacttgagcaaacgcgccatcgtgctgtggtccattgccggagcggcactgataatcgccgccattgcgggaggcattgtgttggcaggccaacttggcattatcgggtcggcaacatcacccgattcctcgacacaatccagcagccaatcaaccgataaggccgatggcgggcactcctcgaacgggtcaggaaccgacaatgccaatggcacgggcggagtaggcggcactgacggcgctgatggagacaatcgagacaccgtcaccgacaatcctctgaaaatagtggaatccggctggtcggcggaccagcaagggtatgtccactacgctttcgccctgcgcaacaccagtaagacccagcaggtgcagtatccgcagattaccattacggggcgggccaaagacggttccatcgtgttctcgcagacgcaagcactgaatatggcattcccgaatcagactgtatatgacgccggtcaagcaggcgaaggcaccgccccagaaacggttgattttactgtgctcaatccggatacatacaacgtcgccaaggctcagggaaccgccgccttccccatcagtggaatatccaaaatagacaacagggacggcggcacgacgttcaatggcgaggtccgcgccgtggcagatggattcaagccatctgatggacagcaaatcaagatttccctagtactgcgtaacgcacagaacgcaatcatctatggagatatcgcattcgtggattggccgggcaatggccgatccacgccattctcgattaccgtctacgatctgccgaagtatgtgtcttacgatctgtatgcgcaaatctggtagttgactttacgtctggcaggtggccgtcaggtgcctgtcaggccgctgttcgcgtcacctgcgcactgacgttacggcgcgcctggccgaacagatagatgccgatgggcagggtcagaacaccgccgatgatgaacaccagcgaaatcgggatcacgtcggccagtggcgcgaagatcaacatgccgagcggcattccgagcgtgctcagggtggtgtcaaggccgaatacacggcccaccatcttctcatcggcctcggtctggatgatggtgcgcatcgggcccatgcagatggccgaagccaaaccgttcaccacatcaatcagcaaatacgccagcagattgtgaaccacgccaagaccaacgacggagacgcccaccagagcgatgccgaaggcgaccacgcgcatgttgttgcggatgagcttggcaccgatggtagacatcagcgcgccgccgagcagcataccgatgctccatcccagctcgttggcggcgagtttatcggaggcggtggtcaggttgatgaatccgagattcaaatcgatgccctcatattcgcgggtcatgagcaacagcgtaaggttcatcggcgccacggccacgaagcacaccaaggcgtcaccgagcaccacgttgcgcaggttcgcccggcgccatgtgtagctgaaaccatctttcaagtcagcaaacacacgacggacgctggcaatcagcgaacgatcagcattggcatccgacatcggttcgagtgtgggttgcccgctattctccgcttcagccatacgcctcgcaacatgttccgcgctcttcttcggcgctttgatcaacgccacaaagccgacgccgataatggccgtggtcacatcgactaacagaatcgaccacagcggcactgtgttgataagcacagcagccaccgcaggtgccacaatcatattcaccgaattaatcacgccgtatattgagttgacgcgcaatagtttgcccgagggaacaacatccggtatgaacgactgcacagcgggcgtctgcaccccgcctcccgccgaacgaatgaacagcaccacgaaaatcatggtcagactcgcccatcccatcgcgaagctcagcgacagcacgacggtgaccacagcaatcaccatatccggcagcataatcagcaacttgcgactgtgacggtcggcccaggagccgccgaagatcgagaccacggcctgcggcaccacgccgaacagggtggccagcagcatcgccgaaccggttctggtctgcaatacgatccaccaccagatggcgtactgcacgatgctggagcccaacagcgaaaacgcctgaccgacgagcagcaacgccacacgccggatccacgcacgctcggattccccgttggccactgctgcggcataggcggcaccgggtttgttcgcgctatggaccgctgcgcgcgcattcgcattgtcatcgccggaaacctcgggtgtttcgcgcgcagttggttca

SEQ ID NO: 2615 - DNA, 20382 bp, Unknown
  R222_15m  MAG No. k141_22885
cacgctaagatgggcatcgcaataatcggcaatgagcaggtaatcggcgaggcggtgcatggagcaggaatccaacgagcaagaacctaacgaggcgacggaaatcgtaggcggcaaagtagagaccgtcgaggtttccaagcaccccgaggcttccatacccgagaccgatttgtctctggcggatatcgagcgccgtcgttcgcatccgttgcgttgggcgctgattattcttgccgtactgtgcgccatcatcgcgccgtactggttcggccgttcgttggcggtaaataatactgactccattgtgaccgtgctcgggggagtgtctccgcaaggcatcgcgctggtcggttgggtgaccgtggtgattgcgtacgtcggattggcgatggcggtggtcgtctcgccgtcctggccgtggttgatcgtgttcgtgatcgggttggccggcgagcagttcatcgcgggactcagtatgctcaatctcaatttctggtattccacgtacgtggtctacggcaagcaggccggcctggcgaatgccgcgaatctgggcattatgggtgcggcgatcggcatcgccgtatatgccctgatgttcgtgggtctgctggtgattatccggaagacctcaccactgaacgtactgaccaaaagctgggcgagcttcattctgtacttcgtgattgaaaccatcgccctgctcgtggtgttgtttggcggattgctcaccactgtgtgagcgcgtgtgccccagtccggcccctgccgtatagttttcatttggcgtaatttcgcccgcggatagagagcgtttcgagcgaacctgcacgaaacaccgcgcaacgacacaataaggaggacgccgtggcactgacggctgacgagaagacccagattatcaacgagtacgcgacgcacgaaggtgacaccggttcccccgaggtccaggtggctctgctgtccaagcgtatcgccgacctgaccgagcacctcaaggagcacaagcacgaccaccactcccgtcgtggtatgcagctgatgatcggtgaccgtcgtcgcctgcttgactacctcaagcgcgttgacatcaaccgttaccgttccctcatcgagcgtctgggtctgcgtcgataattgaagacttccgcccgagtacctaggatggtgctcgggcgttttacatatcgccagccaacggcaacaacggcaagagggttagaggataggccagcaggtaaggccgacaagagaacccgaatgaaggggttgacacgaggaacgacggccaaggggccagtcgaaacaaggtatgtgacgtccgctgaagaggacagttgcggttcaagcgagtcgccaaaccgcagcacagtatgtaggaataattagaaaattaaagaaggaggaaccctatggagggtcccgaaatcaaggccgttgaggccgtaatcgacaatggatcgtttggcaagcgcacgctgcgcttcgagaccggccgcctcgcccagcaggccgatggcgctgtggccgcctacctcgacgacgattccatgattctgtccaccaccaccgccggttccagcccgaaggagaactacgacttcttcccgctgaccgtcgatgttgaagagaagatgtacgccgccggcaagattccaggctcgttcttccgccgtgaaggccgtccgagctccgaggccatcctcgcctgccgcatcatcgaccgcccgctgcgcccgctgttcccgcacaccctgcgcaacgaagtgcaggtcgtcgagaccgtgctcgccgtgaaccctgatgacgcttacgatgtcatcgccctgaacgccgcttccgcctccaccatgatctccggcctgccgttcgaaggcccggtctccggtgtgcgtctggcgctgatcgacggccagtgggtcgccttcccgcgttggagtgagcgtgagcgcgccgtgttcgagatcgtggtcgctggccgcgtgatcgagaacggtgatgttgccatcgccatgatcgaggccggtgccggcaagaacgcctggcacctcatctatgacgagggtcagaccaagcccgatgaggaggtcgtggccggtggtcttgaagccgccaagccgttcatcaaggtgatctgcgaggctcaggacgagctcaagaagatcgccgccaaggagaccaaggaattccagctcttcccggagtacaccgacgaactgtacgcccgcatcgacgagatcgcccatcaggatctgaacgaggcactctccatcgccgagaagctgccgcgtcaggatcgcatccatgagatcaaggagcacgtgcgcgaggtgctcgcggacgagttcaccgacatggacgacgccgagaaggacaaggagctgggcaacgccttcaaggagctgcagcgccagatcgtgcgtcgccgcatcctgaccgaggactaccgcatcgacggccgtggcctgcgcgacatccgcaccctgtccgccgaggtggacattgtgcctcgcgtgcacggttccgccctgttccagcgtggcgagacccagattctgggcgtcaccaccctgaacatgctcaagatggagcagcagatcgacgcgctgtccggtccacagtccaagcgctacatgcacaactacgagatgccgccgtactccactggtgagaccggccgcgtcggctccccgaagcgccgcgaaatcggccacggcgccctcgccgagaaggctctcgtgccggtgctgccgagccgtgaagagttcccctacgccatccgccaggtctccgaggccatcggttccaacggttccacttcgatgggttccgtgtgcgcctccacgctgagccttttggctgccggcgtgccgctgaaggctccggttgccggcatcgccatgggcctcgtgtccggcgacgttgatggcaagcacatcttcaagaccctcaccgatatcctgggtgccgaggatgccttcggcgacatggacttcaaggtggccggtacttccgagttcatcactgccctgcagctcgacaccaagctcgacggcatccccgccgacatcctggccgccgctttgcagcaggccaaggaagcccgcgccacgattctcgaggtcattaacgagtgcatcgacggcccggctgagatgagcgagttcgctccgcgcatcatcaccaccaccgttccggtcgagaagatcggcgaggtcatcggcccgaagggcaagatgatcaaccagattcaggaagataccggcgctgaaattgccatcgaggatgacggtaccgtcttcatctcctccgagggtggcgaggccgctaagaaggccaagtccatcatcgattccatcgccaacccgcacgtgcccgaggccggcgaaacctacaacggcaaggtcgtcaagaccacgtcgttcggcgctttcgtgaacctcacccccggcaccgacggcctgctgcacatctcccagatccgcaacctggccaacggcgagcgtattgacgccgtcgaagacgtgctcaaggaaggcgacaccgttgaggtgatcgttcagggtgtcgatgatcgcggcaagatctccctggccatccctggtttcgaggatcaggagaacaacgcccgcccgagccgtggcgatcgcgatgaccgccgtggcggccgtggccgtggtgaccgtgacgatcgccgtggcagccgtggccgtcgctccgatcgcgatgaccgtgacttcgacgatcgtgacgaccgtccgcgtcgccgtcgctccgatgacttcgaggatgattacgacgaccgtccgcgtcgccgtcgctccgatgaccgtgacttcgatcgcgatgatcgcgatgatgatcgtccgcgtcgccgtcgttctgccgaccgtgacttcgacgatcgcgatgaccgtgatgctcgcgactcccgagatgatgatcgtccgcgtcgccgtcgctcttccgatcgcgatgaccgtggcgatcgtgatgaccgccgtggcggtttccgtggcggccgtggccgtggctcggaccgcaacccgcgctacgccaccgacgacaactacgacgactaccgcgccgaccgcgaagagcgcactgagcgcccgcgtcgccgcgtccgtcgcgactttgatccgttcgaggactaaagccctctcacggatcggtcgcggcatagccgcccccctcacctacgggaagcccgcagggcttcccgcttaacggttcggcattcgaggactgatcgttctctagcttctctcgggtgagaagagcttaatcgcaaaccaaaaggcttctataccgtttcattcggtatagaagccttttggtttttcggcttcttcgcgctacatatttcgatgttgaatagggcactcgtgctgctgccatgtacattcagttgtcagttgacaactattctcatgcatcaagaatggcggaaaacagccattaagatgattggagccacgctaaaaagcgttgacaactgacaacagtttgtacacggcaccgcatggcacctatcctgttgctcacgaccggatctattctctcgtctgttgttatgcccaacagcaaaatccgcttgccgtgccgcgccatgtccgagtcatggccagccgttgattgaatggcggatgatcatcgaaggtactcatgggcgttgatcactgtggcaacaacaaaggccgggcccttgtgagagcccggcctttatgccgtatggcggcggattaatccttaaaggctaatccgttgtcaatcagcgttacagaatcgccatgcacacgaagtccagaatgaacagcgcggccacaatccagatgatcgggtgaacctccttggccttgcccttgcaggtcttcacgatgcagtacatgatgaagccgccggcgatgccgtaggagatggagtaggagaaggccatgaacacggctgcgaagaacgccgggatggcttcggcgatgtcgtcccacttgacttccttcagggaagcggccatcatgcagccgacgatcaccagcacgccggcggttgcggcggacggcacggcggagacgaccggggccaggaacgcggacagggcgaagcagatcgccacaaccacggaggtcaggccggtgcggccgcctgcggcgatgccggcggaagactcgacgtaggtggtggtgttcgaggtgccgcagatagcgccaatggaggtggcgatggagtcggcgaacagggccttgtccatcttggaggagaagccgtggccgttctccagagccttctcatcctcggcggagaagatgccggtgcgacggccggtgccgatgaaagtgcccagggtgtcgaacgtatcggacatggagaaggcgaagatggtcacgatgaccagaggcagcttggagacgtcggagaacagcgccgggaagccctcagcggagaagatcgcgccgaaggtctgcggcagctgggagaaggtttcgctgatggactgcgagttggaccaggtggtaacgccgaacgggatgccgatcacggtggtgatggcgatggccagcagcatgccgcccttaaccttcatcacggtgaacacaatggccagtacgaggccgatcaggaagacccacagcaccttgtcgttgaagtcggccagactcggggtcgccgccacggcgcctcccttggccgcggctttcgggtcgccgggggtgaacttgatcagtccgacgttcagcatgcccacataggccacgaacaggccgatgccgccgccgatagcgtgttgcagggactccgggatggccatgatgatcatcttgcggatcttggtgacggtgatgaggatgttgatcaggccgcacaggaacaccatgcacatggtctgctgccagctgaagccgaggccgaagcacacggtgtaggtgaagaatgcgttgaggcccatgccggcggcctgggcgtacggcacattggcgaacaggcccatgaccagggtgccgatgatggccgcgatgatggtggccaggaacacgccgccccacggcatacccgtctgcgacaggatctgcgggttgacgacgatgatgtaggccatcgcgaagaacgtggtcaggccggccagaatctcagtcgagacggtcgtgccgttttccttcaaatggaagaacttctccatttactctctacttccttggttttatgcggggctgcgcaccgcgcgcataatgctgcggctggccccggcgagaattgcgactcgccctgatcggcctgcccaacgcgcgtcaggcgctgcgcatccaatcagaaccgtggccgattatagcttgtggaggtaacgtgaacggatccgggagtagactgactgccagaataattcggaacaactcagggacacgcagggcacacccgtggaaggaaggcgcgcgatgaaaccggccgtcgaagtcagcatcacctcttggaagaagaatgtcgtcaagcccggtcaggagtacggccgcgtactgctgatgcctggcaccggctacaactgcgaccgtccgctgctctactggtcggcccaggctctggtcgaggccggctggcgaatcgaccgcatgaacgtacgcaacgcttccgacgacctgtccacggtgattccggtcctcaatcaggcgattgacggctggatggccgccgcgcgcgagtccggcgcgggtaaagccggtgattccggggatggcgttgccgccgatgattctgctaccgtgctggccgatggcgcagctggctcgccgaaccgtgattccgacaccccgtccggccctcgcctgttgctgatcggcaagtcgctgacgacgatgacctacccacatgtggcctcacactacggtctgccgttcgtgctgctgaccccggtgctgcatcacgccgacttcgatccatccgcccgggtgattccggtgccggctgtcggcgatgatatcgtcgccgaatccgaggcaccgagcgtggccgaagcaagggcgatcatccgcgcagaactggccgaccagtcgcacgccgccagctcccgatactccggcccggcaccgctgatctgcgccggcaccgccgacccgttctacgatcgagcccgcgccaacgtgctcaccccgcacgtgcacgaatacccggatgccaaccattcgatcgaggtgcccggccactggcgtcgctcgctcgactatctgaaggaagtcaccgcgtccgtagcccagtacgccgccacgttgtaatgccttgcgacacgcccgaattctgcaatgtcgctgaccatccgtaatctaatcatccgtaaaccacagaccgttggttgaagtgcgcgcgagtgcatttccgaagtttggttcgccaagccagcgcaggttgagagatataagcccgtcaggggccggcgaaggtcacttcgcgagattatattgctctgcctgtgcgcagggcttttttgttgcccggccgaaagttccgaactccaagtcaacggccgacttaggaaggaacgccatgaagaggcccgaaaaggaagcggtagtcgctcagcttacggaagaattccgtaacgctgacgccgtctacctgaccgagtaccgcgggcttaccgttccgcagatttccgatctgcgtgaaaagctaggccgcgatacttcctacaccgtggcaaagaacacgctggcacgcatcgccgccaaggaagcgggcatcgagggtctcgacgagattctctccggcccgaccgccatcaccttcgtgaagggcgacttcatcgaggctgcgaaggtcatccgtgacttcgccaaggacaacaaggctcttgtcatcaagggtgccgccgctgacggcactgtctacgatgccgagggcgccaagaagctggcagacctcaagtcccgcccgcagctgcttgccgaattcgccggcgacgtcaaggcatcgatggccaaggccgcgtacctgttcaacgccctgcctaccaaggctgtgcgtacgatcgacgccctgcgcgagaagcaggagaaggctgcctgatttacgccctcacggcatgaatcagtcgcttcgataatttaaacaataaggtttattaggcagcggatctaccacttcgtccgccgccaagattgaaaggaagccataatggctaagtacaccaacgatgagctgctggaagccttcggcgagatgaccctggtcgagctctccgagttcgtgaaggccttcgaggagaagttcgacgtcgaggctgccgctccggttgccgctgttgccgctgttgctggcgctgctgctccggctgaggaagagaaggatgagttcgacgtcatcctctccgccgtcggcgacaagaagatccaggtcatcaaggctgtccgcgccatcacctccctcggcctggccgaggccaaggctctcgtcgacggcgctccgaaggccgtcctcgagaaggccaagaaggaagatgccgagaaggccaaggctcagctggaagaggctggtgcctccgtcgagctcaagtgatttgtgcggcataagccgcaatcacagcttttcgaggaaccccgcacctgtgtttcaggctgcggggtttccgcatactgagtagactagttgacgagggcgaggcggagaacgcgatccggcgtggaatcacaaagctggcaatgagcgaaagttgtcaattctgtgcccagtaatccgccaaaagccggtaaaagatgacacaatggcacgtagtgtggtcaaatagtgtgtccaggaaggcggtcacggtgagcgagtggacggtgaagatcaacggtgtcgaccggatcagcgtcaagccgggggagtgcgtggaaatcggccgtaagccgttacgcccccttgccgatgatggcaacacccgccttgacgtcgccgatcagaccaaatcgatgtccaaacggcacgccatgttcacggtaaaaagcaatggtacggcttcggtccgcgatcttggatcgaccaatggatcgtatgtggtgcgggaaaatggtgatttgttgcgcttgccggccaatgtcgagttcctgttgccgacgtctcccatgcgcatgcagttcggtgatgtgcctgcggacttcattcgtatcgacgatccagtggcaaagccactcgaccttaaggtgcctgatttgtttggctatgcggttcacgaagcaccgcaggagccggatgcggcggatatgtctgtcgacgatattcttgatttgcgggccggcgagccgaccgccatcttcagcgcggataatgttcgacgcaaggtcgacgagcttgaacttggctcgctgaatatcacgcagccagtgacgaaaaacgatgagccggccataccccgtgacctgttcgcggatgcgttggcccagcatgccgagcaggagaccgaacgcaaaaaccagcaggccatggactccgtggtactgccgaagcagcagaccgaacctgagtcgacgactgtaacgcccgcatccaagcacagcaggatctccggtattgtcccggtagatgccatcgcccatgccgttgttaagcacgctcccagcacaagcgagccggcagtggcgtcggcggcggttgttgaatccgatgtggtggctggcgcaagcaagtcagccgaaaacgttcagtccgctccgaataccgacgattctcagccggtggacgctgttgcacagcattctgaaggcactcagtccgaagccgcccagtctgaaaacactcagtctgagaccgcccagccgacaaccacccagcctgaaaccgctcaaccggcaaccgacgcacccgaggatcagcagctggcgaccgaaaccgaaaccgcccagcagtcggtctccgaagcgtatgaagcgtctgatatctactccacgggcgtacacactccggtcttcgagcccggctcggtgttcgagcgtgtggccaagggcgagctgaaagcacaggagccggcagtcgaagtcgatggcctgacctctgacgaggcaaaaaccacgcaagatttcaacgttcagttcgaagtcgcccgtcatcccgaattactggcgttcctcgccatgaatccgtacctgtacgacgacatgtattcttggctcgccgcccgtggcgaggccgatattgacgaagccctgtctcacaacaagggctatcaggaataccgcgaagcggttggaaagtgagtcgagagatgacccagagccagactcagaaccagaatctcacggaaggtctgaatcgcatccgtcgctggcgtgaccaataccgcagcatgcagccgccatcgccgctcgaggatgtgaatcaactggccgcgaagctggagatgacccatgcccatccctccggcatcgcccagctgttcgcttccggccatgttcggttggattcgttgttccgtgacacgggtgtgcttaaggccgccgaacgccatatcgggcgcgtactggatgaccaggccgccaagcgcaggatttccggcgtggcggagttgtcgctcgtggttggtgtggccacgtggaggggcaacgcgctgccggtgctgttgtacccggtgagcgtcacgatcgaggatgatggcttgtcgaccaccattcgattcaccggtcgcgtgaccctgaacgccgcgttcgtcaatgcattgcgtgagcagggggtgttcctggatgaggattccctgtttgacggtgccagctatgacagtggcactcccgaaacttccgcgatgttcgcccgtatttcgtccgaagcatcggagcgtatctccggcttcgccatcgagcgccagattgtgctcggatgcttcatggacccctcgtcgcagatgatcagcgaaagccgacagttcatcgaccagctggagaatggccccaccggcaatgtgctgttggacgcgcttgccggcgacaaatccgcccgcaccgcgctcaaagatgccaatattccgcaatacagtcctttcgacgtagacccgcatgctgagtacgaagtcggcgatgtggacaatacggtgcgatatgccgcgtcacttgctgccaatggccatagcatcgtggtcgacggcaccttcccgaagggcaccgcggagcaggctgtggccatcgcatcgcgctgcctgatgaatggtcgttccgtgctgtacgtgcccggcgtggccgagcagaagcgtctgttcatccagacggcctccgccaatgagatgaaggcgcaggtactggatgtatccgatgaacacgccaacgccgcgcttgataagcagctgattgccgcagtcggattccagcccggagtcgccacccagcgattcgaccagctggccgacgaactcgtgggcgtgcgctcgcgcttgacccgctatctgggcgacctgcacgggggcaacgataagtggaatgtgtccgcatacgagaccattcagaacctggcccgtatctccgtgctcccgacacaccccgccacccacgttcgacttgacgagtcaagtgccctgagcatcgccaacgatattgacacatggatcagcaagatggaacgtgccggcgagctcggcgaatacaccatcggcccggaagacaccgcatggtacaaggcgtccatcaccactgaagaacaagcggtaaccgcttaccagcgcgtggacgatttgctgcgtcgcttcctgcccgccacccgtgagcaggtggcacgcaccgtgcagacctgcggattcccggttcctcccaccactcgcgagtgggagcgtcaggttacggttttgaagaatctgcgacgagtgcttgacgtgttccagccagagattttcgagcgagacatcagctccatgatcgaggccaccaagccgaagagccagcgcaaggccgagggcacgtcgatgggattctgggagcgccgccgccacgtcaaggaagccaaggatctgctgcgcgtcggcgcgcaggtcgaggacttgcacgaagcgttgaaggtagtcgccaagcaaggggagcagtggcatcagttcgtgcctcacggcggttggccggtgctgcccagcaagctcgacgagatcatctccacccaagaggcgctggtcagcaatatgaccgcgctggataccgtgctttccaccacacccgccggcggcaatctggaaaccgccgatttcgagaaggtggaagcacgcctgaaagcactgctggatgatcgcaaggcactggacaccttgccggagcgttgcctgctggagcaggaattcgcttctgccggtctgaacgagttggtcgccgatctcaacgctcgccgggtgggcgtggagcaggtgcgtggcgaagtgcagctggcatggtggaccaccgtgttcgaggacattgtgcgttcttccgccatcatctccaaccaggatggtgctgcgctgcagaccgcatccgaccgcttcgcacaggtcgatgtggagcacgtgcgctccatcggaccgatggtgtcgcaggaatccatgcgccgcctgtgcgacatgctgttctcccgcactcaggaagccaaccagatgcacaccgtgctggcagggcgcgccagtgtgtcgctgagcaggattcgccgtgatcatccggagattctggccgcggccaagccgattctggtggcctcgccgggtacgctcgccgcacttaccgagccgggtgtgctggctgatgtggcgattctcgatgcgtgcgcgcacattcccgctatcgagttgctgtccatcatcggccgcgtgcagcaggtggtggtgatcgcccactgcgcgacggtaaccagcgaaagcgtcaagcagctgatcgacacgttgcctcatatcgaggtggatgctgccccgtctcgccgtgcgccgcgcctgtccgcattccttgaatccgagggatatggtcctgttcgctatgatgtggccaccgagccggctgccggtggggtgcggttccaccgtgtggaagcgagcggtgtgccggttatgtcttctggtctggtggaatccagccagtcggagattgatgaagtggtgcgtctgattacgcaacgtgccgccggttttgctgtggttccttccagctatcgacttgtggtcgtgatgttgaccgacgcattccgcacacgcttgggtgccgaattgaagtcgttggcaggcaaatccaaggcgatgggccgattcctgcgccatgtgcggctggtttccttgcgtgacgtggccggaggtcgtgccactgacgtgattctgtcgatgtgctatgcgaaaaccacgcacggacgtctgcttcagcagttcggtccgctcgaaagcacaggcggtcgcggactgttgctggatgccctggcattggcggaccacagtttggatattgtgtcggcctttggttccgaagatttggatgaagaacgactgcaccagtccggtcctcggttcctgaagaccatgttgacgtgggccgaacagcttgacgaccgtccggtgcttccgttgcgtggtgcggcaggcggcaacgtgctgttcgacgatatcgccgacaggttgcgcgcgcgaggactgaacgctgctgttgattatggattcgacaagggcgtgaagattccgctcgtggtgggattgaaggacaagccgtttgccttggccgtgcagaccgatgacgcgaactttatgtccgtgcaatccacgcgcaggcgtcatcgtttgtcggcacaggatctcatttccttgggctggaatgtgatgaccgtctggagtgtcgccgccttcgtgaaccccgataaggaagtcgaccgtatcgtcagccgtatcggcgagatctaccgcgaggttgaataatcatggcggaatactcggctacacggcgcacaccgcgcaagcacaagcgcgtggtgatgaaaggcactgagcagtttgacgctgacggcgtcaaactcgagcccggagacatgcagaccgaccaacaacggcaatccgacgacgacaaacgcatcctcggcgaactgcctccacactgggctgttttcaacgagcgcgagtaggagttggggcgcactctgtgcgctctgatgttgtgttttccgcagccgtacggctgcggaaaacacaacatcggccgaaggccgattccgcttcctaccgcacaacggccataatcgctccggcctgttgcagctccataaccttggccgcggcctccggcggcattgcgaacgacaccagccggtcgttgcttcccaatgcgccagtcgtatccggtttgtcgacattcatcaccgtggcgttctcggccagcgtgcaatcggcaccttcgcaaccgacggcggaaaccagtctcacctgatcgccggccaatacatcgtcgacgctactggccaagcggacttcaatcaccgtagtgccggtcggtgctacgggcgcatctctggccatatgcgtggaaatgggatcggctgcttcgatatcgatttgcgccaccttgcccaccacatcctcaatattgcacgcccaagatgggcctatcgcagataccggcatatcagccaactgaacgtcggcggccagaataatgtcaccccgtcgaatcgagcgagcggccaccaccatcggctcggtctccaccacggccaatacggcttcaagcccaaacaacactgcgagtcccacgcacaacgcagcagtgagtcggcgcaaggcatccgccatgcgccgtcgccgcaatgaaccgcgcgcaggcggcttaataaacgaaaaggtcaccatgcaaccatggtgacctgaagtttttcgtaagcgcaagctgaatcgacctatgtggttctagcttgccaagttatccacaacgcttcaaacccgtgcaacagacagtgcccgtagtgccaatatccgcggcataccgccgtcgacaccgtcgtttacagaggaaaaacggggagccgaccttacttgccggatttgtcggtgcggtagaatccgtgacccttgaactcaatcggcacggcggaatacaccttgcgcacctgctcctgcgagcacttggggcacacggtaatcgggtcgtcattgaacgactgctgttcggtgaagtcatagccgcagttcttgcaacggtaatgataggtaggcaacggattcctccaacaaagtcatatttctcgcgcatggcgtgcaacaccatgccgtgcaaccgttcatatcctagtcgccgccctgacacattggcgttacggtcttactagccagcctgcttttgccactctggttccatcggccagtgtgcgtggctggttggtcagtctggcttgcgccgagtatcttggccggccggtcaactcagccggcccgattcgccaagccgccggtatccccccggcgtcagcactccgtcggccggcacatcatgtggttcggccggcaaatcggtgtccaacacctcccacggccagcacaccgcaatcagggggcacgcgggcttgcgtcgagccaaggcccggtcataccagccggctccacgccccagacgattgccttgcgggtccactgccaaagccggggcgatgaccagatcggccttctccaacgcttcgggcggtagaactgcgccagttggctcatcgggtctgtgatggacggtgctgggagagctgcagctaccggcattgttcgcgccacccactgcatccatcgagcgcaaggattccaatgaatccagcacactccagccaatttccaacccagatcccaatcgtggcaccaacacgtggcagccatgagccaacagccatcgcaacagtggccgggtttcgatttccgaacccatcgacacatatgccgccactgtggaaccatcctgaatcatgtgtgccgggaaccgtcgcaccagcaattcaccggccgctccacgttcttccgctggaatgcgcttgcgccgagacagtatatggtggcgcagcgtcgctttatccatcttttctgttttctccgtgccgctgtggtcgctgccgatattcatgccattgtccgcttcgctcataccgcacaatctagtgtttccaccgtaaaacgaaagtggccgaggcgaaggcgcaagcccttcatatggctacaataaaggccgtgtcagttttccagtcgattaaagaggcgttcaagctggaccaccagatccgtccgccgcgcctcacccatcccggtttcccgataatcctgcgccccctgaccatggacgatgaggacggctggaacgaagtgcgctggcgcaacaacgactggctggcgccttgggaatccggcgacccgatgcatggcggctccatcaccttcaatcaatgggtgcagcgacagcgccgtaatgagcagcatggcgtcggcgtgattttcgccatcgaataccagatgcgtatcgtcggccagatttcgttgggagccatcgcgtatggtgccatgcgcaccggtgtggtcggatattgggttgaccaacggtacgccggccacggatttgcgccgatggcactggccatgcttgccgattgggcactcggagacccattcgggcccgcgttgcatcggctggaaatcgccattcttccggataacgcgcgctctttggctgtagtgcgtaaggtcggagcccatcatgagggactgcgcgagcggtatatgtatgtcaatggccagtggcgcgaccacgtaacatttgcgctgttggctgaagatatggggcaagggttctctgccagactcgccgccaccggttccagataagcgtcgaccggaagaattccgctccgacacgcccggacggaaagccccagttcgtcggtacgtctcctatccttgactctatgggttatgagtcactgagcactgtcgtcgtgctggtgattgtggcgattattatcgttgtatggctgcccgtacgtacggccaacggcatgaaacgtgtggacgagcaccggcaggatcgttattcgccttccctgcatatcgttgatgcagagaacggcagacgattcggagacatcaagccgcataaggcgaaaggggcagcaatgccagcatcaacaccgtcagcgaggctgacacctgagcacatcgcccatgtgcgggaactgcgccgcgcggccatccgccgccggcagattctcgccgtatgcctgcttgccataaccgtgttggtgtttgccgcatcgttccccctgcatttcagcccgctgcttgctcttattccgttcgtgctgttactgctggtgctggtgctgggagccaatgcctcacgccaggcccggcaatgggagcgcaaggtggtccgctacgagcggactcatagcggtacgggctggtccaagaaaccgtctgccgagtccaaggacagcaagcgtgtgaacaaggccgaaccggttgcggccgtaactgcgcctgccaaggagctttccgagcatgttgaggatgctgccaccgaggtcatggaacagcggcagattcgccgcgcgttacgcgatgccgagattgagcaggccaaggccaaggcgttgcgtcagtccgccgccgcatatcaggccgcggcggagcacgccaaacagtctgagaagtctgatactgcacagtccgccgccaataagcctgccgccgaaccgtctgctatggtcgatgaatccgctgaccgtaagtccgctgccgaaaccagtgaatcttccgccgcgcccgatgcctccgctcgcacggataagtcgactaagtcggataagtccgtcgcccctcgagttgaaccatcgcttacggtgcgtgacgagcgtgatgagcgcgacgatgccgctgccgacgctacgtcggaactggccagcgtacgccctgcccgagcactggatgtcttcgatatggccacctcgcaggatctcatctccttcactttgggtggggaacataacgccgacaacgctccggaaagcttggagatcaagtcgacccgtcaggtgtccaaggcggaacctgtcgaacccgcagtggcggaaaagttgattgacgaggcccgagccgtcaaggccgcggacgatgccaaggccgccgatgcgggcaaggctgtcagtgccggaaacgctgtagacactgagtcggagcagcgcgatgatgccgatacgaacgccgctacggacgccgatgacgaggctgcaaacgccgcccagcgagccgcattccacgaatccgaggagcgtgccgacgtcgaagcgccagcggcgaccaccgattcgttgggcgcaggcctggactccattcttgcccgccgcggcaactgagcgttgcgattcgccgattttctctcacagcgttagcactcgagttggcagagtgctaataatcgcgctacgatgtgtcctagcgcaaagggacaacgcaagtgatcgtcagcctcttgaggcgttctggcgcggcattatcgaactacaagtagatacgaggtgacccacagtgtcgattaagctcacaccgttggaagacaagatcatcgtcaagcaggccgaggcccagacccagaccgcttccggtctgtatattccggacaacgccaaggagaagccgcagcagggtgaagtcctggccgttggcccgggccgtcgtgacgacaagggcgagcgcatcccgatggatgtcaaggtcggcgacaaggtgctgtactccaagtacggcggcaccgaagtccactacgagggtgaggactacctcatcgtcggcgcgcgcgacattctcgccatcctcggctgattagtcgcctagcgaacttcaacaaccccgactgttcccacgaacagtcggggttttctcttgtcaggcggaaaggggctcccctcagagaggggagccgaaaaccgctcccgccaaacgcccagccatgcctgctatgcataaaggtgcatgcgcgcaacgtagttgagttcggcgttgcaccgcatctacactgggtaacggattggggtccctatggaagaggctcagtcggcgacttggccgagcggcttaagacattttgcacaagacggcagtaggtcgacggtatgttgttttttccgtgtcgcaggttcgtggtgtcgtcgctgtgccaatggttgtctctctaccgacgctgagtgccgtggcatgaggccagcgtcggcagtgggccacgaaatggcgatgtgccgatgctgagccgcgttggcgtcgttatagggccagtttttggaccattgccgacggcaaatcggcgttttgtgtcggcgacggtccaaaaactggcggtctgccgacgataagtgccgtcatcgtcggcagaccgccaggtattgtccctgtgccgacgtaaaagccctgccatcgtcgtcaccgagccatcttgtgactcactgacggcggcagcagggcggaagaggccgaaatcatgcgcgcggtgcggtctcacacctcgaatccggcctccaccagcgcgtgatcgatgtcgcgaatcaaatcgtccgtatcctccagacccacggccagacggaagaagccgcggtggaactcaggcgggtacaggtactggcgctcgtcatcctcaccgaggaacacgatcagcgattagtcatggccgagcgagacggcagacgtaatcacattgagcttggaaacgaatcggttgtgcccgtcgtggtcggtgtcgaggccgaacgacagcacgccgccgaacccggagtccgggcgggccagctggctggccgccacctcgtggtgcaggtgcgattccagaccggggtacgccacgaaacgcaccacatccagcgattcgagatgcttggcaatcgccaaggccgaggcgtcgtaggacagcgcgtaggtgttcgccagcgtgatggggcgacggatcgcgccggtttcggcgtcgaccccgttgccgaggtgaatggccagcgtgccgaatccgagcggctggtcgtcgaatgattgtccgtgatgtacaagatcagaagccatgcgcccagcatgccggcatgcgctgtgccgccgcaagcaggcgacgccactcgaaaaccgcgccattgcaaggttctggaacaccatataagaaaaatgattggtagaagtgcggggtgcagccttggtcggggctgtttgcagggccgaagcggaccctgaaaccacgctgtgagacacgccgataaaaccgcagaattccgcggtaaaacaaggttcgcgtagaggtcgatttgcgtacttggaaaatatgtggttatatagccaagttgcctgttgaggtcaaacaccgcggcgggaaacagactggcggatttcccaagcggtcaaagggagctgactgtaaatcagccgcttcgtgcttcagtggttcgaatccactatccgccacg

SEQ ID NO: 2616 - DNA, 103595 bp, Unknown
  R222_15m  MAG No. k141_23537
aatcagccccttgaaatggagataccgcctagcaacacttataggctgacgacgacgccctcccatggtgcaagctcacggccggcaagagcggccacagcgtgcgcggcgtcatacgtgctgatcaccacgttcgactcggcaaggccatcggccactgccaacagttcggcggattcgcgaggcaaatcaacggttcggccggacatgttgaccacgaccagcagcttctcatcgccgagggtgcgggtgaaggcgtagacatgcgcgtcatccgcatcgagcagatgccagtcgccggccgccacgacaggcatgtcgtggcgcagcgcgatgagctgcttgtagaaggcatacaccgaatccggatcgtcgaattcgccggccgcgttgatcgccgcatggttgggattgacggagatccatggctccttagcggcatccggcgcagtgaaaccggcatagacagagccgtcccattgcatcggggtacgcgaattatcacgaccgcgcgcggcgatacccgccaacatcgattcgggcgactgcactttggcttcctcaaccctttgacggtaagcgttcagggactcgaggtcacggtactggtctaggcgcgtgaagtgggcgtcggtcatgcctagctcttcgccctgatatatgtacggggtgccgcgatgcatgtgcagcatcaggccaagtgccttggccgaacgcacacgagattcctccgaggagtcatcaccccaacgagaaacgacgcgaggctggtcgtggttaccagtaaacaggcttgcccagcctgcattcttcacggccgcttgataaccggccataatgctcttgagcttcggcaggtcaagtggcagtggcttccatttgacgccttcgcagtcaaaatcaacgtgctcgaataggaagagcatgtccagttcgccgttggcggggtcggtgatgtattcgttgcgctgtgcggtaacgccgggagcctcgcccacggtgaggaagccctcacggccttcgaacacttcacggcgcatttcggccaggaattcgtcttggcgagggccgtccgcgcagaacggattcgggttggaatagccttcctcacccacgggcagatcgtccagctcggaaccgtactcgccgggcagcttgccagacaggtccgtgcgcttggaaatcagcgtaatcacatccatgcggaagccgtcaacgccgcggtcaagccaccagttcatcatgtcgtataccgcgcggcgcacagccggattttcccagttgaggtccggctgcttcttcgagaactgatgcaggtagtattcgccacgctcagggcaatactcccatgcagaaccgccaaagtaggagccccactggttgggctcggcaccgggctcgccggcagtggtgccgggacgggcgggacgccaccaataccagtcggcgtgctcatcatccttgtttttggacgcttcaaaccaggcgtgttcatcggaagtgtgattgacaacaagatccatcacgatcttgagcccgcgcttgtgggcctcggccagcagctcatccatgtcgtcgagtgtgccgaacagaggatcaatgtcctgatagtcggaaatatcgtagccattgtcgtcttgcggagacttgtataccggggatagccacagcacatccacgccgaggtcggccagatagtcgagccgtgacgtaatgcccttgagatcgccgaggccgtcgccgttggtgtcttggaaggaacgcgggtaaatctggtaaacgaccgcattggaccaccacggatttggggtggcaccgttggtgcggatggaatctggaattactgtgcgttgtgaagtggtcatcgttggctcctccattatttatggtctacattgcctgttgctcatagtctaaaaagcgctgaattacatttccattggggaactgcgttggtgtgccggaaacaaaaaccgcaaagagccggaaggcactgctacggctcaattctcataagctgcacatgctatttagcaacatatgggccctttcgctgtttgtggtgggtgactgtgccgtggggtgatgttggtcgggtaggttggaggcatggatgcctctcacctgttcaccgccgcgcttcggctgcggtcgccttggagggtcgggtctgcggacttccgtgacgccgacggcgacgggcgggagccgcacatcacgatcggcttcgagcccggcagagggttcatgctcctgttcgaggcgtgggtgtggctatatcgcctgtgctcgtggatgatgcactcgaggctcgaacctatgaaggagctcgcccgcttgttccgccaccataatctacctgacctgcggcagctcacatattaacggttcttctgattgcgacgcgcaagagcaacttcgggcgcgcttggattgcctgcttgaacccactggtgtggggatagatgatttagttgacacgcctgcgggaatctggtggggatttcgctggcacaccggatttcaagcaaaccccgcctcgggaaccgctccggacttcggcgttggcccggttcgtatgtcaatcgattgccgtctgaaccgggacagaatccgctgtcccggttcgcgatttttgtccttttttacaaacagggacaagccaatctccgcagttcatatgctccgtaatacaaaatcggcggaatagagccgatcccggaatcaacatgttgtcccggttttcacataaaacgattgacattcataccgggacaatgaaaattgtcccggttcgtgaaaatcgcccgaaaccgcgaaccgggacagcggattctgtcccggttcgcgcgtcaaacggttgatatgtggaccgggacaagccagtggcacggcgacacagcagatgcgctcaattgcaccgtaagccgtacggtttcgtcactttttcattcgcacaacgagcaaaaccacatgacctttgtgcgccaccgccacatcaaccgaccgtcgcctttattgtggcggtttccagtatggcaacaggacagaaaagcctcctccggtgagagccggaggaggcttgggtggaagcggacctttacttcacagagtcctgcaattcaggactggcctacggccagacccaacatgacctcgcgagtacgcgacctatccggccgcccgggccgggaaacagcccacggggctgtttccttaatcggctcgtctcgctcgacgcggtgaagtaaagcagcgcctgcgctgttttacttgaccgcccccctcatcacaccaccgacgacccacttttgggcgaagatgtagacgatgaggatcggggccatggccatcaggtagctggagaaggccatcgggtagttggtggcgaactgcgagctgaagacgtactgggcgagcgggatggtctggttcgactggtcggtcaggatgatcaacggcaggaggaagtcgttccaggcccacagtgcggtcaggatggcgatggtggcgttaatcgggctcatcagcgggaagatgatggtccagaaaatgcgccacgtggatgcgccatcgattcgggccgcctcttccagcgaaaccggaatcgaacggatgaagccagtggcgatgaacaggttcgtgcccaggccgagcaccgtgtacaggatgatcaggccgacctggttgtccaggtgcagggagcccatctgcttcgcaatcggcagcatgacgaccgggaacggcacgaacatggcggcgatgaagaagtagtacaggaagcggaagaagcgcttatccatgttgcgggccacagcgtaggccacgaaggtgttggtcagcaaggtgagcaccacggcggccaccgtgatgatcgcggagttgagcgcggccttcgggtagttgaccttggcggaggcgtcggcgaagttgtgccactgccacgaggtgggcagggcgaaggtgccggcttcggccggagtcttcagcgcggtgacgatggtgaagtagagcgggatcagaatggtcaggctcagcacggccacggcggcggtcagccaccagttgatcttgtggtccctgcggaacttggcgggcttgccggacttggacggggtaactgttgcagtagtcatttcttatcctcccctaaatcagatctgttcctggctgcgggagatgcgcagctgtacgaaggcgatgatcgccagcacgatgaagaagagcacggcgtttgcggtctggtaggcgtactcgccaccggtcaggccacccttccagatgaggtaggtgacggtttcggtggaggagttcggaccgccctcggtcaaggcgacgacctgatcgaaggtgccgagcgcgttcttcatggacagcacgaggttgatggtgaagaacggtccgatcagcgggaatgtgatcttccagaacttctgccaggcgttgacgccgtcgatggcggcggcctcgtagatttcgtcgtcgatggtctgcaggccggcgaggtagatgagtaccgagtaggcgatgccctgccagacggcgaggaagacgattgggatccagctgagttgctcattggtcaacagcgaggtggacagccacttgatgcccagcgccttgccgagctcgggcagcgggttcatgaagatgtacttgaacacgtagccgatgaccagcacggagagggtgtaggggatgaagaagacggctcggaagccattcttgaaggcgatcttcgagttcagcagcaccgacaggaacagggcgatcacattaatcagcaccgtgatgagaatggcgatgaggaacgtgaacaggtaggcgtggcccacgcggttgtcttggaagagggcgatgtagttcttcaggccgatgaacttgtaatcgccgtagccctgcgagttggtgaaggaatactttacgccgtcaagaaatggcaggtacaggaagaaggcgaaaatgatagccgccggaaccaccatccagtagtaggcggggtccaccttgcgggtggagaaggcggagaccttcttcttggccggcttcttggcagcggtcttggttgcggttgcgtgtgacatgatgttctcctctcctaccgatcactcgaaggtcctggcttggaccttgtcccattcggtctgcatctggttcaggaagcgatcggtgttgccggaggccaccatggtctgcaggtagccgccgatgttgatggacgaaggaatgtagtggtcgcagaagtcggccagtcggttttcctcgaagaacgggcgcacggtttccagcgcatcgttgccgaagtaggtgtccttcagcggcgtgatggcggactgggcgtcggcgtaggcgtcaagctgatccttctgcatgaggaactcgacgagcttcatcgcttccttggggtgcttggtgttcgcaccgatggtgagcatcacgtcgtcgccggcggtgaggatctgctcgctggcgtcatcggtggccggcatctgggcgaaaccaagttcgatatcggggttgatcagcaggatctgcgggatggcgtaggtgccgagcgggatgatcgcggccttgccttgggcgaagttctgcgtgccctgctggtaggtgacgccggtgtccgcagtggagtaggtgaagagctcggattccttctcgactgcggtcttccacagttcctggaacgtggtcttgccttgcttgagctcggtgtacttcgattcgggaaccagcgtgccggccagggaggcgagcggtgcctgggtggtccaggcgtcggccacggaaccctgcagcgggttgatgccggcgtccttgaaggtgttgagcatatcggtgaactcgctccaggtggtcggcggattctccgggtcaaggccaaccttgcggaacagagccttgttgtagatgtagccggaggcgttacccgcgaagggcaggccatacaggcgcttcttggaggaatcggtggtctgcaccagattcttggcgatctgcaccatgccggggttgagggtgtccacaatgggttcatcggtgaagtcgtagaacacaccggaggcggcgaagttgccgaagctgatgtcgccgttgaaggtgatcacgtccggcacacgattcttgacgaaacgggtgcgcagatcggtctgggcgttggcggagttgttgatgttgaccttgatggtcgggttctgcttctcaaagtcggcgaccatggacttgaactggtcggcggcctcggacttgaactggaagaaatccagcgtgacggtgcctgcggtgctggagccgcagcctgccaggccgaacccgacggcgatcgcgcacatcacggcggcggtgcgcacggccagacgcttcagtctaggcgttgcatgtggggaatcggacagcataattgttgactcctttatctttcttttcctccggcttcggtgccggcggttcttccactttccaaggtaacggttcggccatttcattcccagcgccagcgagcccacttgcgcaagcaacaaaaagcgcggtattttgtgattaacgcaataaatacagcgaagggggcttgcatgtctgatgtcaacgcgattccacagtggttttccggatccgagcatacgcatcgcgtggcggcggcaattgcccaatacgggccgatagcccgcactacgttggcacagatgctgggactgagccaaggggccttgtcccgcatcaccagcgatctgatctacgccggggtgatcgaggagcttccggccgaggccggcccgtcaggcaagctgcccgagcgattcacgccaagggaaagttcggatcgtcgcggacgcccgcagacttcgctggtgttgtgttcgaacgcacgcaccttcattggtgtcaaggttcatgggatgtcgattgtggccgctgcggtgaacgcgcatggcgaggtggtgtccggccggcacgaggtgccgatcggggcggatcagtcggctgagtatgtggtgtcggccatcacgcggctggtgcgcgaatgttccgccgatatcgcctcttccggactgccctcccccactgcggtgggcgttgcggtaggtgggcatgtggtcgacgattcgattgtgacgttcgcgccgttcctgcattgggacggggccacggacttggggacgatggtcacagaggcgaccggcctgccgtgcggggtgttcaatgatatcgattctctgctggtggatgcctcctggttcgggccgggtgtcggcgtggatatgttcgccgtggtgaccatcggcgtgggtgttggttattcgctggccgtgaacggcaagccagtgcagtacccggataagagctatggtctggtgggccacgtgcttatcgatccggaggggccgcgctgcaccagcggacatatcggctgttcacaatgcttgactgacgattcgatcgccgaacagtactctgcgattgtgggtcgcgcggtcagttttgaggactttgcgcgcgatgccaagggacgcgtgccgcaggccacgcagttggtgaaccggacgtgtttccggttgggttcgctggtggctacggtggcgaacatcgcgatgcccggacatgtgatgattgccggggagtccgcgtttttggccaagctcggcaccgattcgctgcgcgatggcattcgtttctaccgtcacagccagacccagccggtcaagttcacgattatggaccacgactggcagctctgggccaaagccgccgccagtcgcgtaatcgtgaagcatattgggtaggccgttcttggctcccctcagagagggaagccaagaacgttgcttcgccacagttactccgccacgaccagcaattacggacttgcctatcggcaaggctcaatcccaccttcgctcagctgtcgcttcgctcaggccgtggctactgacagcctactaggctgtcagcttaacgccacagccttgagcaatactgcctgctgggggtggagggacgggggacggatgccgtaacgctgcagggcttcgccggtcaggactacgccttcctcgttccaccagccgagagtgctctggccgttggtcagaccggtcaaatccaagctcgggtcgagcgggctgacgcggtaggtgcgctcggggtcaagtccgggcaggtgcacgggcgcggccggataggtctggctggtggtcagctgggtgaagcggtagatggcggcgtcgcggttcggcatcaccatgccatccaagcgcacggccggatcgttggagtcgacgtgcacgcaggtgtcgatggcgaaccagtcgcggtgcttcttgaattcggccacccacacggccagcttggcgagcgcctcgtccggctccttcaacaggttccattcgatgcccatgtggccgaagaacgccatggccatgcgcagttcctggctggtggcacgctgggtggagtgcgcgggactggcacccacgtgctcgcccatcatcgccggcggcaccagcagcgaggtgtagcgctggatgtccgcgcgctcgaccgggtccacgcagtcggagacccagatacggtcagcgtgctctaggatgccgaggtccacgcggccaccgccggaggagcagctttcgatctcaaggcccggatgtgcggtcttgaggcccttgaagatgttgtagacggcgagggtctgcgcgtgcacggccgggcggccggagcggcgggaaccgggctcggtgacgagcttgttgtggtcccacttgatgtagtcgataccaagctcgccgacaagctggtccatgcagccgtagatgtagtcgaacgcatccggattggtcagatcgagcacctgctgagtgcggccctgcagcggcagtcggccggtggtgggcgaaagaatccaatcggggtggttgcgggccacgtcggaatcggggttgaccatttccggctcgaaccacaagccgaattccatacccttggcgtgcacgtagtcggcgagcgccttcagggacttcggaccatcgggccagacgtcctgcgcaatctgccagtcaccgaggccggaggtgtcgtcgcggcgggagccgaaccagccgtcgtccaccacgaatcgttccacgccggagtcggcggccttgtcggcgagcgccttcagcgtatcgaagttgtggtcgaagtacacggcttcccatgtgttgaggatcaccggacggccgtgcgagaacaggcgcgggtgcagggagcgcacgtaggagtggaagcgggcggcgatctcgttgagaccatcgccataggagccgaacagccacggggtgtcgtaggagttctggccttcgccagggccagcgagcgtcacttcgccgccgaacaggagttcgccgccgccgatcacgccggttgtgtagggcagacgttcggcggacagcacggagttgccgctccagcccacgtgcaccgaataggcgtcgccatgctcgaagccgaaaccgggcacgccggcggtcaggagcagggatgcgtcgaagtcagggcggccggcgagctgcggcttttcgaaacggccgacggtcagcggctggcgctgcggactgcgttcacgtagatggtgaccggtggtggtgaggatttcgccggcggattcgggcagcgggaagccgagctcgatcttgccgatctcgagcggggctccggcgtctgcaccgaacaggttggttacggtggccttctgacggaccaggccgccggggagcagttcgaggtgccactcgacttccacgccctgctcctcatcgcgcgcggtgactatgacgccgggcacgcggaccggaccggtggcacgggcatggccggccacatcggtgtagctttcgccggacacggcatcgagggtggcttccagcacgccgccggcctcgatattggtcacggtgaacttggggaagagctcgacgccggcgcggcgcagcaccacgcgctgctcgccgatccagctttcggcctgggtgggcaggatagacggccaggcggtgtcgtcgagcgcgccggacacgcgctgcggcttcagggcgtcataggcggccagcagggtgtcgggcttggccagcgggcggccccagtggacgatgtgcggcaggtcgctgccggcaaacaccagaccgatcgccacattggcggcgggctgggtcaggtagacggcggtgagtgcggtgccgtcagcggcggcgccggtgaaagtggaggtgttctcggccatattgtctccttcgacgtgtgtggatttgcattgcactactggcttcgatggtagaagaaatggaatatgttgccttggtgccgcgtgttggttgcgtgaggtaagtaatgcgtccgtgtctatcgccgctgggcgaagaaatcagtcaggatggactgacactcgccttccagcacgccgccgtgcacttcaggactatggccgatatgcggatcgcgcggaatatcccaaatcgaaccgcatgcaccgagcttgggatcccaggcaccgaacgcgatggtgccgatatgggtctggatgcaggcacccgcgcacatcgggcacggctcaagtgtgacggccagcgtgcaatcggcgagattccaagcgcccaaggcttgggccgcctgacgcatggcgatgatttcggcgtgggcaagcgggtcgccatcagcctcacgcgtgttgtatccgcgcccgacaatctggccggccgcatccagcaccaccgcaccaaccggtacgtcaccagcggctgcggcctgaccggccagttccagtgcgcagcgcatcgcctcgtcatattccataccaacgagtgtatgcctttttctcatatcgtctcatgatgtgcataatcggccgcaatcttaacgttttcttcatggttcccatatacttttggtggagaaaaaatacgagaaggcggcaacatggcggtatttgagctcatcctatgcatcattgcggcggtggtggtgagctcgtttgtcagtcgcttcgtgcccaaagtctccacgccgctggtccagattgtgctgggcgtgctggttacgtatctgccgtttttcccggatgcaacgctcgacccggaactgttcatggtgctgtttatcgcgccattgctgtatttggaagcccacgaaatcgataagtcggcgttgctgaaaacgctggatctgagcctatcgctggctatcggactggctatcgtcacgatggcggcggtcggattcactttgcatgccgtctggccgtccatcaccttagcctcagccttagcactcggcgcggcactcggcccgaccgatgcggtggccgtcagctccctcggtaaagaagcctcgctgacgcagcgtcagcgtagcgtgctgaaaggcgaatcactcttcaatgacgcttccggcatcgtcggcttccagttcgctctggccgccgccttcactggagaattcgccgtggggcaggccgccggcgaattcgtgatctccttctttggcggcaccttatttggcctggtgatagcagcagcggccaactggctattcgagaccgtgcgatccctcggctgggaaaccactaccacacgtattctgatggaactgttcctgcccttcctgctgtatttgggcgcggaggaattcaatgtgtccggcattctgtcggtggtggccgctggcctgttcatccgattcgaccgcaccggcgtggggccgaatgtggcacgcacgaatatcgtttccacttcagtatggggtgtgctgagtttctcgctcaacggtgcggtgttcattcttctgggcatgcagctgccgcgcgccatgatggccagctggtctgacccgtatatcagcaatatcgcgctgatcggcattattctgctggtcactctggtggtaatcgcgcttcgattcttctggattgcggccatgctgcgcgttgcgcgagatacaatcaccggccagcgccgcaaaatgacacccgaacgctggcgctcggccgcagtgatgacctttggcggccccaagggaaccatcacgctgtcattgatgttcaccatcccgtattacattgccggcggtgcgccgttcccgatgcgtgacgagctgattttcattgcgtcaggcgtgattatcgtgaccttgctgctggccaacttcctgttaccgctattggctccgaaccgtggcaaggatcccagcgcggaaataattccggtgaccatcgatgtgttacgcgccacggtggaggaattgaccggacgcatcacgccagagaatcgtcgtgcgattctgatggtaatcgaccaatacaccaagcgcatcggacgattgcagcagcgcatcggcgataccgatccccagggattcgagcaattgcagatcgaagcgctgcattgggaaaaggaattcgtgcgcgaccgacttgccgacaccaaagcacatccggcggcggatacggccacgcaagagctgaacgtcgaaacctgcgagcgcatgcttgaccagattatgaatacgctgcgtcacacttccactgatccgacttcggggcacgcggtatcgcagattcgcggtcgcttacgcatgttccagcggcagatgagcaattacgccaaacgcacggtgtccaagattcgccacaccacaccattggtgagcgaggaccagattttcgcgcgcacccgcgaactgcaggtcgaggcgattcatcatgttatcggccggcttattgacgagatgggccaggatacgtacaacaccgagcattgttcggcactgttgctggattatcgtcgtgccgaggcttcattgcaggcacgtccgaatatgagcggcactacggaaaccatcacgcaggtcgaggacgtaaagcgcgagagctacggtatcgaactcggtatgattcaggacatgtacgaagccggcgacatcaaccgagcccaagcccgctccctgaggcgcaacatctacgttatgcaagtggacgctgattccggcatctagtttccctggctcccttctctgaggggagccaagttggggattgctatttccgtatgattctcttcagtatgtgcagtagtgcttgcagtgctcacttcgctcatgggagaacagtctatgaccgcgccggccacaagcgccctcgatgtccgattgctgtgacggccgcgccaattccagtgatggcggctgactacagcacgccagaggtaatgtcgttgtcgagcagccactggcgcaaatcggcgaactcctcaagactcacattgtgatccagaccgtggtagctcttggttttcagccacgtatgctcttccaaccaagcggcggtggcgaacagttcgtatttcgggattacgccatcgttcttgccgtacgtatagaacacggggatatcgtaatcggccaggcgagagtcggcgggggccgtgccgggcacctgaccgggtgtgttgaaaccggacagggagacgacggcccggtaccgctcggggttgatgcgcaacaaatgcacggcgaccagtccaccttgcgaaaacccaagcggcaccacgtcacggtcggcgggaatgttgtcggccacccatcggtcgactgctgtggcggcggcatacgcgtcgtagtcacgatcatcgccgataggcagggcatcgtgaaaccacgcgtagttgccggggtcgggactgccttcacgggccggcgcgagtgtcagcggcccgcgcaatgccacgaagtcgttatatggagcgatgaggcgcatgatgtccgccatgtcttcttcgctggatccccatccatgcaggcacaggaacagcggatgcgtggcatgctggtcgaagccgccgcgcgaggtgacgctgtgttccacggtgagtggctcgccaaaacgtccaggcacagtggtggattcgcggccgatcagaggctggctggcattcgcttctttgctcataccaatccaatatagaggtcttgcgcgctgtgcggaaaacgatggaccatgatttcagtcacattgggtaatccgcgccgaatcgccttgggactttccaggggataccggcaatctgtcaggcattaccgctgtttgcggctgcggtgtctgtggctgcggtgattgtctcaagttcgccgccccactgctgctgcagtgcggtcatcttgctgccctcgccgaacaccatccagcgtttgccgttcagcaatcgccaatcacctttcgtttgctcattatcagcgtattggctcagcagttcggaaatcttgctttcgataggtgcccggctgatggctgcggacgattccgattcaaaggacacgaaggccactctcggatcagtgcacatctgtacggtggtgatgcctggcaaaccgcccgcatcaagcccctgccatccttctttgcacgcgccggcagcttgttctatgccttgctccatctgtgcggtatcttcgacgggtgccttgtcgttcgactgctgaatcagtccttccgggaacaatacgcccatggccacgccgataaccaagcaaactatggcgcacaccagtgcgatgatgccgcccgcgcccactcccccgtgagtggcgtaccgaggcatggtgactcgcgcagcgatgaccagaatcagggtgatgctgataagcaccgccgccgtcaacgcaatgtatcgtcctggcactgccgtcataaaggaaatggcgtaaggcgcgatttcatgaaccgccgaggtggccgataccacgacggctagcagtccgctgacaacggcaagtctgcggcacaatatcgacgttgggctgctggcttttgtagcggcgaatcgccggccggcattccgcctggatgggcgtcgattctgtgcacgacgtgagctgcgcgaatcgtcatactgaccatcgccgaagaaatcgtagtcctcatcgttgcgggccatcggtgcccccttcctgccgattacacagccagtgtaccgctatggcttgggaatggcggtcattcgagggaatgattcagggcaaaaaagaaccccggcggttgcccgccggggagagaaaggagagagaagaagaaagggggttcaattgtcgggaactgctgcggctcctgatcagctttccgctgacatcatatatataaccactgctttctgggtctacctctaagtttctctgagaaaaacctgagaatacttgcgattgatggaccgcggaagcgtgaggagcctctcacgtttccgcccaaggcgctagacttgaaggcagtatttatttgcccaaggagtttttcacatgctgctgtccgatcgcgacattctcgccgcacagtccgcaggtcatatctcacttgatccgtggacccccgaaatggtgcagcccgcttccatcgacgtgcgattggaccggtacttccgtttgttcaataaccacgcctacacctatgtcgatccggcggaaaaccagggcgcgctcaccgaacagttcgaggtggatcccgacgaaccgtggattttgcaccccggcgagttcgcactgggttccacgtgggaatacgtcaagttggacccgtccattgccgcccgtctggaaggcaagagctcactgggtcgattgggtattctgacccattcgactgcgggcttcattgaccccggtttcgaggggcatattacgcttgagttgtctaatgtgtcgacgctgccggtcaaactatggcctggcatgaagatcggccagatgtgcttcttccagctgagctcgcccgctgagcacccttatggctccaagggcaccggctcgcattatcagggccagcggggtccgacgccgagccgttcctacgagaatttctaccgcgcgcacatcgacgactgagcgttgcgacgtaccattcggccggcggatgccggccatttgcttaatcccaaggagatgtcatgaccaacagcgatggtgggttccagttcgacttccagcagcacgaaaagccggtcaggccaacggttcctccgattcccgggcaagagacggcagcatatggcgcgcagccagcgacacaagccacaccggctctgcagttcccgcaatctgtgcaggcagcacagccgacgcagtttgcacagcccacacagcccatcgatccggccatgacgcaaccgttctcaccgcaattcccggctgcggttgccgcacaagcaccacagccggcggcagccacgcagccagtagtatccgaaacaccaatcgccgctgcgcccggccagcagcaatacgtttgggatcagacgacgcaaagcttccgcccggtggaaccgacagcgccggtgacgccagccgcaccagcggcaccggcgacatcgcctgtttcggcagcttcaaacgccgcgacacaagcgttccagcccagtcaggccgagcagcctgcggtagatgccgaggcaacacaggcattccggcctgatcaggtcatggcaacacagcttttcgaagctcaggccatgccgaatgccgaaaccgcggccacacaggcattccagcctaattcagctgcggccacacaggcatacggcgcatcatccaccgtatccggtgagaccgttgccatgccggcaacgcaagtagcgtctgccgatgatgctgcagccacacaggtgttccaaccggccgccctggctgcttcggcacaggctcagcctgctgtgatgcctccctccattccgttgaatcaggtctccgatgaggacgattccgatggcgccgagcctcgtcacggcggtagcggcaaaaagaacacccgcaaaatcgtcggcattgccgtagcagtagtcgccgtgatagcgctggttgtcgccggcctgctctggtggcattccaacagcagcaaggcgagccaagccgtggcattggccgagtgcaaggtagcggccaagcagtacacgaatgctcagaagaagctcaccaccgccatatccaatggccaaaccagcgcgcaaacatccaccagcgatgtggccgatgccaatacgctcaccacgctgaatcaggcgttgcaagacgccgacaatccgaccgacaccgccaagtgcgattccagcctcaacgccactgagctgaagtctcacactaaagagctgcagaatgatgccagcgacatggctgacaagacggatgccatcaacaatgcgatcaaggccgttaatacttcaaaggcgacggccgataccgacacactgaaatcgaacctgagctcagctatttcgcaggcgcagggcacgctggataattccgcgggcagtgtggccgatgaaaacacccgcaccgcgctgcaaaacgccatcaccgaggccaatacggtgatgaacgggaccagtccgtccgaatccgacgtcaacaatgcgatttctaaactgcagaaggccgagtccgacgtcaccgcctcgatgcaggccaagcagcaggcagatgccgccaagcaagctcaggaagaggctcagcggaaggccgaccaagaggcacagcagaaggccaagcagcaggcgcagcagaagtctcaagacgggtccacctctactgacggcaccgacggcagcaacaactgaggtctgcagcgttctcccgtttcccatggggcggtaacttccccatggggcggttagcacattttcctttttcgcggaataacgccgttttcagcgaccgccccatgaggaaatcaccgccccatgggatagttaccgccccatgaggagccgtttggatatagcagtgggccgggccctgaataccagagcccggcccactgctatatgcccacaatcagggctattgcgatggcttaacgcttggctatcgcgcgtagcacaatcttgcgtagctcggaggcaatcagcacgattgcggccaggcagatgcattccacccaagccatcgggctcaatgccacggtgccgaacggaccgttaaggaacggcacgtaaatcaccacgagctgcagcgccacggacaaaccaatcgcaccccatagccacttgttggagaacagacccacgaatgcggactgcagatgcgaacgggaggccagcgcgttgaacagctgggcaaacaccagaatcgtgaagcccatcgtacgggcctcggtcatctgcgcttcatggccgatggcatccaccgagcggtcggtgaacaagccgccggataggtgcatgtccataccaatcagcgtgacgatggccataatgacgccgacgaagatgatgtcgccccacatggaggcgtcaatcacgcggtccgtcaccttacgcggtttacgacccatcacatcgtcggtctgcgggtccacgcccatagccaacgccggcgcggcatcggtcagcaggttgatccacagcaactgtgtggcgagcagcggcacggtgacgcccacggtttccggctggcggatgccgaggaagccagcaaacaccacaccgaggaacacggtgaacacctcacccacattggaactcagcaggtagcgcaggaacttgcggatgttgtcgaagatcacgcgaccctcgcgtacggcggccacaatggtggagaagttgtcgtccgccagaatcatcttggcgctctgcttggtcacttcggtgccggtgatgcccatggccacgccgatgtccgcggacttgactgccggggcgtcgttcacaccgtcgccggtcatggccacgatgttgccttgacgctgcaaggattcgacgatcttgagcttgtgctcgggggccacgcgcgcgtacacggacacttcggacgtggccttgtcgagtgcggcctcatcgggcagctggtcgagctggtcgccggtcagggccttgccgtccttggcgatgatgccaaggtcggaggcgatgcgggcggcggtcagcgggtggtcgccggtgatcatcaccgtgcggatgccggcacgatgggcctcggtcacggagtcgcgcacctcagtacgcggcggatcgataatgccgaccatgccattccagatgagatcggtttcgatggcttcggcctgatcggcgatgtcggacacctggcctgcggcgttgacgcttacaccgggcacatcagccaaagaactggtttccagcggacggcaggcctcgccaagcgtacggtaggcctcggaggagagacgttcgacggtggcgagaatcgactggcgatcgccttcggtgagcttacggacctgaccacccacgcggatgcgcgtgcagtagctcaacagcacgtcgggcgcgcccttggcgaacacggtgagcttgtctgaatcggtgctgtccttggcgatgatggacatgcgcttgcgttcggaggtgaacggaatctcgccaacgcgcgtgtatcgcgtgatcttgcgatcggccttgaccttgcgtgcggccacgatcagcgagacttcggtggggtcgcccacgatctcccagcggccgttctcctcgcgtagttcgccgtcgttcgcgagcgtgccggccacaagcgtggcgacgacttcatcggccacaatctgggcctgctcggattcaggactgacgccaccggtcataaccatgcggccttccggcgcgtaaccggtgccggtgatctgcactgcgccggacggggtgaccacgcgctccacggtcatctcgttgcgggtcagcgtaccggtcttatccgagcagatcacggaagcggagcccaaggtctccaccgaatgcagtttcttgacgatggcgttgtgcgcggccatacgctgcacaccaagcgccagcaccacggtcaggatggcggccaagccttccggcacggcggccacagccagcgagacggccaacagcaaggaatcaatcacgtcatggacgtcgtcgaagccttccagcacggcgagcgccaccagcaccacgacagcgatgacgcacaccgcaatgccgaggatcttggagacgtaatccatctccttttgcagcggggttttctcatcttcggtggcggagagcatgtcggcgatcttgccgacctgcgtgttcataccggtgccggtcacgattgcgcggccggtgccttgcgtcacggaagtgccgttgaagatcatgttggcacggtcgcccagcgccttggcttcggtgagtgtgtccggcttcttaccgaccggcacggattcgccggtcagggaagcctcggcgatgcgcaggctggccgcgttgaccagtcggccatcggcggagactgagtcgccttccgcaaggacgatgatgtcgccggggaccacgtcggcggtgttgatgcgcatgactttgccgccgcgcagcaccgaggtctgcggggccgtcatttgggcgagcgcctcgaccgcggcctccgccttggcctcctgcatgtagccgagcacggcattgacgatcagaatcaaaatgatcacgatggcgtcgaacggcagcacttcaccgccttccgcgccgggctgcgcattggccttttcgatgaaccatgcgatcaccgagatgatggtggccgcgatcagcaggtagaccagcgggtcctggaactgggccaggaatttcttccatttcggtacgggcggggcggtggcgagctcattcgggccgaatttggccagtcgacgcttggcttcttcctcgctcaggccctgggatgggtcgacattcagggctttggccacgtcgtcggcactggtcagacttggatcagcttcccccaatagcgcttcctgcgcgcgcacttcttccgattccacgacctcgttcgttgcggtcgcggacactgcggactgatctttgagatcatccataatgttctccttggtattgccgcggagtagtcagccttgcggccgctgccgggttttctctcccggctggacgcacaggactgcgcggttatggacaccggcgcaactgctgccgatgcatacgattgctattattccataactgcgtggcgcacttggcgcacagcgtaatagcgttttgcctagaacaggcgacgcaaccaggcttcagccaaatcaggccaacactgcacgcattcgacgatgtgcgcatagaagccgttgccagcggtttccgcattggccagggacaggccgtggctgccttcggggaacaggtgtgcttcgatgctcacgccggcggcccggcaggcctggatgagcattagcgtattctccacgggctcggcttcgcggtcggaggtcatggcgtagccgccaccaggcaaaatcaggatggccgggcgtatgcggtccggttccatctcctcgctgttgtcggccacatagccaaagaatcgcgcctcgttgccgtcaatgccagcgatggtttgttggattattgcatgccatacatcatacgcgcagagaatagttctcgataagaaccactcaccatatgcggtcttgcccgtatctccaaaccgaataacgcttacagcgaatcgtgaagaacgtatgccgcactaccgttacagagcattcgacagctcgacatataacttaagaatcgtgagaatcaaagcaattcataacctaggaatagtgagttttacggcattatataacttaggaatcgtgatataatagctcataaatccttgaaaatactaggaatatgagcttaacatgtataagagaaaagtatacgaccatctacggcgatggaaagcagcgagcaagggtactactgcgttaatgattgaaggagcccgccgcgtcggcaaaagcaccgtcgccgaggaattcgcgaagaacgaataccgctcatacatccttatcgactggcagaaggctccgcaggcggtacgagactcgttccgcaacaatctggatcatttggacacgctgttcatggacctttccgtctattacggcgtacgcctgcatgagcgtgacaccctctttattttcgacgaagtacagctcttcccctttgcccgcagcgcggttaaacaactcgttgcggatggtcgatatgacttcatggagactggctccctgatctccattaagaagaatgtcgaaaacatcttgattccctccgaggaagaatcggtgagcatgtttcccatggattttgaggaatttctatgggccagaggagaagaactactcgccgatgcgatacggcaatcttttgcggacaggcgagcaatgtctccgctgctggacaacaaggcggaacgcctgttccgtgaatacatgctggtgggaggtatgccgcaggccgtagagcgttatctgggaacatccgatatgggcaatgtcgatcgagtgaaacgccaaattttgcacctgtacgctcaggacatagagaaatacggcggagattcgaaagaacgggtcaaacgtatcttcgatgaaattccagggcaactttccaagcatgaaaagaagttcacactgtcgtctttaggcgaaaacgcacgcgaacgtgaatatggcgatgctttcttctggttggatgaatcgttcctgatcaaccgctgcatgaatgccacggatccgcatgtgggcctgcgcctacaccaagaggactccacgatgaaatgctatatgggagacaccggcttgttagtaacgcaagtgtttgccgaccgcgcatacacgtcgaatgagttgtaccgcgatatcctgttcggcaagctggaagtgaatgaaggcatgctggtggagaatgtcgttgcgcagcagctccgggcctcaggccatcgcctgttcttctattcccgatattcccgtcaggcgaaggaccgcatggaaattgattttctccttatcggggagtattcaaatgccgccatgaaggccagggtctgccccgtggaggtcaaatcgacaaagagatacaaaacctcatcgctcgataagttcaagaataaattcgacagccgggtcggcatgcaatatgtgctgcatcctagaccaatgcgcgttgaaggagaccgcctatatctgccgttgtatatgacgcattgcttgtgatgattctagaacgtatcgcagagaatgattctcaataagaaaagcgtgaggattacgatgcctcaatcgcacatgcagagcgtcatatcagtgagatcccgccgttgcggaccatgtttgattgtgcggaaaagttcggatgcctcacacttttcttgacgggaattatttactgtgaggcattgcgcaggttggcggccatggcgcggtcgcgcaagcctttggtgagcttgagaccgagggttacggcgatcaggactatcgtgcaggcgatccacagcgttcgaccgccgaagttgctgatggtccagccaccaatcagcggcgccagcgcaatcgataccgaccacactacgttgtagacgccctggtacgtgccgcgtgccgacgcgggtgccatggcggcaaccgtagtggtggcgatagggaatgtgcccagctcacccagcgtccacagcactacggcaagcgcgaatccgccccaggaatgggccgcggcctgcaccgcatagccgatgacggttacggcgaggcccatcaccagcacgcgtgaattgcccatgcgcgagaacagtttcatcgcgggaatctgcagcaggcacaacataccgccattgatggtgagcagcaccgaatactcgcccagccctagaccaaggtccgtcatggcaatgggcaggccggaggtgctttggaagtacacaaggaagtagccgaacatcagcagggagaagccgaggaatggcgtatcagtgagcacgcgccgccaattgcgagacatggagcccttggcactggcagccggtgcggcatccgagtgattcggcccctcgacgccggcgaattccgcatgcgtaacactgcgttcgtcttcatggcgcaccgcacttggcaccgatacagtaatccccaaatgccgcacctcgcggaagaacgcaatcagcaatatcgtgacggctatcatcaccgccgcttcaacgtagaacatcagcgaatacgagatcttgaccagctggttggccacaatcggcccaatcgcgtacccaaaattaatcgcccacgattgcagtacgtacgcacgttgctgacgttcggcgggcaccacatccgcgatatacgcggcgatgaccgggctgggcagtgaggcgaacgcaccatagacaaacagggccgcgcctaaagccacggggtcagtgagcacggaaacgaccagcagggcagccgctgcgccgatttcgccgatgataatcatggattggcggccgaatctgtcggacaaggtaccgccgaacaggcagccgatgattgcgccgaagccgtacatggccacgactgtgcccaccacaccctcatcgaggcgcagcgcggaaaccaaatatatcgacaagaatgaggtcacgaagcgacccatccacagaatcagaatcgccaaccataatccccaatacagcagggacagtccgaatatcatgcgctgcttcttcactctcaataccttaccggctaccgacggcggaatagccgcgttttggcgcggggtgctgggacaatagcacctatggctatcaaaaaaggaccgaccaaggggtcgggtggcaagcatcgcaacaaactgaagggttacggccccactcccaaagccgaggaccgcgtctatcacaaggcgtataaggccaagaaagcggccgaacgtcggcagatggccgacccgcgtctggcagcccgccgtcgagtggacaagttcgcttcggcggatacttcggatctggtgtacggccgtaattccgtgctggaagcactgcgcgtaggcgtaccttcttccacgctgtacatcatgtctcgtattgaacatgacgatcgtactcgcgaaatcgtgaaaatcgctggtatgaacggcctgcacatgctggaggccgatcgtctggagatggatcgtatcgcccgctccggcaaccatcagggcgtgattctgaaggtcgatccgttccagtactcctcgctgaacgagctggccgatcgtgctgagaagaaggccaaggcaatggaggccgcgaattcggcggccgcccgtattgctgcgcgaccgctgttcattgcattggacggcgtgaccgatccgcagaacctgggtgccgtgattcgttcggcggccgcattcggtgccaatggtgtgattctgccggaacgccgttccgcttcagtgaacgccgccgcttggaaggtgtctgccggtgcggccgcgcatatgccggtggcgcgcgtggtgaacctgactaaggcacttgagggcttgaaggagcgtggatactacgttgtcggccttgacggtggcggcgataagctcgtcggcgagactggctttgaatccgatccgctcgttgtagtgctcggttcggaaggcagcggtttgggccgactggtgcgcgaaacctgcgacgcgattgccggcatcccgatcagctcgtctgttgagtcgctgaacgcttcagtggcggcgggtatcagcctgtacgcggtgtccaacgcacggcgcaaggctgcggcggagtgattgtcgcttgaggccgtaataggttgtacacacaaagaagcccctctatttgaggggcttctttgtgtgatgggctcacctacagacagtccaccggattgtccgcttaatgactccacactgccgcatccggatcgtcatcggggttgtagccgtcgtcgtccgggtcgctgtaggtggattcgtcgtcaatgacgccggaatcggcctcttcgttaagttcggcgagtgccttggaatcaaggttgtagctcggcagaacgttgtcgatgtagctggtcacagcctcgcccatcggcacgtcgtggccggccttctccgccaggaaccagcgatggtcaagcacctcatggaagaactgagcaggctcgatctgggagcgatattcgcgcggaatcatacgcacggtcggctcgaacacctcgcgcatccaatcggtggccacgatttccagatcctcgccctcacgccacgtggaggcacggtaggcgtcaaggtcgttgagcagacgacgggcctggttctcctgcacgtcaaggccggtgaggcgcagcagcttgcggttggcgtagccggcgtccaccacgcgcgggcggaccagcacacgcttgccgtcctcggcggtcttcatttccagctcgtccacgtcgaagcccagctcgttgagcttgttgacgcgctgctcaatcttccacatttcgtccgggttgaacttgtcggtgtcggtcagagcgctccacagcgagtggtagcggtcgactaggcggttgcccacctcgatctcatccacgtcgccgggcagtagcttgccggacgccaaatccataagttcgccgatgatgttggtgcgggccaagtcgatatcgtattcgcgctggccgtcggtgagctggacttgcaggtcaccggtctcggcgtccaccaggaaggcggagaaagcgtcggcgtcgcgcaggaacaggacgttcgacagggacacatcgccccagtagaagccggccaggtgcaggcgcaccagcagcacggcgagggcgtcgatcagtcgttcggcggtgtccgggcgcaggttgcgggcgaacagcgcacggtacggcagtgagaacttcaagtgccgggtgaccagaatcgcctccagcggctccccttcacgggtgtgacggccggtgaccacggcgatcggggtcacagttggcagttcgagcttctgcagtcgacgcaggatctcgtactctcgctcggccacctggcgcgtgatctccttcatggcgtacacctcgtcgcccacgtgcacgaatcgcacgacgtgacgggagatgcctcgcggcaggttggccagcaggtcctcaggccaggtggccaagggcttgtgccagggcagcgtgaacatctttgggttcgagctggcggcggtgattttcagtgcttgcggttccgctgaatcggcgtgttcgtcttcggctttgacagacgtggccttcagcgcacgcggatccatctggggcaattcgttcaactccatgtgttcgattttacgtgtcgttcgcgatgtgtgctccttggccacgacttcggcgcgttatgtttacgggaaaacaccgtttggtctctccctcagaccgtctagaaggcaaaagaaaagccccgcagctatgcagggcttttccaacgaggtcataagagaggaagagaataacctcgtttaatggttgacgaagcgattagacctcgccaagtatctattagttcagacgcagctcagtcgacggagcgaacaggtgcatcttggccgggtcgatcttgatcttgacggtcgcgccaaccttcggcagcgcacgcggattcacacgaatcgtggtgagcttgttctggtcggacatgacctgggaagcctcagcggcggagccatcggtgacgatgttgccgtagatgtagccatcggagcccagatcctcgacgttcacaaccttcagggagaaggcgttcgggtcgtcagccggggccaggccagcgtcctcaggacggaagccgaccacgatctggccgttgtcttcggcggtgagcttgttgacggcctcagccggcaggtccacggtgtcctcaccgatcttcgccttgccgttgaccaccgggtgggtgttcaggttcatcgacggggagccgatgaagccggcgacgaagacgttggccgggcgatcgtacagctcggtcggggcgccgacctgctgcaggataccgagcttgatgacggcgatgcgatcgcccatcgtcagggcctcggtctgatcgtgggtcacgtacagggtggtgacacccagctggcgctgcagggcagcgatctgggtacgggtctggacacggagcttggcgtcgaggttggacagcggctcatccatgaggaagaccttcggctcacggacgattgcacgacccatggccacacgctgacgctgaccaccggacagagccttcggcttacgatcgaggtactcggtcaggtcgaggatctcagcggccttctcgacgcgcttgcggatctcttccttcggagtgccggcgatcttcagagcgaagcccatattgtcggccacggtcatgtgcgggtacagggcgtagttctggaacaccattgcgatgtcgcggtccttcggctgcatcgtggtgacatccttgccaccaatgaggatgcggcccttgttgacctcctccaggccggcgagcatacgaagggtcgtagacttaccacagccagaagggccaacgaggacgaggaactcgccatccttgatatcaagattcaaatcatccacggagggcttatcgttgcccgggtagatacgagtgacgtggtcgaaaacgacttctgccataattactaatcctttcagaggcaggtacgtgcctcacgatccgttgtaaagggatttgttctttactgcgcttccgccctcgccaccgacgtacaactttgctttcggaaactgcaagcttcagcgtttacttttttccggttcagtgaaggttctcttcgttgagccgagaactactatacacggaccgtggaccaaggcaagtggcgtgtctgaaaatgtagttaactttatgggcgtttctgggggtgttgtgtggttcggcccatgacacgcctgtttctcgaacgtgcgaaccggcacgcccggcgtagagcaggcctgctcttcccgaactgacggattccatcagtcgccgactaatgcaacacagactcgaaggtgacgccgttgcgggcggctttgcgctcggccttgcgctcctcggcgttttcgatgcgctggatgcgcagctggcgccagtcctcgcgcatgtcgcggaaacggtcggccagcgttacgtcatcgttctcggcatcgccatcagtaccgctgccatcggccttaccgaacgtgccatcggccaccttggtgatgcccagcttgagcagtccgagcaactcacgcaacgtttccggtactggctcatcgccctcatcggcggacttggtcaggccctcgatgcggcgacgaagcgcatcggcgtcctcgggatcgatcttgagcccggcgatcagcgactggcgcatggtctcgtaatcgaggttggcaaagaaattcagctgttgcagcgtcatgaagcccttgagctcggggaatcggtggacgatgtattcctcgcggtcgtcggcggcgcgggtccagtcgcgggtgagctgcggatcccagttggcggtaatcgatccctcgcgcatgcggtagtggtacagcgccttgggcagacggaccacgcgcgtggcctcgccgatcacgttgcagatacgggagagatcctcgattttgcgccccaccgggaaggagaatccggtgccctgataggtggaggcgggtgccaggaaggcccagaaatagccgtcgatctcagccttgacctgctttttgatggcctcgaccggggtcaggatctgcacctcggtgaagtcgttgtggcgatagttggacagcagcggcttgttgttctcggagatggtgtcgaactggaacatcacgaggtcggcgtcatactcgcgcatggcgttcaggcagtcctccaccaacgtgggggccacggtgtcgtcggaatcggcgaagtatatgtacgcaccggtggccccggcgatgccggtgttgcgggcgtcggacaggccgccgttgggcttgtgaatcacgcgtatgcgcgggtcgcgggcggcccaggcgtcgcacatggccgggcaattgtcgggcgagccgtcgtcgaccagcagaatctccagattggcgtacgtctgcgcggcaacggacgccacgcattcgtcgaggaatttctcgaccttatataccgggatgatgatgctgaccaacggctcctgttccatgcctccagcgtagcgccgtcgtgcgaacgcggcggcgctgcggtttcgcggaccgcgaaacccttagaagtcccagtcgtcgtcatcggtttcttcggctttgcccatcacgtaggaggagccggagccggagaagaagtcgtggttttcgtcggcgttcgggctcagggcggccaggatcgcggggttcacatcgcaaatctcagccgggaacaaagccgggtagccgaggttcatcagcgccttgttaccgttgtaccgcaggaacttctcgacgtcatcggtcaggcccacgcggtcgtacagcgactgggtgtactccacttcgttgtcgtacagctcgttgagcaggtcgtacgtgtagtcctgcagatccagacgctcggcatcgctcagctgggcgatgcccttctggtacttgtagccgatgtagtagccgtggacggcctcatcgcggatgatcagacgaatcacgtcggcggtgttcgtcagcttggcgtgcgcggagaagtacatcggcagatagaagccggagtagaagaggaaggattcgagcagggtggaggccaccttgcgcttgtacgggttgtcgccctcgtagtagtcgagcacgatttccgccttcttctgcagaaactcgttgttctcgctccagtcgaatgcggcatcgatctgttcggtggagcacagggtggagaagatggacgagtagcttttggcgtgcacggattccatgaaggcgatgttggtgtacacggcctcctcgtgcggggtgagcgcgtccggaatcaggctcacggcaccgaccgtgccctggatggtgtcaagcagggtcaggccggtgaagacgcgcatggtgagcgtgtgctcgtcctcggtcatcttctgccagctggggatgtcgttggagacggggactttttcgggcagccagaagttgccggtcaggcggtcccagacctcaaggtctttctcgtcttcgaggcggttccagttgattgcggagacgcggtcgatgagtttcagcggtttgcgcggaatggaaatcggtgccatgagtgttccttattactcgttgtcgttgtcgttatcgtcgttggacttgttttcgaactcctccggcgcggtcagccggagcagtgctctatagatggttcgtgacattgttggttccttagatggtggagcccccctcagtccgcttcgcggccagctcccctctctgaggggagctgtcggcgttagccgagtgaggggagtaacaacggctctctggttgttcaatgcgtgcggagaccgccgtctgaggccgaaggcgtacgaaggtacgtcgagtgccgaagaaaggcggtatacgctccctcgaacgatcagagcatgcaggagacgcagccttggacttcagtgccttccagggcttgctggcggatgcggatgtagtagagggttttgatgcccttgcgccaggcgtagatctgggccttattgaggtcgcgggtggtggcggtgtccgggaagaacagcgtcagcgacagtccctgatccacgtgctgggtggcctcggcgtacgtgtcgacgatggccttccagccgatctcgtaggcgtccttgtagtacccgaggttgtcgttggtcatgtaggcggccgggtagtacacgcgcccgatcttgccttccttgcgaatctcgatcttggaggcgatcgggtgaatcgagctcgtggaatggttgatgtacgagatcgagccggtgggcggcacggcctgcaggttctggttgtagatgccgtccttcagaatcgcgtcgcgcagggcctcccagtcggccgcagtcgggatcgcgatgccgtactgttcgaacagcgcacggacccgttcggtgcacggagtgagcgaacgacgaccatcggtgtacttgtcgaagtagttgccctggccggccggcttggcgtagtcgctcgtagcgaagctggcgaacgtgcggccatgctccacggcgagcgcgtgcgaggcacggtaggcgtggtaggccacggtcatgaagtacatgtcggtgaagtcgaggccctcttcagaaccgtactggatgccttcgcgggccaggaagccgtgcaggttcatctggccgagaccgatggcgtggccctcctcattggcgcggcgaatcgaaggcaccgcgttgatgctggtgtgctcggccaccgaggtgagtgcgcggatcgccgtctccaccgtgtggcccaagccgccatccatcgccttagcgatgttgagcgaacccagattgcaggagatgtcgcggccgacatgcgcatacgtgaggtcctcgttgtatgcgctcggctcctgaacctgcaggatttccgagcacaggttggacatggtcacgcgaccttcgatcgggttcgcgcggttgaccgtgtcctcgaacacgatgtacgggtagccggattcgaactgcagttcggcgatggtggtgaagaacttacgggcgtcgatgtaggtcttcttgatgcggtcgtcggccaccatctcgtcataatgctcggtaacggagatgtcggcgaacggcttgccgtacacgcgctccacgtcgtacgggctgaacagggccatctgggccttctgtttggccagttcgaacgtgatgtccggaatcaccacgccaagagccagcgacttgatgcggatcttctcgtccgcgttctctcgcttggtatccaggaagcgcaggatgtccgggtggtgggcgttgaggtacaccgcgcccgcgccctgacgtgcgccgagctggttggcataggagaaggagtcctccagcagcttcatgaccggaatcacgccgctggactggttctcgatgtgcttgatcggggcgccgagctcgcgcaggttgctcagcagcagggccacgccaccgccgcgcttggagagctggagggccgcgttgatgccgcgcgaaatcgactccatgttgtcttcgatgcgcaccaggaagcagctgaccggttcgccacgctgggccttgccgaggttcaggaaggtcggggtggcgggctggaagcggccggcaagcatttcgtcggcgtattcgatggcctgctgctcattgccggcggcgagctccagggccacagcggcgcaacgctgcgggaagtcctcaagatagaggcgaccatcgaacgtcttgagcgcgtaggacgtgtagaacttgaacgcaccaaggaaagtgccgaactcaaagccggcggattccacgtgctcgtagatgcggtcgaggaattcagcggagtactggttgaagaccgcagggttgtagtactggttgctgatcaggtattcgagacgctcggcggtggaggcgaaccgcttgctgttggtggccacgtgccctgtcacgtattcgcgttcggcggccttgtctttgtcgaactggatcttgccgtcggcgtcatagaggttgagcatcgcgttgagcgcgtggtaatcgtgcgccgggtcgtactgttccgctgcggtgtcggcagtattgtcgagcggcaggccggtggcggtgaggtcagtcattggaaatccttggaatatggcagaagtgtgtttactcagacagttgctcccctcagtcaacttcgttgacagctcccctcggagaggggagccaatacctcgagggggtcaagatttactgttcggtgaagaagcggacgaggccgtttcgcacggcggcagtgtcttccggggtgcccatgagttcgtaacggtagaggtagggcaccttgcatttggcggcgatgatgtctccggcggcacagtaggcctcaccgaaattggtgttgcctgaggcgatgacgccgcgaatccactcgcggttggctggatcgttgaggaagcgtttgacctgaatcggcactgctttcttgaccacgccgccgccataggtgggcaccatgatgacgtacggttcgcggacgttcagcgccgggtcggcggcccgcaacgggatgcggtagacgttgatgccttcgtcctgcaaacggcatccggccacgaaccgtgcggtgttttcggaggccgacgagaagtagaccaatgcgccgatcgtcttgccttcggccgcgaattcgggctggctcagactcacgcggacaccgtggcggcggcgcggttgtcggcggccacctgctgggcgacttcgcgaatcaggtcggggcggtagccggtccaggagttgtccggcgtgatgaccaccggagcctgctggaaaccggcggcctgcagctgctcaagggtggaggggttctgcgtcaggtccacggtttcaaacggcacacccagcttggtgagctggcgcttggtggcatcgcactgcgggcaatgcggcttggtgaacacggtgacggtcatggcgactccccttgatgtggttctgatgaacagtgaagcgaaggccatattacagcggtgtgatttgaaatcaaggcactatatgtagtggcgcgtgtcacataacaaacctagatatagggtttttcgttgatattccgccattcccatgcaccccccgaaaatcggcgtgcagcgacccgcccaatcacatgtggcattgttcacatttgcgtttgaaccgctcttcgactgatcctcaaccgccccgcaaccgccatcttgagtttcgaggggctgttttgaccctttccggagatctatctccgtttcgaggggctggtactcaagtaagcgcatccccaaaatggcggaatgacggtggggcgaagccgtttatacccgtgttctagcgggccaccagcccctcgaaacgggagtaaacctctacggaaggccaaatcagcccctcgaagcggagaacggatacctcggcaccccgtgtggagccagaagacccggccggatgtccaaacgagcatccggccgggccttaaaagtagttgttcagttatcagaatcgatgcggcgcgatactactccgcgtctttacggctccaacagatcttcgatgcggcagccaagcgtgcgggccaaagcgagcacggtggagacggcagctttgccaaggtctttgcggcgctgctcgtacatttggatggagcgcagggtaacgccggagcggcgggccagcccggattggctgagtccggcgcgcacgcggatcgtgtgcagccgggagtcgccctcggtgcgattatgggcggcccgctcgtcgtacacgtcgacgaatcggctttcgtcggcttcgtgcagagtcgggtacagtcgcacgatatcgtcgagcgacagcacatcgagaatgtccgagaaccgcactcccctggtccattggcagtatgcgagtacccatccggcccagtattcgggtgttgagccggcgcgcagtgcggctggcggcatatcgagaatgcgcgcccaaccggtttgccgcatgatttcggccaccagctcctcgccggacatgccacacacgtatttgggcgtgcctcgcccgaaaagcgcggccgcctcggaggtggcgaagaagtccatgaataggccgaccggcaacccgcaatcgttcagcgcataatcgaaggcgccggccaagttggccatggcgtccggcaagtatgtcccatcataggcggggatcatcgttggtcactttctcgcggatgatgtcgcgcatgaacaggccgtcgagatcggcttctgcacttttgcggcggtaggcttcgcgagctgtgcggtcgcgctcgttacgcaatccgtggtaggtcgaagcgcgggcgatttcgcagccttggaaccgcagtgccgcgaatgcctgaggactggcgagtacgatctgcttgccgagctcgcccaaccgcatcgcctcagcgagttggtcgatggaaatcgcgttattgacaaaagcgcgggcgaacgagaaatacgaatcgtcggcacgacatccgacgatgacgtcagcctgactggcatccggcagaaacacttgtttcagatattcgatgccttgcgcggcgacggcggtggtcggctggaaacgacggttttcgaccagcatggccagccagttcaggatggtgtagggcggctgggacaggtccaggaagaggagcccgtccgtggtcaacgtgtaccgattcgcgaaaccgtcatccattcccgcgcacgcccattccttggccagctcgacgctgcgcgtgcaatagaatccgcggccataatcgtcgttcggcttgaccagcccgtattcaggatgcttgatgacatgcgaagagccatgccacagttcgatcgatgcggtctccattggccggctccttctctctccttacatattcttgattatatcactgtggtgatagtcataagggaaatacgagatgaaaaataccgctgtatacgttcgtacacaacgtgaaatgtatacgaacgtatacaacactgatgtccggagtcatgctccgcagtggcgcagcggacgcgccactaccatcggaatatgggactgaagacgtggaagaagtggacggactggccgctgatggtgctgtccgtggtgtttctggtggtgtattcgtgggaaattctctcccgcacgcatatcgcgctgtgtgaaaccgtcatcaacgtgatctgggtggtgttcgtcgtcgattatgtggtctcgctgtggttggccgacgatcgctggcggtggttcaagcacaacctgttcacgctgctgaccatcgcgctgccgatgctccggcccttgcgactgttgcgtttgctgaccgtgctgcacgtgctgaaccgcacctccggcatggcggtgcgcgggcgcatcaccgtatacgcggtcggcgcggtgggaatgctcatgtacgtgggcgcgctggccgtgtattccgtggagcgcggggcgtccggatccacgatcaccgacttcggcacggcgttgtggtgggcgttcgtgaccgtgaccaccgtgggatatggcgacttctcgccggtcaccttccaaggcaagatcattgcggtggtgctgatgttcaccggcatcgcgttgatcggtattgtgacggccacgctggcttcgtggatcgtggatcaggtcaatctggagacggatcggcgcgaggacgctcgggagaaggaagtggccaaggaagccgcgcaagaggctattgcaacatcagccaatcccgaaatcgacctattgcgcgaggaagtgcgtgagctgaccgctacggtagccggtctgcgcaccgaacttgagcgacgttgattggcgaaacgggacaaacaacgattctgccaagaaggtccgcgtcagttgttgtcaccgcggattgcggcagaatcattgtcgccacggctgttttcttcagtcgactcaacccaacttttgataatttttatttttttgatacttttgataatttttattttaggttgattcagcgaggaggcggtccacatgaaggcaaaggaaaacccattcaagccaacggcaggaggggaaccgcccctgctcatcggccgaggcaaagttatccgcgatttcgagaaaggtctcgataacggagtcggtgccccagggcgcattatgctcgtcaccggcgctcgtggaaccggaaaaaccgtgatgctcactgtgttcggagaccgggccaaagcgcgcagatgggatgtcatcgaagaaacggcctctgccggactatgcgaacgccttgttgatgccttacgaaccgggcgaggggcccttgaccacctcactatccgaccatcgttgacttttgctggagcgggcatcggcctcggagaagccgaactatccccgaagcgtatgcccgaaacgttgagaagtgccattgccggacggttggatgcgcttgagaagcgccatgctgggttgcttatcaccattgatgagactcaagcgactgagcgatccgacatgattgccatcgccactgccatacagcatcgaatcagggaacgacgcaatatcgccatcgtgttcgccggtctcccacagatgatttctgatttgttcaatgacgaagtcatcgcgttcctacgtcgcgcgaaaacgaacatactcacagatattcctcttgatgaagtgcgcgatgctttcgccacaacattccgcgcctccggcatgtccatcaccgacgctcaattaagcactgcagccaatgtgacagccggatacccctatatgattcaactggttggctaccatatctgggatgccgcagacatgcgggactcggataccatcatcgacgctgatgttacggcaggtatcgaggaagcacgtattgaccttgataacgccgtgtgcatcccggagttgcaaggcttatccaaaaacgaccgtgagtatctcgaagccatggcagcgtcagatggtccctctcccaccgtgaatgttgcacagcgcatgggcaaaacgcctaactatgccgccacctaccgcaaacgcctccttgacgccttcgttatccgcgaaacagaacgaggcgaagtcgattttgccgtgcccttcctgcgcgaatacttgcgtcggaatcagtaatcggcacaatgcacagtatcgatatattccgttccatataatgacttttcgcattcagatacacaatggacggcctgttgagtagcactcagcaggccgtccattctatttagctattcagttatcggagacacacctcaggccttgaccggagcgccagcgacctgctgggaggccatcacgccgaacaggtagccgtcttcggagaagtattcgaaggtacgaccggcgaagtcgcggcattcgaatctgatatcgttatcgattcgatcagcggctcacgatactgcccttgcatcgctgtgccactgttgaatgtgcccggctggctcacctttgggtcaccgccgacacatccttgatgccgatggttatagagtcgcaaattcacgactggcgcacctgcccacgcacctatcctgtcatttcgagcgcataatttgctaccacatccggtcagggcaatcgaccttaatggcgtaaacggcacttctcaatacgtaaacggcacttattcttggctcccctctcagagaggggagccaagaaatatcaagctcggcctcccaggagagagccagaataatgcactggcaaggcattaggatggagggcatgagcgatttgaacgcgttgaatcttgagcccggcgaagtggttggtgggtatacgctgatctcccggctcggctcaggagctatggggtcggtgtggcgggtgcgcgacgacggcggcaccacctatgccatgaagattctgcgcgactccctgaccgacgagtcagtggcaggctccggctctgcgtccacggccctgcacgaccccaacctcaagcccgatgtcacgccgcgcgagcgcctgcggcgcgaggccatggccttgaagaaggtcaatcatccgggtgtgtgcggcatcgtggatatggaactcgacgatacgttggcgttcatcgtcactgaactcatcgagggcaagaatcttaaggatgatgtggccgccaatggccggtatgtgggcgacgatctggaacgcttggcccgcaagctcatcgaagccaccaaagccgtacatgcggccggcatcgtccatcgcgacatcaaacccaccaatgtgatggtgtcggccgccggaccggtattggtcgatttcggtatcgcgatgggcgagggcgaaagtcacgtgacccgcaccggcctagtgatgggtacacccggattcatcgcacccgagattattgacggtgccgaatccgacgacgccaccgattggtggtcggtggcgtccgtgctcgcttttgccgcaaccggcgcgcctgtgttcggcaccaagccgatgatggcggtacttgagcgcgaggcctcgggcaacgcgaatctttccggactaccggccggcacattggctgccttccgttctgcactggacccggatcgcagggatcgttgcacgccggatcaattgctgaatgccatcgccttggatgcgttgaatcccaacgcttggcagggcgagcaggcgggaccgttcgccgcgggagccgtggctggacaaccggctgcgatcgttgccgaagccgcggaggcgatgcccccttttggcgcggccggcggcgttgaccgcaataatccccgaaccatctggcgcgcggccgaggaaaccgctgaggctcccaccatggccgtgttctccggcaataagggcgataacggcgatggcgaaaccgccgtattctcgccggctggcgccgctaccgccacgctgcccttagccgatatgccgccacgtccgccggccggtgcggagcaggccacgcaactgttgcccgacgctgctgccgatttcaccgacgacgccggcacacaggtactcaccggcgcgaccacaccgatgccggaccaaaccacaccaatggccggcgccaccacaccaatgaccaacaccgattcgactccggccccgaccacgccgctggccgagcgcaccaccgtactccccacgccgcagccgtcatcattccccccgtccggcaccgcccagagcagctgggatcccgcaagcaaccagcccacagcggtggaccccgccattcgcccggcattgcagcgcatcatcgaccaaaccgcccaagcggcccccaccgaaaccatggtccaaaatcctcccatgcccaatccggtggacgtgaagcgaggggaatatctgcagcgcggcaccctgccattgatcctgctggcggcgccgctggcggcactggcggcaaatgctccgctcgtggccatcatcgcggccactgcgttgttgtggctactgctcaccctggcctataacaccgaaccccagcttgagcgcgagggcaaacgcggcggcgagcgcaaaaactccgattcgtggattcgcgtggcgacttttccctggcatctggtcaaagccctgctgctggccattccccgcatactgctgctagtcatcatctatatggcgggaaccgccgtggccaccgcggctctggcactgcccgttcacaccatctcctggtatttcaccgcggattggggtattccggtgccgttgctcaatgatgtgccgttctccgcttccgggctggcgctgggcggtttcatggccatcggctggctggtcactgtgttcgccccacagtcgatgatgattcggctggggggcggcgtactgcgcgggctcaaacacagtcgcccggcgggcgcgccatccaccgaagtgggtggggctccacctgctccagtggcgccggcgcccaagggcggcgggcgcggcaccgtgctgttcaccatatgggccatcatcaccgtggccttgtgcgcgatgccgattctgggcatgccgatcaactggatgccgttcgcctagagcggggcggaatctcacacatcagccatccgcacacatggccgttgtgtatccgatacgttcgttccgtcacacttttacagggaattcacctcagatcagctctgggcgcagtcctcctcaggcccggtcattatgatggggcccaaacattgaagcgattgcaaggggatagctatgtcagatccgaagcgtcaggccaagcgtgccacacgcgctgagcgccgagcggccgaggaggccgcccagcaggcacgggccgagcaggcggctaaggaacgtaagcagcagaccatcatcggctgcattgtggtggccattattgtggtgctggtggccatcgctggattcgccgtgtacaaggctatgcggccgtccaacaccagcagcagtagccagcaaagcaacatgaccgtggacgaggcctatagcaagctcaagaaagtcagtacccagccggccaacgccgatgacaaggccggcttcgtgatctcgagcaaggggtacggtcagaaggccgaaggggcgcccaccgtttccatctacatggagccgctgtgccccggctgcgcctcggtgaaccgccagcttgacccgacgctcgtcaagctgatgaacgccggccagctcaacatcgatttgcacttcctcaatttccaggacaacaagagctccgacaactactccaaccgcgcgttcaacggtgccatctacattgccgagcatgatgacaatcccgatcacctcatgagctacctctccaacatctacgctgaggatttccagccgggcgaattgtccaattacgagccggtaagcaacgccaagctggagaagcaggccgtcaatgccggcgtgagcgagaatgtggccaccgcggcattcagtggtaagaacgaatacgtcaagtggctcaccgcctccaacaactacacgatcctacgccccgaactgttcaacagctccggcgcgttctcctcccccacgctcaccatcaatggcgaatactgggatctgaagcagctcacgctggcggacaccagcatggtggacggattcctcaagtccatcggcttggactccgatcaggtgggcgtggaaggccagatgccatcgatcggcgccaacaagaagccgatttcgctggccgattaattaccggcgcggctcggcctgaattgaccactcgagaactaccggtatactagagatttgttcaaaacgatttacgcgttaagaacaatcgcctctttagctcagatggccagagcggccgccttgtaagcggcaggtcgtcggttcgatcccgacaagaggctcgacgcgtagaaaagtggcgtattatatgatacgtagatttttctacgcatataattcttaccttgggtaagtactccaggagccttcccccaactatgggcttcctggaatgagggcggagcgtcccccaaccagctccgcgccttcaggggggcgggaacatccccttctctcccgccccctttttcttttctttttttgagctcagaacaatctgacgagcaggaatggtgacggtggccggtgaaaccgcagtacgggccggaacaaccgttacgatgggtggcgtaatcgttcatccagcaggaagagtatggcaatggcacggcgttggaccccgcagcggtttgttacactgcgtcgcatccgcgtaatcgcctgtatcgcggcgaccagtatcgcgctggctggatcattcgcgttcaccgcgcgtaaatccgtagccctgaacatcaacgggcaaaccacccaagtcaccacatatgcgatgacggccacccgtcttctggaggaacaaggggtggatatcaagacccacgatatcgtcactacctcgtccggcgaccaactcgccaatcatgccgtggtcaccgtacagtccgcctaccagaccactatcaacatcgacggcacgtccgttcccttctggaccgtggccaccagtgccgaccagttgctgggatttttcgaggaaaaccagaacaacgccacaaaaatcaccgtcgacatcgacaatgtgtacaaccagctcaccggcggactggtcatcaatcaggatggcccggtcaccgtcattgcggacggcaagacttccgtggcccccaacggcaaactgcccgcggcctccattcttgactccaaaggcatcgtgctgaacaaagaggaccgtgtgagcgtcgaaaaggacggcgataccactatcctgcgcgtacggcgcgtgacgcatggcgaggaaacacgcacagccatagtgccatactccacacaaaccatcatcgactccaatctgcctgaaggccagtcggagatccgccagcaaggcgtcaatggcgagaaaacccaggtgtataacgtcacgtatgtcgatggcgtggccgaatcggagacgctgaaatccgaaaccgtcaccacgatggccatcgaccagatcatcgccgtaggcgccgccaagtctgataccgataaaggttccgacaaaaaatccgactccgccgataacggcaaggccgattccggttccaacaatcagcacgagtcgtccggtaacaatgccaacaacacaggcgacaagaacaacagcagctctggcaacaacacgaacaccgataccaacaacaatgccggcaacaccggcggcaacaactccggtaacaccggcaacaccggcaattccggtaacactggtaattccggtaacaccggcggcggtacgaacaacaattccggctcttccggctccgattcaggaacaaccaccacgccctccggccgactctggcacgccaccgtagcccaggctcaggcctatgccgccggtgccgccgcgcagcgcgggtggacaggcaacgactgggattgcctggtcaaactatggaaccgcgagtcccgttggctgtggtatgccgaaaacgcgagctccggtgcctacggcattcctcagtcgcgaccagcagacaaaatggctgcgttcggcgccaattaccgtgacgatgccgccgtacagatcgattggggtctgtggtacatcgcacaaacctacggcagcccgtccaaggcatggcaacattccgaacaaatcggttggtactgatcggttacgaagcccacaaggaacacacgcttatgaacgacaccattcccgccaccggtcacctgttaggtgccgccgatatccgtcgtatcgcggccgatgccggcatcagccccaccaagaaattcgggcagaacttcgtcatcgaccccggcacggtccgtcgtatcgtacgcgaggcgggagtgaccgctgccgatcatgtcatggaagtcggccccggcctgggatcgttgacgctggcgattttggaaaccggcgccaccatgaccgcagtcgaaatcgatccgccgttggccgcacgactgccgggcacagtcgccgaattcatgcccgaagccacgtcacgactcaccgtcgtcaatcgggatgccttaaccgtcaccccggagaacgtgcctgatttcagcgatgacgcatcgtttacgctggtcgccaatctgccgtacaacgtggccacgccgattctgctcacgctgttggagcgtttcgacaacctcggctcgttcttggtgatggtgcaaaaagaggtggccgacagactcgccgccaagcccggttccaagatctacggcacgccgagcgtgaagctcgcctggtatggcaccgccgaacgggtgggcaccatcggccgcaatgtgttctggccggctcccaatgtggattccgcgctcgtcagattcacccggtatcaggccgatgacccggccgccccgggagcctcgaacagcacggccgacggcggcgcacaacgggaactcgtatttcgtctgattgatgcggcgttcggtcagcgtcgcaagaccctgcacgcggcattgaagaccattgcgccctccgaggcattctccatcgccggcatcgatccgacccgtcgaggagagacgctcaccatcgccgaattcaccgctctggccaaggccatcgaatcgtgtggagatggagatgaggcacaatgagtccggtaacctcacatccacgcccagccgctgcccgacatcagttcgatgagctctcccccatcaccattacggtggattgcccggcgaaaaccaatctcaccttggaagtgggacctgctcacgacgaatggggcggacgccacgaactggacaccacctactgtgcaatcggcgtatacgacaccgtcaccgcaaccgccaagcaacccggagcgggattctctctggagctcgaaggcgcttatttgggcgacttggcctcctcacgcagcgacatgcgccgcaaccatgcggtactggccctcttcgccatggcccaggcggccgagcgcgagccggatgtggcgttgaccatcaccaagcgcattcccgtgggtgccggactaggcggcggttcagccgacgccgcggcgaccatgctggcggtcaatcgtctctgggagctgaactggcccatagagcgcctgcgcaccattgctgccacgttgggcgcggacatgccgttctgcctgaccggtggccttgcatacggcaccggtttcggcgaacgcatcacggatatcgcccccggcagccgcgatgagctggcgctgatagaacagggattcagcggcgaagtattggtcggcgcataccagtcgcaactcagcactcctgaggtctaccacacctttgacatcgtgggagccgcagaaggcgaccgcaatcatctgcaggctgcggcaatcagcctgcatccccgcagcgggcaggccatcgacgccgccacgcaggcgggtgccagccatgcattcgtctccggatccggcccctcagtggtcgctttcgccgccgacgaggcagcggcacaacgcatcatcgatgtgtggcgcgatacggctgtggtcgatcgcattattcgagccaaatctcccgaacaccccaatatcggcgtcagacagtgacgctaaggtagcaaccagccacccgacccatgaaagaagtccaccgatgacgtatcaggttgatgaacgtgaagcccgcaaggcgtacgtgcgccaccgccagaccatcgtcttttccatcagcggcgcggtattggcagtagtgctggtcatagccctactgttcaatttccacgttttcggcctcggcgaagtggagactccggcccgccagccgaattacggcaacgcggcgccgtgcgcggtcaaggacagcagcggcaaagcgcaatacgtgtccaacgcttcggtcggcattcgcgtgatgaacggcacctctcacggccaattcgccaaggccgtgggtgaagctttggccaatcgtggattcagcgtgcagaaaatcgataactattccagcaccgacgttgaacgcaccaccatctacttcggcaagaacgccattaatcaggcgtatacgctgatcggcaatttcaccgacgccaccatgatcatgacggctcgcgaggatcagctcatcgatgtggtcatcggcgccacgttcaacgatctgcaggacaccaactcctccccgcaatccggtaagaccatcaccaatatcgagggttgcaaggccgccgatagcatgaccaagctgcccgccgacaccaaacacgacgcatacacggcgcagtaaggcgcatacagcttcatcttcgcgaaaaaccgtacgctgacacgtattcagcgtacggttttttggtatcggactagtatcggactactgaatctcggcgtaccagcgcttgagttcttcgacggccacatcgtggtccaccggaccgttatccaagcggtattccagcatgtgcttgtaggcgcggccgatcatcgggccgggctccaggcccagcaactccataatttcgttgccgtccagatccgggcggatcgcgtcgaagtcctctttcttcttgagttcgcggacgcgctcctccatctcatccatggcctgggagaagatcatcgccttgcgcttgttttgtgtggtggcatccgcgcgcgtgagcctgttcagccgctcatagaggtgcccagcatccttgacataccggcgtacggccgaatcggtccacggctcgtccacatagccgtggaagcgcaggtgcatattcaccagttctgagacgtcctcgaccagatggtggtcaaaacgcagcgccttcaaacgcttgcgggtcattttggcacccaccgcgtcatggtggtggaagctcaccttgccgcccggctcgaaccggcgggtcttcggcttgccgatatcgtgcatcacggcggccaagcgcagcgtcaggtcgggggcgggcaccgggccgtccgggccggtttccagggcgatagcacgttcgagcacaatcatcgtgtgctcgaagacgtccttgtggcggtggtgttcgtcgatctgcaattgcagggccggaatttccgggaagacgatgtccgcaagaccggattcgaccaacgcctcaaggccggcgcgcggacggtcggagagcagcagtttggtcagttcgtcgcgcacacgctcggcggatacgatgtcgatgcggtcgcgcatcgaggtaatcgcctcggccgcgtccggcgcaatacggaagcccagctgggccacgaatcgcacggcgcgcatcatacgcaacggatcgtcgtcaaaggactgtcgcggatccaccggcgtgcgcaacacgcccttggacagatcactggcaccaccgaacgggtccacgaattgcaggtcgggcacgcgcagagccatcgcgttgacggtgaagtcgcggcgggacaggtcgccctcaagcgtgtcgccataattgacctcgggcttacgcgagtccggatcgtacgtgtcagagcgataggtggtgacctccaccttgacctcggtgccgtccgggcggcggcgcatggcacccagcgtgccgaacttgcgccccatgtcccagaagccgtcatgcccccaccggcgcagtatcggctcgaactgctcaggccgtgcggatgagcagaagtccaaatcgtggctctttctatggagcagcaaatccctgaccgggccgccgaccaatgccagctcgtaaccctgttcggcgaacagtcgaccaagttcgatggcttcaggccatacttcgaaatccaatgggcaccttcccgcgtgcgacgtttttctgccctaccagcataccgttaccccacctgcacacggggttgagtaaggtggagaatatgattacgcccgccgaccttgcccgcatgctggggcaaacaccagattcggcggatagccatacccaagaccacctgctgtatacgtccgaaactccgcatcattccgccgattcgggcgattcttccgatgtcggcggcaccgcgagccactccaccaatcaggccgttcatcaagacgaagtagacgcagtaccgactgcgcaacattccggtgtgcctggcacacccgcaacgcccgccacacccgaaccatccgaatccgaaatatcggacgccgccagcgacatgcccgcaccgaagccgatgatgcccacaccggccaccgtcttcggcatgcatgccaccgtcaccatcgccactaccagcggcactatcgaggggcaggctgatggtatcgccggcgaggccggtgccgagacgattgccgaggtcgagccgattatcgccacggcacaaacgtccgtaaccatcgtcacgaacgatcccgcggcgaccgctcacgcggccgtagatgctgccgttgcggtcgccaaggccgccgccgcgcacaccacagcgataccgactccgcgcgacgtgctgatgccgcctgcggcacgtaccgcaccggccgcaacgccggtcaccatgccggtctcagcgccgtctgcagcaccagtgaggcccgcaacgtcagcgcatcccacgccggccacggtcttcggccggcacccgtccggagatgttgcctcgccggaaccggcagtgccggtagaaccggtgacgccatccggcccgactccggccatgatgccgcaacgccgtacgtcggacggtccgaccacattcgcttcactggatgcccaggaactgccggtcgtacgcgaatattcggcaggcggtctgattttcgatgaccagaaccgcgtggccattatcgcccgtcattcccgctccggccatctcgaatggtgcttgccgaaggggcatatcgaaaaaggcgagaccccgcagcagaccgctgtgcgcgaagtgcatgaagagaccggcatcctgggcgaggtgatcgattccatcgccaccatcgactactggttcaccggtaccacgcagcgcgtgcacaagctggtccatcacttcgcgctcaaacagaccggcggtgaactgacggtggaaggagacccggatcatgaggcggaagacgccatctgggtgcgttttgaagatttggatgacgtgttgagctatcccaacgaacgcaaaatcgcgtggctctacgccaggaagaagaacaggcaggcaaacgagtgaacctacccggagtcttacgacattgcacacgtctggcacacgcactggcggctggcgtcgccgttgtggcgatgctggccgctccattgaccgtctacgcgaacgatacgacggacacgactgattcatccgatacgacggacgcaacgggcaatcagaccgagaatcagcccaagcagagcattgccatcacgcaaagcacccccatcgtcacctccaaatcgggctatcgtgtcaccgcggtcatcagcaatacggacagcacggccacgtcaagcggcacactgcacctgaccaccaatgcgttgttcacctttgtctcgcgcaccgatattcagaattgggccgagaacaacacccccatcccaacccccaatgagttgggttccgttgacgtgccatcgattcccgccggcggcactgccaccgtcaccatcgaggtgaacgccaatcagcagacccttgcctccatagggagttggggaccgaaaccgctgatgctgtcgtatatcgttggcaatcagatactcgccgatttgccgagttttctgacccgatcttcggatgggctcaacaccgcgacaacaccggccatgaacctgaccgtggccatgccctacaccgccagcggctggcaggtcgataataaggccatcagcaatcgcattgccgaaaccaccacttcctcgacatcaacatcgtccaagtccaacagcacggacaaggccgacaagtccgataacgccgacgccagcaacgcggccaaagccactgatacgcaagccatatccttatccgaacaggatgccgataccgcgcgatcccttgggcagacattcgccaagcaccgctcgctgcaagtgatcgcggatcctctgtattggcgtcagtccgcagtgcaaccgtccattgccggcatcatgcagcccgccgacttcgacatcaacgcctataccgcactggacgataccgcggcctacgaaaaggccggcatcaccactgagcagtggaacgccaagcaggcggccgcatggtatgccgacggaggcgactccgaaacaccctccgcgtacgcatggcagggcaacaactgttggacgttggatgcgctgaccgcagcacgcgagcagggctatgacacggtgattgccgatgcctctttcgatgccgaccagactgaagccgtacacacaggcacctacgtggtgcatacgcctgccggcgatgtcaccgtgctgaaggagcaatcgaccttgggcacgctggccaagggccaagccaccagcacggacgcgcaggccgagtccagcgatgccggtcggttggcccgactgatcgctcagagcgcgttctaccagatggaacagccctatacatcccgatacctgcttatgacgttctcccgcaccacggaggccagctggatcgatcaggtgatgagcgccttcgagcaggcgtcttggttgaatctgacggacctgaagaccatggccaaggccgatccgtacaatgtcagcgattcggtcaatcccgacaaggccgatgatgccaacaccgccaatacccggtcggcattgagacagttggccgacagccggcatgacatcatgcgcatggccacctccatattgaggaacgagattgattccgacgaggtctcgtcgttggacccgcaggccctggcccggcaggacgccaatgacaccgcctcgcatagcaacgatccgacgcaatggattggctctttactggcgctgcatgacgatatggcgctgcggtccatgtctggctccccccagccgacagccacgcgaaaagccatggtcaaagccacgaaaacactggccagcgatcttctgaacggcgtacgcatcaacccatcggaatcaatatccgtgttcagcgaatccgcgaaaatgccaatcaccgtcagcaatgaccttccctacgccgtcagcgtgcaggtcaactcactgactgactccatgcagatcgtcacctcgcgaaccgctgacatcgatattccctcgcatagcgacgctcaggtgaccttcaccatccgcgtttccacttccggctcatcgacggcccatgtgtcgttgaccgaccgggaaggcaacagcttcggcaacacgcaggacaccgcgatcaccagtgtgatgcgcatcagtgatgccagcggcttcattatcatcggcttcgccgtgctactgggcattatcggcctgtggcggcagttccatcggaagaaggaccccgacgaatgagttcaagcgtaggtcgtaattccctgatcatggccacgggaaccgctgcttcccgtgtgaccggtcagctccgcacgattcttctcgctgcggccatcggcaccaccggattggcggccaacgcctatcaggccggttccatgattccccaatccgtgttcacgctggtgtccggcggcatcttcaacgccgtgctggtgccccagatcgtgcgcacgttgaaagaaaaagacgcccaagaacgactgaatcgcctgattacgttggccatcggcatcctattggccatgaccgtggtgatggcggcggccagccctctgcttgcccgcctgtacgtgggtagcgacgatcaccagatgatagccctgaccacctcgttcaccctgtggtgcatgcctcaggtgttcttctacggcctgtatacggtattggggcagatcctggccgccaaagaccatttcctcacgtatgcgtggagctcaaccggtgccaacattattagttgcgccggttttactggctttattctgctgttcagcaaggccaatgaacagcccctcgaattctggaccgccgacaaaatcgcgcttaccgcaggcacctggactttgggcgtggccttccaagcgctgatactgttcctgccgctggcccgtatcgggttcaagtacaaacccagcttcgggcttggcggctttggactcaggtctatgggtcccgtggcgttaggctctttgggcgtggtgatcaccagtgagatctgcggcattatccttacccgtatcgccacatccgcaccgcagcgcgcccacgaactgacgggtgccagcctgttcagcgtggcaggcaacgcgacctatcagaatgcgtacacactgttcatcctgccctattcgctcatcgccgtatcggtatccacggctatgttccccaaaatctcccgttctgtcgcagctgcgaatctggatgaggcacggcacgatctggtgagcgcgctgaacaacgtagggctgctgatcatattcttcgccgccgccatggtcgtgttccccgaaccgatcatccgcgcattgcttccgtccgtctcgatggacgagaccatgctgatttcctacgcgcttatcgccctatctgtgggcactcctttgggatcggcgttcctgttgatccagcgcacgttctatgcctttgaggacggcctgcaccccttcttgtccgcggtgatgcagtatgggttcacctcggtattcatgatgattggcatgatggtacttcctcctgagcattgggtactcggcatcgcctgctcggtgacactcggcggattactggcgttgccgctgacgttgatgatgttgcgccgcaagttcgaaggcaatcttggcggtcgggagatcacgaggacatatgccaaggccattgtggcggcactggcttccggagttgtggtctggctgatcaaacgaccggtagtcgcactgttcggcgcggatattcgatcggtaggcgggcacatgagctggtggtctgcgctggccatctgcgtggtgctcaccatcgtgctggccgtagtatatgtggctgtgttgtgggtggtacgcaccccggaactcatcagcgcctatcactcgatactggcccgtctacacaagactccggccagtgaggacgttgctgtgacagcccagccggaaaaagtcgacgatacgcaaatcaatcctgagacggagcccgtcaaggatagccccacacgtagaatatctaagaccagtctcgaacaccaatcacacggagccgaacgcactatgaaaccgcaactcggagacacgattctcaaccgatacaccttggtatcatcgttgcgtgaggagcctggcattcaggcatggaaagccaacgaccgtgtgctggcaaaggattgccagctgttcatcattaccaatcgcagcgctttcgccgcaatcgatgagctcgctggtcgcatcgccgccactcgccctgatcgtgtgattcccgtactgaaataccgtatggaatccgacgtacttctcattgtcatgccggtggacagcggccaatgcctgactgactacatggtggataccgacaagccgctcagctacagcgccatccggtcgattatcggagaatgcgccaacgtgctgcgcgaggtcattgcggatactcccagcagcatcgtcatcacaaccgacaccgttcgagtgactacctccggtgtgcagattgccgatgcaccatgtgccacgatgctggccgacacgtccgctactgatctgcgtacggacggtcctgaacggtatgcgattcgccagcttgcggcattgctctatgccctgctgacacgcacgccaagccaagcgacacccacattcaatctgcgcgccttgccgcaagatacccctggcgaattccgcgtgatttgcaagcgtggattggccttaagcaagcccgacgagcacacgttgccgatggctgcccttgtagaactcgacgccttgttgggtaattggaagccgctctctgaactgagcgatgctgatatcgctttgccgagcgtggaaagcgattgctcgattaccaaggcgatactgaagcccgccaacgagaccgatatcgtgcctattcccagcacgttgattaacagcagcagtcttccggaattgtctattgccccttccctgccggttcagccggccgccgtccccgctccgcacgcgatgtcaccggctcctctgcctgatgggtccagtactgctgacggcaaccagtctcaatctgacgcccgccgtctgtttgacttcaacctttctgacgcctgggagcacgagaatctttccggtgaagacaccggtgactggtacagcgaaatgaatccggcccccatcggcggtccgggtgataatactcggttgacggtgcctattgttaccggcggtatttccgatgccaccgtgggagagacgaccagtcgtattcccgtgttcgatgtcagcggccgtgctgtggcccccggtgaggaatcgctgcgtgccttggaagaggagcaggcccgcattgccgaagtaagcgccattcctccgagcttcacaccgaaggatgtgccggatgacgaggatgacagcaagctgcccgatgaacatctgttcggcaaactgtcgaccaaggtcgttgccatcattgtggctctgatattggtagtggcagcggctgtttgggcagtgcatgcgttccgatcctccggagacaatcctgccgatgcttccagcaactccagtgaaggtgactggcccgatatcaatgctgacgctgtgccattcggtggcagcaagaacgcgacgaacggtggcgccactgacgattcctcaaagtcgagtgatgccactcagagcgaatccagggactcggcatcagacaagtccaagaagtccgagactgctgattcgtcgtccaagaagaccaaggccaagaagtccggcgataaggattccagcgctgctccgcagccgcgccatgagaacaacacggcgtttacgatttccagcgccaacttcctgtcgaatcctggcggccaatccgggtacgcatactacatgcaccttgaccagccgcaggatgcgtaccgcatggttatcaccatccgcacatccggtggtaagggctatattcgcgcaaataccactggagaccccactcagggcgagcaggtggccgaattcacctttgctgaaggtggcactactgaggtgaagttcaccaaagccgtcaatacgcaggatctgctgctgtgggtgccatcgggtagcctgccgcagaaccagctgtacatcgagaaggtggaggtcttctaatcggcatctataccgataactgacccaagaagggcggtaccgttcgcatacattcgacggtgccgccctttcttcgcgtctggctgaatgacatggaatatcgtatgggggtgtgacaatgtttcacgtgaaacataacgtcatcattatcggttctggtcccgctggctacacggccgccatctatcttggccgtgcaggtcttaatcctgttatggtcactggtgcgttgtcgccaggtggacagttggtcaacaccactgaggtggagaacttccccggattcccggaaggtattcttggcccggatcttatggatcgcatgaaggaacaggccaagcgcttcggtacaacctatatcacagacgatgtctcttccattgaggcgtgtgagagtgattcggtcaagccgacctatcgtgtaacgctctccgatgactcccagttggaggcatcagcactcatcatcgccacagggtcgtcattccgtaagcttggggtgcccggcgaacaggagctgtccggacatggcgtctcgtactgcgccacctgcgatggcttcttcttcaggaacaagcctatcgtggtcgtaggcggtggcgattcggcttttgaagaggcattattcctgacccggttcggttcttcggtcaccttgattcaccgacgcgatagcttccgtgcctcgcagatcatggtggaccgagccaaagccaatccgaccatcaccctactgaccaacacagtggtgacctccattaccggcacctcctcccccacacagaacaccggtgcacctattgccattcctggcttgacaatcaaacgaccggctgtggcaccggccagtgtcagcagcattgccgtacgtaacgtggtgaccggagaagaaagcacgctggacaccaacgccgtattcgtggctatcggccatacgccagccactgattttgcagctggtgttgtggaccgtgacaatgatgggtatgtcgtggtgcagggtgccagcacggtgaccagtgcgccaggcatctttgctgcaggcgattgcgtggatcgtacttatcgtcaggcaatcagcgcagcgggcatgggctgccgtgcagcgctggatgcgcaggcctatcttacggactgattgcggcgacctgatgatggcttgctgttctgactgctgcctgtgacataggagcagcgctaggtcagtgttacagcatgccgcccttggatagtacgcaccggtcaaaggcatagaaaggcccctcaggcgacggagaatcacgatgtgtgatttgtcatcctccagcctgaggggttttctattgcgacaggggctacaacgcaggcatacgcccctgccaggaatcacgcagaggctataacgtcttgcgcgtacaacgcactgcacagcaataatgccggcgacagtgacaagccgatacaatgccaagtgacaacgctaagcatcggtgttgtcactgacgatgccggcgacaacacgaatgttcttatcgtgttacacccatttggaatcggcatcgccttggctcggcaccagcagctgcaggatgcgatccatatcctctggtgacgagaagacgatttcgatgcgaccatgcttggtgctgcccttaatcgacaccttggtgtcgaaatgattttccaaactctgctggatggcggaaccaacccaaggattggtcttggacgtcttgggcttcttcggctgctcccccgacgcaatcttcatggcgacgatttcttcggtgctgcgtacagaaagaccttccgcaataatacgagaagccagcttgtccatttcctccggatcgctcaggcccaatagcgcacgcgcatgaccggacgatagtacaccggcagccactctcttttgcacagaggccggcagattcagcagtcgcaaggtattggcgatttgcgggcgagacttggacaccgacttggacagttgtacttgtgtcaacccgaactcttcaatcatctgctggtaggcagccgcctcttccagcggattcaaggccacacggtgcaggttttccagcaatgcatcgcggagcatatcatcatccgcagtggttttgacgatggcgggaatcgtctccaacccagccaactgggatgcacgccaacgacgttcacccataatgagctcatacgggctgtccaaatgaccggcaaacggatttgtgctggattccgtctcgtcgtgcttggcggctttggccgcagcaatctggcttgccggacgcttgcgcacgactatcggttgcagcacaccaacttccttaatggaagcagacagctcattcaactcatcctcgtcgaagatggtacgaggctgatgtgcattgggcccgatatcagacagtttgagttcagccagataaccaccggctaccggcttgagctcgtccttcttatctgtgtcagcggtctttgccgccgatgcagtctgagatgtttcacgtgaaacatctttgacggtgacggatgtacgatgtgccgtctgagacgcagacggcttgccgccctgctgaggtgcggcgaccttaccggtttgaggtttctccgtaccgaaaaacaggtcgctaggatgagtaatggtgtccaatgcgggcatggacgcgcgtttaccggcggctttcttggctgctttgctggacgataccatctgaggcgcggcaggctttgattcctgctgggcagtagccttcttggcgggggttatgtcagcagtggccgccggagtagacgaatcctcctcaatcattgcgggctgctccgccactggctcctcccctggcaatgtggggaacaaagcgccaaggcccttaccgagtcgtgattttgatgccattacttgttcctcctcgcatcaatggtgtcaaggacttgttgcgaacgctgtgcgatttccaaagctgcttcaccatacgatatggcacctatgccacgaggatcataggcaatcaccgattgggagaaactcggcgcttcggagatcttgactgaacgcgggatggtggtattcagcacaatgctgggatagtgtcccttgacctcgttatatacttcacggctcaatagcgttcggcgatcgaacattgtgacgagcatggtggacaccagcagtactggattgaaatgctcctgcaccaaaccaatcgtgttgatcagctggccaagaccctccaatgcgtaatactcagcctggataggaatcagcatctcggtcactgcacacatggcgttgatgaccaagaggcccaagctgggcgggcaatcaatgaacacgtaatcatagtgtttatctgattgacgcaggtagaggtccaaggcctccttcaacaatgtgtttcggttgggcagatcagccacttccaactcggcaccgctgagatcgattgatgcaggcacaacatcaagtgtgggaaaatcaggacagaccgtgataacatcacccagatcggaacgcccctcgataacgtcatagaccgagggctctcccgatgcatgagatacacccaacgccgtagaggcattgccctgcgggtccatatcgatgaccaacacctgcgcgcccttgttcgccagcgccgcagcggtgtttaccgtggatgtggttttacccactccccccttctggttggccacggcaatacgacgggtacgttgaggtttggggaaatcggttttcttgagtacatcgtagcgtgagctttcatcagccatctggctgccaagcactgaaccgtgaccatcgaatattcgctgaagcgtttcggaagccgattctataggttccgactgatgatccttggtggacatcgctcctccttgcacagacgtaagttccagtgttctcattcgtatggacatgatgctcgttatccacaattgcgatatgcaatgtggataagtgtggataagtatgaatgacgttgagtgttagattatgtattcgcagacgaaaaacattgaaaaatcagtgttttcatcattctgcacatcgtcccgtaaaaatgtggataacttttacgcacataaggaaatgtggataactcaatcagtactccactcatcgcttatccacaatcaccacgtgggtaggctcaagatccggtccgacagccgcctcaacgacgcgtggacgacgaccaccgaattttgcaatctccttgccagccttgtcgatttcagcctgagcagaccgtcccttcagtgcgatcaactgtcctgacggtttcagcaacggcaacgtccagccagagagtttggtcataggagcaaccgcacgacacgtgacaacagcgaacggatgaatttcccgcttccgtacctgctggatgacggcatcggagcgtccacggataatctcaacgttctgcagttgcatcaggtcaacacattcatgcaaccattcgattcgccgctccatcggttcaatcagcgtgaagtcatgatcaggcaaacacgcggcagccaccaatccaggaaaaccaccaccactgccgacgtcggcaactgttttgaagcgaataccattcgtcacattccgaacgtacggcacaatcgcagcggaattcagaatatgccgttcccaaatgatatcgacgtcacgggggccgattaatccacgaggttcaccctcttcggcaatcttggcatggaaacgctccaacttcggcaacgcatcacccaagacctcagcaagtacaggtgacccctgcagctgatccgtcatagccatctccctcaccatgtttcacgtgaaacaatcaacatggaaaaggcgtcgctcattacgacgccattctccctacggtcactcttgtttgtttagagacgacatccgttgaacgtccttgtcatctcaaaaactcgtcgacctattactcctgatcaagctcgtcgtcttcggcaacatcctcgattttgttcttgagatacaccgtcacgtaacgatgaggctcctcaccgtgcgagcgagacttcagcccctcttcccgaaccacatcgtgaacgactttacgttcgaaggaattcatcggcttcaaatcatacggctcgccggaatccttcactgcgtcaatggcatccagggcgatatcacggaggtgctgacgcttgcgcttcaggaaaccgtcgacatccacaatcagatgagaacgctcgccggtcttctgctgtacagccagacgagtcaattgctgcagagcatcaacgacttcaccattatggccaataagatgtttgatgtcggtatcgtcatcagcaacgatttgcacggtggggcggtcattacgcacgcccatctcaatgtcgccctcatagtcggcgatatccagtaggccttcaaggtaatccgcagcgatgtcagcctcttcgttgagctgatcgatcgacttcacgtcatcctgtgccatacgctactccttcatgtcgtgtttgaattccaagtctaagccctgctcccccgaacagagaaagtaatgtcggtgcgtgttgaatgtttcacgtgaaacatcgaacgcgcaccgacatggtcgtcacttctttttgcgcttacgcacgggctgttgacgctgatagccctgagtggccttacgctcagcctcttccttggccttggccaatgcttcttcttccagagagggcaggccggcctttgcgcggcgagcattctcattacgatgatcgcgcttctccttgtccgccgcagccggagagccaggggtcgggaatgcatacacctgccacagcgtacggcacaagttgcaaacgttgttggtcagccagtacaccaacacggcgaacgggaaggagacacccgagaagatgtacatcaccgggaagagccacagcatagccttctgcatggtctcggtctgcttgttcatcgaagcagctgccatgttgcgcttcatgttgatgtactgaatgagccacaagcagaagcacatcaggaacacgaagataccgatgaccaccttgcctgcagtagatgcgcgggtgaagttatcggtcacactgacaatgccgaacacatcggtttgggtgaattgcttggcggttgctacgtcgaacgcgcccaacgcatcgcgtttaccgttggcaatgtatggaatggccgacagcgtatagaacatggacatgaacaccgggccctgaatgagcataggcaagcaggagccagccggattggcgtcattgtcttgatacagtttcatggtttcacgactcatggcttccttggacgcctgatccgtcttacctttgtacttgttctgaatgcgctgcatcttcggtgccaatgcctgcatcttgcgcatcgacttcatctgcttgtagaacagcgggaagatacaagcctgcaccaccagcactaggatgataatggcaagcacccatgagacaccaatcgggctcatgcccagcatcgcgaagaagtcatgcacgatcttcatgatccaggtctgcaaccactcaacgggagtcaggattttatatagaaatccccaaaacccgctatcaagcagaaattcatttgagttcatcgttgggcctctctttgggttgtggccaatggtgtcagtcggggctcttcatgagccttcgaccacgaaaatctgtaaaaaatggaataccgttgtggaacatcgtcgattcccccacgactccacggccggcaacgcagtaatctcagcatggcgagcactccccctttgaacgcgccataccgttccaatgcctcaatggcataattcgagcacgttggataatacttacaacaaggcggtgtgtttgccgagatgtgctgttgataccagcgcaccccaccaatcatcaccgccttgaaagaagctgtcatgcctcagccaccttatgcgccactgtggcaaaagccttcgcgatctgctgatctagcgaagcgaacgatgcggtcgcggcactgggcttggcgcgcaaaacgatatcgcaatgcgcgggcagcagatcctcatgggctctggccaatacacgaaacctacgcttcaccgtattacgggtgaccgcatgtcctaccgatttggagacagctaatcccaaacggcgatgcaccgtccggtcgtcatcatcatgatggtcgtcgggcaccaaatagtgcacgacgatatccttgccacctgctttgcgccggcgtttcagcacggtgacgaaatcacgatggctttgaagccgctccacctcgactatgcctgtggcactgatcggaatgatcaggcggagagggacttgcggcccttggcacggcgacggttgatcaccgcacggccagaacgggtgcgcatgcgcaggcggaagccgtgcttcatgtggcgacgacggttgttcggctggaacgtcctcttcataatccattgctcctaggtctattcggcaacgcttcgcgctgccctcacgtgagtcaagctataccaaagtactctcacccctaccctcaagtcaaaacggacggagtattttcacatttcgacacgttgcgagacacgcctcaaatctcttataatcggcggaataccaaccattcacggccaaaagttatccacaaattacatgtttgttattcacattccagttatttcaacacgcgacacggtggataacttgtctaaaccagagtaaatattatctgttgtacagatttcgccacaccgatagaaggggccaccatggttaacgcttccggcgaccccgtaatcgaggccgcccacatctggtcagacacgctgacggtgctcaaacacagcgcttcgctcagcccacgagaaaaaggctggttggaaggcgttgttcctgaaggcgtcttcggttcgaccatcgtgctgtgtgtggacaacaacgatacgcttcaagccattcagggtgatttgaacgattccctgcttcaggcattgcgtacggtaaccggcgaaaatatgtttcccgcgttcaaggtcgtgccgaaaaccgagcccgaaccgctttcggcggcaaagccggcgcagccgtatccttcggaaatttctccgaccgtcgccgagttcggtaaagaatcctatggtgcaaagccggtagccgcaccgcgggaaccgatgcccgccaccgagtcgcagttcccggtcggtcagcagaagatgaatcgcgatcccgagactcatctcaataagaacttcacgtttgattccttcgtgcccggcgattccaaccgttttgcccgtacggtcgcactggccgtggccgaaggttccggtcaggatttcaacccgttgtgtatctatggcggatcgggcctgggcaaaacccacttgctgaacgccatcggcaactatgcactggtcaaggatcccgggctaaaggttcgatacgtcacgtctgaggaattcacgaacgaattcatcgacgcgctgcaaaacccgaaccaaagccagggtcagattgctgaattcaaccgtcgataccgacaggttgatgtgttgcttattgacgatatccagttcctcggcggcaaggaagccaccttggatcagttcttccatacgttcaatgcactgcatcaggcaaataagcgtattgtcattgcttccgatgtggcacccaagaatttgaagggtttcgaggctcgactcatctcgcgcttcgaatccggcctgaccgtagacgtcaagccgccggatctggagacccgaatcgcaattcttcgtatgatcgcctcgatgaacggttcgaaaatccccagcgatgtgttggacctcatcgccgaacgcttcaccgagaacattcgcgaacttgagggcgcgcttacccgtgttacggccgtggcctcgctgagtaatcagccggtgacccgcgccttggccgagcagacgttgcaggacttcttcaccaccgatgtggaaatcaagcccacggacatcatcagtcaggtggcgaagtacttccacctgacgtttgaggatcttgtcggtaaatcacgaaccaaaaacgtggctgttcctcgtcagatcgccatgtatctggctcgcgaaatgaccagtatgagcctgatggatattggccaggtctttggcgggcgcgatcacaccacagtaatgcatgcctgcactcgaatcagtgaccgaatgcagcaaaaacaggagatctataactacgttatggagctcacggttcgcctcaagcaaagcaacaccaactgacacaacgcttctgagagacgaaaaacggcacttttcggaaagtcagtccgaaaagtgccgtttttggttgctcaggcggattctggtggatacgtcgaggcaacggattcgagacatcagattcctcatggctcccctttgtgaggagagctgtcgtcgcagacgactgaggggagtttcgaaggggaacacgcaaaaaacccatgaaacgagagaatcgattctgaggaccgattttgcgggtttgggcgagcgagacgaaaaaagtgccgaaaacggtctccagaatcgattctcctcgacgaaaaacagccttcaacacgccgtgcgaaagtacgaaaaccaaaaaagttatccacacagttgtgcacagatgtgggtaaactcggcggataactcgtggattacccactgttttgttgtggaaaactcgtgcataaccgcgacctcgatgtggaaaactcaaattcgacgaactggctgtggaaaactcgcccacttatccacaagccatgcagaatttgtccacaattttcagggacttatgaaccgttgcatttgtagggctcacccctacttatccacactatccaccggccttattacgacgattacttactcagttacgtgaaaagcatcatcgccacagtaacagccagtcacccatcgtacgtaagttcgccacctaacggctagaatatttctcagccaatccgacgaagggaacaatcacacatgaaagtcgaaatcgatactgcagccctggccgacgccgtagcctggacctcccgagtcatcgacgcacgtccctccaacccgattctcgctggtgtcaagctggaagccattgacggaacgctgcaattctccgccttcaactacgagatttccgctcgccaccacatcgaagccggcgttgacgaagccggttccgtactggttcagggcaagctgctggccgatatcaccaaatcgctgcgttcggagaaaacgtacctggtcaccgacggctccacgctgaccatcacgtccggcaagtcgaagttcaccttgcagctcatgcccgacaccgagtacccggatctgcctgtggtaccggccatgctcggccaagtcgatgccccgactttcgttcaggcagtgaaccaggcatgcgttgccgtctcccgcgaagaaaaccgcccggtactgaccggcgttcgcatgcaattccaaggcgacaaggtcgtcatgacctccaccgatcgcttccgtttggcccgcgccaccttcacttggactccgcagaacccggacgtcgacaccaccacgctggttcgcggctccctgctcaaggatgtggcccgtactcttgacgagcaccagaacatccgccttgatttcgatgccgatagcccgacgctgctcggcttcgaaaacgccggccgcgtctccacctcccagctcatcgacggtgaattcccggcggtcgaccgcctgttcgccgacgaatacccgattcaggccgtagtcaacaagcaggatctgctcgacgccatcagccgtgtggctttggtcgccgaacgcaatgctccgattcgcatgaccttcaccggtcaggaagtggcgctgtccgccggatcggtcgacgaggcccaggccaacgaaacactggacatcgacatggatggcgacgacatcaccgtggcattcaacccgtcctacctgaaggagggtctgtccgccgtgaccgaaccattcgtgcgcatcaagatgacgaccccggtcaagccggtcgagttcaacggccagcaggaagctgattccgacgagtccatggactaccgatacctgctcgtgccgatgcgcttcaacaactgagatccctgaatttccaacgattcgctaatgcacatctcccgtctcgcactcgaccactaccgctcatggagtcaagtagtggtcgatttcgtaccaggcgtgaatatcctgttcggcaagaatggcttgggcaaaaccaatctggtggaagccgtcgaagtgctgtccaccggatcgagtcatcgcacgtccagcacgttgccgctgatcgaacgcgggcagaccacggccaccatccgcgcgaacgtcgctgatgatgccggtcaaaccactacgtatgaagcgtcgattcatgcgcgtggtgccaaccgagcccgcatcaactcggggtcgtcgctgtatctgcgcgatatcattggcaagattcccagcgtttccttcactcccgaagatcagcgattggtgtccggcgatccgggagcacgccgcgtcatgatgaatcaggctgcggctctgctcgagcccggatacatgcagacgttgcaacagttcacgcgcatcgccaaacagcgtgccacattgttgaagcaattgaatgccaatgccaacaatggacagccgatggatgcggttctgagcggtttggaaatctggaccggccagttcatcgaagccggtgtggcgttgacccgtatgcgcgctcatgtgatcggtcttcttgccgagccatttgccgcgatttacgccgacttggccggtgccggcgagcaggtgacgctcacatatgcgccttcattcgacgaagtgctgatgttcgacgatccgcatccgcagatcagcgagcattttcaacgcatctaccccggtgaaatggctcgcggcgtgaaccttatcggtccgcagcgcgatgacatgaaccttgagttggccggtattcccgcccgcgagttcgcttcgaacggcgagatgtggacgatggcgttggccttgaaaatggcattgtttgaaatcgtgcgtgaccggttgggattgcagccgattgtgattctcgatgatgtgttcgcccagcttgacgacagccggcgcacgcagattcttgatttcgccagaaaacaggatcaggtgctgattaccgtggccgctgaaggcgatgtgcccgactatgaatcggcccatcgtatcgacgtggccacactggccgaacccgcttccgtaatactgccaactctgggcaatttgtccgattcgcgggaaaacgagagtttgggtaagtatgacggaaaacccgaggtggacagcgcgtccgtagaacggaaagtgtcatgaacccgccgatcgcccgccaactcaacctggacgagaccaaactgccggccgaaatattcgagcggctctcccgtcgcggggcgaccttgaaggactacagacgccgccgtgaagaggccatcgaaaacttcggcaaaccggggcgcgatccggctgaactgggcagcgtgatgaccaccatcgccggcaatggcgtctgggcggcgaatatgaaacttgcgcaattgcgcaaccattgggaccaagtggtggggcaggccatcgccagccattcggcagtcgccgatttcacggacggcgtactgaccatccgtgccgaatccacggtctgggccacgcagctgacctaccttatcccccaacttaccgataccatccgtcgcaatctcaaaggattgaccatcgccgagattcgcgtgaccggaccggccgccggatacacgcgcaaatgggctcggcggcggtagccaagataccaaacaaattcgcagaagcctcgctatggcgctcgtcgggttagacgagtaaaatcacatgcagtatggtcaaatggccagaagagccctttacgggcctcgtaagccatatcgcctccgtgaatgaccttcatgacggaggttgaccctgtagtcacggaaggaagcctgttggcagacgaaaccagcaaagaggagcagctgaaggcggctgcggaacgcatcaacaatgcggaattgaccgaaggcgaacttgacgaatccatggcccccgagcattatgaggcctccgatctgagggtgctcgaaggactcgaggccgtgcgtatccgccccggtatgtacatcggttccaccggcccgcgcggtttgcaccacctggtctatgagatcgtcgataactcggtcgacgaggcgctggccggatacgccagccatatcgaggtcaccattctgccggacaacggcatccgcgtggtggacgatggtcgaggcatcccggtcgatgaggtgcccggcgagggcgtctccggtgtggagaccgtgatgaccaagctgcacgccggcggcaagttcggcggcggcggttatgcagtgtccggcggtctgcacggcgtgggtatctccgtggtcaacgcactctccacccgcgtggacatcgaagtgcgccgtcagggcttccactggacccagacgtacatcgaccagcaccccaccgcacccttgaagcagggcgagccgatgaccgaaggcgagtccaccggtacgtccgtgactttctgggccgacccgaagatcttcgagaccaccatctacgacttcgagacgctgcgttcccgtttccagcagatggccttcctgaacaagggcctcaagatcagcctgaccgacgagcgtgagaatgaccaggccggcgacgaggtggccggcgacgccgcggacgagcccggcgcaaagcaccagaccgtcacctaccagtacctcaacggcatcaaggactatgtcgactacctggtcaaggtgcgcaaggccacgccggtggaagaggacgtcatcagcttcgaggccgaagacctgaagctcggcatctccgccgaactcgccatgcagtggaccaccgcctactccgaggccgtgcacaccttcgcgaacacgatttccaccaccgagggcggcactcacgaggagggcttccgcgccgcgctgacctcgctggtcaaccgttacgcgcgtgacaagggcatcctcaaggacaaggacgagaacctctccggcgacgacgtgcgtgaaggcctgaccgccgtgatctccgtcaagctcaccaacccgcagttcgaaggccagaccaagaccaagctcggcaactccgaggccaagaccttcgtgcagcgcgtgatgaccgacaagctcggcgactggttcgacgcccacccgaacgaggccaagaacatcatccagaaggccatcgaggcctcccgcgcccgtctggccgccaagaaagcccgcgagaacacccgccgcaagtccatcttcgagtccgccggcatgcccgacaagctcaaggactgccagtcctccaacccggaagagtgcgagctgttcatcgtggagggcgattccgcaggcggttccgccatccagggccgcaacccgatcacgcaggccatcctgccgctgcgaggcaagatcctcaacaccgaacgtgccagcttggaccgcatgatgaagtccgacaccatcgaatcgctgatcaccgcggtcggcggcggctatggcgaggacttcgacatctccaaggtccgctaccacaaggtcatcatcatggccgatgccgatgtggacggtgcgcatatcgccaccctgaacctgacgctgttcttccgctacatgcgtccgatgatcaccgccggctacgtgtacgtggccatgccgccgctgtaccgcctgaagtggaccaagggcccgcacgacttcgtgtacaccgacgccgagcgcgaccgcgtgctcgccgaaggcaaggccaacggacgccagctgcccaagggcgaaggcatccagcgctacaagggtttgggcgagatgagctaccaggagctgtgggagaccaccatggaccccgagcaccgcattctgaagcaggtgcacatcgaggacgccgccgcggctgacgagaccttctcgatgctgatgggcgatgaggtcgaaccccgccgcctcttcatccagcgcaacgccaagaacgtgcgttggatcgatgcgtaacggaatcctccaacctccctcgtcagagggaggtacacaacggacttagacaactaaaggaacaacagtggcagatgaaaacaacaccggcgacgagcagttcacgccggacggctcgatggagccgttgagcccgcaggaggcggacaccaccgactacggcctgatggacaccggcgaacgcatccagcgcaaggacctgcagcaggagatgcgcgagtcctatctggcgtatgccctctccgtgatcgtcgagcgtgccctgccggacgtgcgcgacggcatgaagcccgtgcatcgccgtgtgatctacgcgatgtacgacggcggctaccgccccgatcgcggctacaacaagtgctcccgcgtggtcggcgacgtgatgggtaagtaccacccgcacggcgacgtcgccatctacgacactttggtgcgtatggcccagtcctggtcgatgcgcaacatgctcgtcgacggccagggcaacttcggctcccccggcgacgacccggccgccgccatgcgttacaccgaatgccgtatggccccgctggccatggaaatggtgcgcgacatcgacaaggacaccgtcgacttcgtgcccaactacgacggcaagacccaggagccgaccgtgctgcccgcgcgcttcccgaacctgctcgtcaacggctccgccggcatcgccgtcggcatggccaccaacatcccgccgcacaacatgcgcgaggtggcggacggcgtccactgggcgctcgaccacccggacgccagccgcgaggaactgctggaaaacctgatccgcatcatcaagggaccggacttccccaccggcgccaccatcctcggccacaagggcatcgaacaggcctaccgcaccggccgtggcctgatcaccatgcgtgccgtggtcaacactgaggagatcaacggccgtatgtgcctggtggtcaccgaactgccctaccaggtcaacccggaccgcctcgtcgtctccattcgtgaggccgtgcgcgacggcaagatccagggcatcgccgacatgcgcgacgagacctccggccgtaccggccagcgcctcgtgctggtcttgaagcgcgacgccgtgccgaaggtggtcctgaacaacctgtacaagcactcccagctgcagcagaccttcggcgccaacatgctggcgctggtcgacggcgtgccgcgcacgctgagcctggacgccttcatccgccactgggtgaaccaccagctcgacgtaatcgcccgccgcaccgcgtacctgaagcgcgaggccgaagagcgcgaccacatcctgcagggctatctcaaggccctcgacatgctggacgaggtcatcgccctcatccgcgcctccgaagacaccgacaccgcccgtacgggccttatggggctgctggacatcgaccaggtgcaggcggacgccattctggccatgcagctgcgcacgctgacccgcatgaaccgcgacaagatcgtggccgagcatgaggaattgcagcgcaagatcgccgactacatcgacatcctcgccaagccggaacgccagcgcaagatcatcggcgatgagctcgacgagatcgtggccaagtacggcgacgaccgccgcaccaagatcctgccgttctccggcgagatgaacgtcgaggacctgatcgccgaagagaacgtggtggtcaccgtgacccactccggcttcatcaagcgcaccaaggccgacgaataccgcgcccagcaccgcggcggcaagggtatcaagggcaccaagctgcgcgaggacgacgtggtggatcacttcttcctgacctccacgcacaattggctgctgttcttcacgaacaagggccgcgtctaccgcatcaaggcctacgagctgcccgagggttcgcgcgactccaagggccagcacgtggccaacctgctgcagttcgcgcccgacgagaccatccagaccgtgctgtccatcccgaactacgaggtggccaagtacctggtgctcgccacccgttccggcaaggtcaagaagaccccgctggccgagtacgattccccgcgccaaggcggcctgatcgccgtgcgcctcatggccgacgagaacggcgagaacgccgacgagctcatcggtgccgcgctgtgcaacgccgaggatgacatcatcctggtctccaagctcggcatgagcctcaagttccaggccgacgacgagcagctgcgtccgatgggccgccagaccgccggcgtgcagggcatgaagttccgtaacgacgacagcctgctggccatggatgtggtccctggcgactccgacaaggacctgttcgtggtgaccaacgagggcttcgccaagcgcaccgccatcagcgaataccgtctgcagggccgtaacggcttgggtatcaaggccgtgcaactggtcgagggccgtggtgccctggtcggcgcgctcgtggtgtccgaagacgatcaggtcatggccatcatgaagtccggcaaggtgattcgttccaacgtggacgaggtcaagcgcaccgggcgcaacacccagggtgttaccttcgccaagcctgacaagggcgacacgattctctccatcgcccgtaacgaggagaaggacgagcccgaggacagtggcgatgccgcggcgaacggcaccgccgagaccgcacaatccggcgagaatgtgaacaacgcggacgaggcgtgagcagcgtcctgaaaagctggtagcctcgcatacagcagaggctaccgccaagcctgttaaggagaaacgatgagcgagaatctcgaagacaacgagccccggatcataccgccggcagtcggcaatacgcagaacgatcatgtcgagccgctgatcggtactgagcacgctccccgcgtggcacgctccgtgtccagcgatccggaagaatccacgttgccttcttcaggtgccgccactcccgtgcgtccggcacctcgccgtagcgcccccagggctcgccgcatgagcttgtcgctgacccgcgtggatgcttggtccgtggccaaagtgacgttcatgctgtccatcgccgtggcgattattcaggtcgttgcctccgcgatcgtatgggtgctgcttgatgtggtcggtgtattcagccagattacgcagattgtgtcttccaccggtcttgatgcaggcggtttcgatctcaagaacgtgttgtcccttaccaccgtggtctccggcgtcaccatcttctcgattgttgaagtggtgatcttcaccctgctggccaccattgcggcactgatctacaacgtggtcagctcgctggtcggcggcgtgcatgtcacgctcggcgacgactgatatagctatactggcagaactcccctcagtgaaccgcaccccggttgttggactgaagtaattcagattcgatgatcggaggtgcggtttcttatgtgtggggttcgtaggcgtcgttgctgggccgagacttgggactccggcgacgctgggggtggcaggcgtcggtgttgggacaggttttgtatctctgacgacgctgtggagggcttaccgtcgtcagcggtacagatcttggagttctgccgatgctgagggtgtgttctgtgtcgtttgcgtccaattcttggccctctgccgacgctgggcacagcaagcgtcgttgctgggccaagttttggactgccgccgacgcagagaatgcacacagcggtgttggtctgccagcgtgtggcagcttggcgccgttgaggaaggtctatgtggtgtggttccgccaaaggactggcaggttggcgctactgaggggactttatgggctcttccggttttggcgtgtaggggccgtgcggtttcattcactttttcaatcacacaccgaatcaaaccgcacggcccctacgcaccaaaatgcgaagagccggtttcgctaactagtgcctatatgcctgcaatcaggctgatttgtgctgtcaggctggctggcgtcagcggttgatctgccgatgttgctgctcgtcagtctggactgttgggctttcgttttgacagcggaaggaagatcctcctcgcggtagggcaacaattatcagtatcataattaaggtaatcgtgattacattaaccatgatactcttattattgggcggtaggcggatcggagggctgcaatgtttgtcgcacgagagcacgagttacaagtgctggaaaagctgtttaccagcgattcgttcgaaatggtggtgctgtacggtagacggcgtgtagggaaaacggcgttgatcgacgaatttgtcaaagataaacgcgtgctgtacttcacggccatacagcaaagcgccaagatgaatcttgaagatttctcaagagcggcattgtcgttctttggtatgcctgattccaccccgtcgtttggcgggtggtctgatgcgttatcgtttgttgctgaacgtgctgcacagactgacgaacgtatggtgttcgtattcgatgagttcccttatgcagctgccgccgagccagcattaccctccatgttgcagatagcaattgaccatggattcctcgccacaaaagtgacgatgattctatccggtagtaacgagggattcatggaaaacgacgtattggggcgtaaaagcccgctatacgggcgtcgtacagcacagattcgactcctgccattcgactatgcggatgcggcaaaatttctaacgaacacatctccgcaagaactggtccaatactatgcgactttcggcggtacgccatattatctggcccgtatacaggaagccgatggctttgaatccaatgtgctgcgcttgatgttcgacaacttgggcgtactgcgtgaggaacctatgatgctgttgcgtcaggagcttcgtgaaccggcatcgtattattcgatattgcaatctattgcgggtggtaattcctcgccaaagcttatcgctgaacatgcgggtgtcggatctgattcgattggagcatatctgaaaacgctggtcgatttgcgcttaattgagcgaaaagtgccgtttggtgaagatccgagtaaatcgcgcaagggaatgtatgtggtgagcgatcccttctttgcatattggttccgctttgtggggcgcaacatgagcattttggatggtaatatcagcgaggaggttacgagcagactcgcttttggaccagcgtttgatacctatgttggtcaacaatttgagacgatttgcctgcaatggcttattcgaaacaacgctatgggcaacctcccctttgttgccactcagttcggcaaatggtggggcaatgatccgattgctcacgagcaaaccgatatcgatgtgattgctgcggattcgctcgataaaacgattctgttcggtgaatgcaaatggcgtaattcattcaacgaaacggaggctattgaaaagctccatcagcgtgctggcttagtccgcggctatcaggcaggtaatgcgtggcttatgctgttcaccaagaatccggtgagtgagtccacgcgaacccgctacatggatgatgaacgaatggtgttcgtttccgcggaagagttatacactgcgtgatgcattactgggtgattgtgacgcggtatctagagtcctgccgacagccacgtggcaattacgccgactcacgcaccaccaaatcggtgttcaggtgcatcacgcgcggtgaagagactccgttgatggctttgatgaccacgtcggccatggtccagccgcactgatccatgtgctgatcgacggtggtgagttccggggttatggaggtggaagctgagttgttatcgggcttacgtatttggggatagcacttgttgctcgttgtacatatagcaatgcccttgcctcctcacgggaagcaagggcattacgctactgcttagtactgctcagaggcaagcgtcacagcacgccctgggcaaccatggcgttggcgaccttgacgaagccggcggcgttggcgccgagcatcaggtcaccctcgtgaccgtattccttggcggcggccagggagttggcgacgatctcttccatgatggacttgagcttggcgtcgacctcttcgaaggtccaagacagacggtagctgttctggctcatctccaggccggagacggccacgccaccggcgttggcagccttggccgggccgtacagcacgccgttcttctggtagacctcgatggcctccggggtggacggcatgttcgcaccctcgacgaccacggtcacgccgttgtccacgagcttctgtgcggattcgccatcaacctcgttctgggtggcgcacggcagagcgatgtcgcccttgacggtccacacgcccttgctgccctcgtggtactcggagcccggaacgcgctcggcatattccttgatgcggccgcgctcgacttccttgatctgcttgacgacctcgacgttgatgccgttcgggtcgtagatgtagccgttggagtcggagacggtgacgaccttggcgcccagctgctcagccttctgagcggcgtaggtggccacgttgccggagccggagatcacgacggtcttgccctcgaaggagtcgttgcgcagcacgcgcagggcttcctgggtgtagtagcacacgccgtaaccggtggcctcggtgcgggccagggagccgccgaattccagacccttaccggtcaggacgccggagtactcgtcgcggatgcgcttgtactgaccgaacaggtagccgatctcacggccaccgacgttgatgtcgccggcgggaacgtcggtgaactggccgatgtggcggctcagctcggtcataaaggcctggcagaagcgcatgacctcggcgtcggacttgcccttcgggttgaagtcggagccacccttgccgccgcccatcggcagcgtggtcagggagttcttgagaatctgctcgaagccaaggaacttgacgacggactcggtcacggtcgggtggaagcgcaggccgcccttgtacgggccaatggcggagttgaattggatgcggtagccgcggttcacctgaaccttgccctcgtcgtcaacccaggccacgcggaacttgatggcgcgctccggctcgacgatgcgctccagcacaccggccttctcgtactccgggtgcttctcgacaaccggctgcagggtctcgaagacctcgcgaacggcctgcaggaactccggctgatcgccgtcacgggcaacgacctggtcgtagacacgcttgatgtactcgtcagtgagcatgattctcctcgatttggtagggaattaagacggttttattctatgcgcgcaggcccttgctgcatagagtctcgctcggataacgggaaagctttcggcgtggttatggagtggctcaagtttccgtttgttagatttttcgggcgattgttggatgtctgtctatgcgtgaatcgggtcgaaatggaagccgcatcacaccggaggcacgttcatatagtggacataaaggcggacttgggtgatgtcagatgtgtctgttggggatcgtgcggtctgtggggtttgtggggtgtggctggaccgtggggtcgtatggtttttgtgacctgtggggtttgtggggtgtgtggccgcaggtcttcggcgcgcaggttaccgggttcgcggtcagtgtgcgaagtaggtctgcagaatcatcgtggtctcggtgcttaccggcaccgtgcggtggatgagattgagcagttcttcaagtgcggtaggggaagccacgcgcaccaccagcacgaaactgggggcgccggccaccgaatagcaggagacgatgccgtcgatattgttcagcttgtccggaatcgaggattcggctgagtagtcgagcggggtcacgttgacgaacgcgctgatgggcaagccgcgctgctcttggtcgatgatggccttgtatcccttgatgatgccgcgcttctccagcttctgcacgcgcgactgggcggcggagactgacagtccggtcgcctgggccagttgcgcgagcgtggcgcggccgtcggcctccagcatggtgaggatgcgctggtcggtctcgtcaatcgcggtcatgatgtcttctccgttcgttgtgctctgtgttcactgtacctgttgccggaatgcgatggctttccgattttgcctggtaatttcagtagttcttcctgtgttttctgttgtgtggtggaatgtttacgtttaaagtcctaattggatgtaataattccttttgaaataagagaacgatgaaataattccattgaggagggatgatatgcagaagttttccaacatgtctctgtccgaagttgcatctgctgctgcgcctgctactatgcctgctgccggtcgggttgctgtgccgaccgccgagcccgcgagcctgtccgccgaagccctgaatatcccgcgctccggcatccgagacgtattcgaccgtgtagagcgcgtgcctgacgcgatttcactgaccgtgggggagcccagcgccacggccgcgccgcatatcgtggcagccgcttgcgaggccgcacaggctggccgcactcggtacaccaacgtgcttggcatccccgaataccgcaaggccgtggccgattactccgcctgtgtgaagggacttacttatgatcccgaaaccgagattcaagccgttgacggtgccacgattggcctgtttctggcgctgaaagccgtggtgggcaccggcgatgaagtgattattccctcgccgttcttcacttcctatgacgccgaagtgatgctgtgcggcggccgcccggtcaccgtggcgctgcgtccggagcacggcatgcgcgtgaacgcggcggacatcgaagcggcgatcaccccgcgcacccgcgccgtaatcatcaactcaccgggcaatccgaccggcgcggtaacctctgccgccgaactggcgcgtattgccgaagtatgcaagcagcacaatatttgggccatctccgacgaggtttaccatccgttcgtgtttggggaaacgttcggggaaacgcttgggggagaggcagccgtggcaccatcgatcgccgcggtgccgggcatgaaagagcgcaccattgtggtggaaagcctgtcgaaaacctatgcgatgaccggctggcgcatcggctacctgctggcacccgaagcggtcatcgaacagaccggcaaaatcgccgaactcatgcactcctcggtgaactccttggcgcaatacgcaggcgtggcagcactggctggcccgcaagataacgtggccgccatgcgcgaggaataccgcgccaagcgccagatcgtgctggacggtctggccggatgcccggtattgcgtctgatcgaaccgcaaggcgcgttctacgcctttgtggacgtacgcctgactggccttgactccggtgaattcgcagaccgtctgctggacgaagagcgcgtggctgtggtccccggcgaggccttcggcgaggaggggcgcggcttcgtgcgcctctcctacgccggagatgccgacgagctgtgcgagggcgtcgcccgtctgcgcgcattcgccgaacgggtatggaaccccatcaccggccaccacaccgccacctatcaccccatggaggtgctggcctgaggcttaaagcgaggctagaccgccattcggcctcgtcggcgcgagcgatggcctgcttcttggctcgcagcaagatgtagccgagtaccagaacgttggccagagctcgatgttggcatcgcgtcaaaacaaccgcattaaggctgccgcgtctcgtatcgttacgcgtaggggctggctgaggcgtaatgctgaagagtaacattgaagcgatggcaatcaagccgatttgagggagagaggcacacgatggcgtactgcggccactgcggaaatagagttgatgggccggcacgattttgcccggcatgtggagcgtctgtagacagcgcaccagttgcgacggcaccagtaccggccgcatcgccagccgtaccgcctgcgtcgataccggcacctgctgtgccggcgtctgcggtaccaccatcgataccagccgcgccggttgccccatcggtttacgccgcgtccgctgccccacagccggcaccaaccgttcccctgccggctttgccgattcccgctcctgccgcatatcaggcgactgatgcaaccgccgtcctggcaccgcagcgcaaatccagcaagaagctgatcgccgctttctgcgcattgcttgcgacgattctggtggcggccttggcgttcatcatccccaacttcaccgccgtcaaagcgatgctgggcttccggcccaccaatccgctggtcgtcaccttcgacgcgatcaactcgctgtccactctgcgcagcaccaaatacgaactcagaacccacagcatcactgacgattctcttgacgtgcggatgtctggcatgtattcgctgggcaaaaccaccaacgaatcctccgcgtccttcactagcaaaacagacgaatatgcaacgaccttcgcttggtacaaaggcgcattcgccgagaaattcgtttggcatgacgacgacccctactacatctactgcccggccgaccaatatgaagatgacttaaggaacggcgttggtagtgatgtggcggacttgatattgaacgtcaaggatgcgttggtcaagaacggtgcttgggacatcaccggcgcggagcaaacgttctacgatcagctggacaagatgaacgacgatgggtactcgaacgacatcgaccgggccaagggcacgaaaaggtctgccgaggtgaaggccgaggccagcaaattcatccaacaatatttcggcgtggagctggaagataagaatgtgcgcagccagctgttcccgaatacatcgtctgccaagtctgccggcaatacgcagctgtcgtaccaaatcgatatcaaagcgttgtctcagcatttcgtgaattactggatcagtcatgaagcgcagtatccgcatctgaaatcctgggtgattcagcaaatcgaggatgccggcgtggacgatgctgaagatgagtaccgtcaggcgctcgataatgtgcgcaactgggatttcggcacggatgaagagccggagatgccgactatcaccgtggatctgaactacggcagaaagcgtctgatgaattcgattgccataagcgtgtccggcaaggacgaagacggcgactcctataatggctcgctatcgttgacgctcagtcagcagaacgcggtgtctgtgaacgaccccgatttgactgatatggtgagcaaagccaaggacaacaacggactggatttgtcctgaatatggtgcgtgggatgttgcggcggcgctaatttcctcggtgggctatcacgcactcttcccgcttgcagcggtctgctcgctgattggcgcggtgctgatcgtcttcatcaagtcagtgaagtaaacatacttattcatccctcttccttccataacaaacgagcggaggggttgggccattgttttgcggtgtgtccagtctctccgctcgtttatttgcttgattctgtggaatggaaggggcatgctctatgtcaaataagataatgcggaagggctgttctgcgtgcatatatcttgctgaacgtatttgagggtactttctggttaaagacacgccctatggtgggcagaatgctgccgttgtgtctggcgtcggtcgcaggacatgttgtatcatgagggcacaagcttaattcagccgtcctcaatctgattagtcgtcgggtcggattggcgtgatcggcttgcagggaatcatccggctcttccggttttggtgtgtagaggggatgcttataggtgggcttgtatggtgtgtctgaagccgccggtgtggaggaggctgcgggtgacgtagttgtcgaggttgcggaagccgagggcgatgccgcgtagggtctcgggcctgccgttgatggcctcggtgggaccgttggcggtgccgtgggcgcggtcgtcggatcgatcgtccccggtgccggcaccgtggtcggcgcatttgtcggaacggcgattggcactggagccggatggctgataagtagcggcttagacgcactttacgacaatcaggtgcacagaggcggtggagatgacccgggcagtcatttcaaggataatctcgggttttggaagtgggggtatctgttggcgttgttcactcggtatgtgttggtggggcgtcttgaggacggggcgcaggtgttctgggacacgctggagaagacgccggtcaagcgcaagctggatttcggcggcgattccggctgggcgcgggctggcgcggcggccggcggcgctgccgccgcggctgcgcccggcctgatggtcatgatccacggcatcgcccggctgctcaccccggacacgaagacgcaccacacgcataccgatgacgtgacgctgctggcttttctcagaccggtcactatatcccgcgacgcatggaacacgtacgtggcggtcgccgtgatgtggctggccggactcctcctgtactggggtttctgccggctcgtgttcggccggccgaacacctacgtccccgcctcgctggaggacttggcattcgcctcctccgtgcccgccacgaagctgcgctacatgttcggcggccccatcgtcggcacgctgttcctcatcgcgatatcgggcttccccatagcgatgacatggatgttctggtcgagcgcgcaatgggtcgacaccggcagatccacacctgactggattggatggttggctttcttctgggcgttcctcgccacatgctccccgattctgttggccttgcgtttcgtcggaccgtgggactggcggggacgtttcagcccgcgcgcgggcgccgaacgctggagccggctgaaatgagcacactgctgatgggggccgggatgggcctcatggtcgcaatctcgctcgcattcatcctcgcgttcaacatgtcccggctccgctggctcatggaccacgacatccacccgctgctcgaggagcacggactgcgcgaacccgacgacgggttcacgtcctccggcgccaaggagcgcatggccgcgttccactcggacgtcgcggaggcgctggcagcgccggaacgggaacgcgaagcgagggaacggcgacgattcactgtgttcgacccgacggtcgacaagttgccgctgccggcgggcccctacccgttcgaccgtccgacggcgtcctgggcacgcgacatctacgaggaaggcgattgggcgtacgccgacgcatgggtcagggggcggaggaagccacgcgtggtgcgcgagcaacgctacgactcgtggcgcaacgaagtcctcgcccgccacggcctgaccgacgcgccatccgccacgctcgaacacatcgaacacgccgctgcacgcatccgcgccctccaccacaccagcccagccgaagcctacaaacaagcctgcaaggaagccaccggcaacacggtcaacgacgaaaccaccggagaaggaaaagaaaacggctcttccggttttggcgtgacccgcagcctcctccacaccggcggcttcagacacaccatacaagcccacctataagcatccccctacacaccaaaaccggaagagccaattatctgccggtaccttccacccgagaggaaggtgtagtcctccgggtccgggcgatatcgccgcaaggcgaaggattttcgtgtaccgttccgtgaagacggagcgacaatgaccacgcggttggtctgaatcctcgaggggtggtccttaacaggaccacccctttttcgatggagagggccatggcgcactgggagaatccctcgaacaagaacgcaaaaaccctcagaatcggtattattccaagggttgtctgtggagctagccgggttcgaaccggcgaccctctgcttgcaaagcagatgcgctaccagctgcgctatagccccgtgagaaaaaaagagcggctcgcagccgcttcattttttctgtgggcccgggaggacttgaacctccgacctcatccttatcagggatgcgctctaaccagctgagctacgggcccgatccatacgcttcaaaagcgcacaagtaattacaataccattgaacggcggtatgtcaataacggcgtgtcgtgattgtcgcttgcgccatgattgccggctcgacggtcaatgtctagcaacgccacagccaatgcccagctatgtaaccttgcgttctcacaccgtaatgctgcggttacacctccctctctgcgcagaaatgtccaatacatatgaggcttctgctgttttcgtgggttgggttcttggttgtggtgggcgtatgtcgagtccgccgcggcggagcatgacgagggcgatgggattgttcgcgtggtggaagccgtagaccatgcggatggtgaccttgatcctgttgtcggacgcctcgagcctggcgtttgaacagcccaattcgattgtcccgaggatgtcgggcccatgacggcggatctttcgggcgagttcgacgatctcggggatgcggctgtgggacgcccggaacacccggcggtccagttcggtcccggcctggtcggccggtcgtttgggcatcgtccggaggggttccctgagccgtcatgaacggtagggccggcccttggggtccgtgtaccgcaggttcccggacgcctcggaccgtctgtcggtcagcttgccggggttcttcaggacggtgtatctgacgccgcgcatgcgcttgacggatttctcgtccccgtcgcggcgctgcgcttcgacggctacacggacgggtcggacctgtggcagtacgtcatcgcgaacttcggcaccctctgctgggtgccatcatgctcggctgtctcgtcatggtgtcctcggccaccgcgaaggcggtgttcgaggagtggggggctgcgttccggggcatttgccggccgtccggcgtcacatcgtcaggctgtccgggtcgaggaggaaatcgtagacgctcatcgtgaggatgccgtgttcgtcgcggacgggtttgaccacgtcgcgtacgaggacgatcttctggaagctgtcgtcgatctcgagcagcgaggccttctcctgcgcgaccttctccggtgtgggcagttggtatgcggattgaatgtagcagcgccggttgccgattcgtgaggggcggcattgtgtgccgcttgttgtccgccgttgtgtaagaatgacttgcatgccttatcgccgtcgtcaatccaccgctccgaagtccggtgcgccgaaatccgttcggtccgctgccgccgggcagtcgttggacattgacggcatccatctgcacctgacgcgcaaacccatcaaaaacctgtatttgcgcatcaaaccgccgagcggccgcgtcgaaatctccgcaccgatgcggatgagcgagagtcgtatcgcggatttcgtcaaagagcgacattcgtggattctcgcccagcagcagcgcatggctgaggcgcaacggcgctccatcatggcattgaacgagggtgcaggcttcgagaacggaggtcgtggcgtagctggtgccagcggccatgatggaggcgttgccggtcgtccgaaaaccggtgatatcagtcgtccgagaatcggcgacgccgggccgggccaagccggtacgaacgtccagccgtattttgaccgctcccaaatctggaccgacgaacgcaaacgacaagcggcggccgcgatcaacgccgcgttgccacagctgctggccaagtgggggccggtcatcggccggcagcccacgcatatcacgctacgggtcatggcctcgcgctggggatcgtgtacgccgcgaaccggccgcatccgtctgaaccttcaattgggagtgatggaaccgcaattcctggaatacgtcttggtccatgagatgacgcatctgtgggaaagcggccatggcgccggattccaacgccgcatgaccgcctacctacccggctggaagacgctgcgccgcgacctcaaccgccgcgtggtgctgtgacgatgacgggtcaggcttcagtgccggtgatgtggctgatggcctgatcggattcgttcgcatggtccgaatgcgccaccatctcgatggccgccggacacccgctcaccgacgaagaccgctggccttggctcgacaccatcgccgcgtggatcgacgagcgcgtggccgccggcgagcccgccgtggtcacctgctcggcgttgaagaagatctaccgcgacaagctgcgccgtcaaggcgtggtgttcgtctacatgcagggcacattcgacgaggtgatggaacgcctttcccaccgccaaggccacttcatgaagccgagcatgctgcaatcccagtccgacattctcgaagagccgggcgatgacgaaattcacgtcaacgtacacatcggccaggccgatcccgaacacgaggccatggccgtggccggtgccctcggcctgtgagccatctctcggctccccttagtctcacttcgccacaagtgcggcgcatcgatgaactcgaacggcgcatcagcgaacttcagctggagctgaagcagtgtgaaggccagcaagggcgaaccggatcggtccaaacgggctactcaggccgaccagcccagccagtccgttcagaccgacctaactgatcagagcgggccctctgaccagtccgaaccatctgaccgacatgtacttgttgactaagtgtgcggcccgcatgtgggcctgccactcgttgttgaacgtacggctacatttttacaaccacagaaatacggttccagtcacgttttccaaccataagatgcggttttggctacgttttccaacctcaaaatgtggagttttatacacttttccaacttatgtatgtggagactctctatttcacgtgagacgaaagtggctcccctctttgaggggagccacggaatactgcttttacttatgccaggtgagagcgcatgaaccactggaacttttcgagttcctgcacgtggtcctggatgatgttggagctgatcacatccagctcgtccagctcggcgatggccttgcggtcgtcggcgatgaaggcgtcatagtactcgatcagcgccttgagatactcctcggtgcccacacggccctcggcgtcgaacgacttccacgtgcggttgcgcacgatggcgtccgcgcggccgtccggggtgccgcccagagtggcgatgcgctcggcggtctcgtcggcctgagccagcacggcctcgacctcggggtcaagcatctcgtgaacggcgatgaagttcgggccggtcacgttccagtgtgcgtgcttcaggaccagagcggcctcctgctcctggctcagtcggttctgtaggatggcgatggccttctcactggccgcttcatcaaggcccggcacaacaaacgcaagtgtcataatgttccttctttcagtaggtggaacctgtccatataattctacgatttttggttatgccccgggccgaacgaataggtggtgaatatcacgtggctagttggcatcgtcgctttgtgattcggctggcagtggcgcatggtccggggcaccggctttgcggacttcgatggtttcgatgcggcggccatccaccttggtgacgaccatgttgtagccgtcgtcagaatgcagcacgtcacccaccgcacccatcttgcccgttttggacaggaagtatccggcgaccgtctcatacgggccgtcctccagctcgatgccggtcagatcggcgaagtcctcaatggtcatgctggcttcgatcgtggccacgccattgacgaacgcggtgcgggtggtgcgttcgccgcccttctcgctgggcagatcgtactcatcgcgaatatcgcccacaagctcctcagtcatatcctcaagcgtcacgatgccgtccgtgccgccgtactcgtcgatgaccacggccagatggatgccgcgcttacgcagcagttccaggctcggcagcagcttggaggtgccgggcagggagatgccttcgcgcaccacatcgcgcacgatcttggcgttcggatcgcgcacgtccagcagatcgcgcacatgcacgaagccgatcacgtcgtcgaaatccttgccggtcaccgggtaacgggagtacggctggtcgcgtacgaacgcggcggcctcggccaggggctggtcgccctcgatgaagaccacgtcggcacgcgggcgcatcacctcggcgacgatggtttcggacgcatcgaacacatcgtccagaatcgtgcgttcgtccttggagaggttggtgttggagctgaccagcacgcgcagctcgtcgtcggacacctcggactcggtctgctgcgggtcgaagccgagcaggcggacgatgccgttcgtgttcttgccgatgagccagatgatcgggcggcagacggcggcgaaggcgtcgatggcgggcaccacggcgcgcgcgatctgctcggtgcgctgcatggcgatgcgcttgggcaccatctcggagatcacgatggagcagtaggagatgatgagggtcaggatgatgttcaccaggccgccggcgatgccggggtgcacgccccagctttcgaccaccggaatcaggtagggggcgatggaagaggcgccgaacgaggcggacaggaagccggagagcgtcacgccgatttgcacggtggagaggaaggtgttcgggtcacgtgcgattttggcgactttggcgccgcgagcgtcctcctgctccatttgctcgatctgcgagccgcgcagagagaccaatgccaactcggtgccggagaacacggaaccgataacgagaaatacaaaaatcaggaggatgttcaaaccaagtgacatgccttcaactctaggggagtggcacgtcaaattggggtgtgctggctgggcagtaagaaactcggcaaagggaagggcattctcatcaccatcgatgagacgcaagcggcctcgcatgatgatttggttgccattgctacagccgtgcagcacgtcattacggatgccgatgaaagtgatacgcctgatgaggataagaagggcgttgtcatcgtatttgccggcttgccgtatatggtcaacgatttgctggataacgaggtaaccacattcctgcgccgtgcgctacgccgcgaattggataacgtgccgcttccagacgtcaagaatgcgttcctggaaacagttgcggattccggcaagaccatcagtggggaagatgcgcttgaagccgctcgccagtctgaaggatacccgtacatggtgcagcttgttggctactacatgtggcaatccgcacaacgtcgaggttcaaatgtcattaccgcggacgacgtgtcgaccggtgtttccgatgcgctgctcgccttcgacgattcaaggacaaactcatccgcccggcaggtcatgggcagctggaatttgcggtgccgcatttggggcagtatttgcagtcgttgtagcaccaaatatagggctgggttcattcatttggtaggttgcgcgttcatttggtgggttgtcggcatggtgaggcgttggaatggcggcatttcaatggtcagtgttggagtgcagtgaccaaatgaacgcataattgacctaatgaatgaagtaagccggttgcgggctagtttcgatccagttctatgagcgccgacgcatcttggccacggcattgctgacgcaaatacgcagcacaatggtgaagacgactaccataatccccagaatgccaatgttgaaccagaactgatccgtggtgtgctcccacagatcatcctttttgaacatcggcaccttggtggggccatacagcagatcgttgagcccgatatccgaggcggcggcggagaagccccaacgtccggggaagatcatgctgaccagctcgaggctgtcgcggccggtgaccggaatcatgccgccggagaacaccaactgggccatgaccagcaccaccagcaatggcatcgtctgttctcccgacttcaccaacgccgagccgacttcgcccaacaatgcggaagtccacgcagtcagccaaatcgccaacaccagttcgggtatgccggaatcagtgaccacaccatggtccgggccgggcttgccgaggctgaccgcagtggtcagaatcgccgcctgcaacaaggtctgcaaacccatcacgatgagtttcgaggcggtgtatgacgtgggcgacaaacccaccgcgcgctcgcggccgtaaatcgctcgctcggagacgatgtctcgcacggacaaagccgatcccataaaacaggcacccagtatgacgagcacaagcagctggttcggctcggtggcggcgtctttgaaatcgggctcacccaagccatgagaaccgggcacaaccagcgacagcagtcctaggagcaatggcagcaacagcaggaagatcagcaatccggggtcggcgatgatcaaatgcagctgacgaatcaccagagtgatggtctgtttgatgcggaatggctttgccggtttctcatgctcggtgtgccgcgtgatggtggactcggcctgcatggtgcgctggcgtgaatcagtaatcgaatacacccgttccggagattcggcgacatcgttgaagatgtcggcccattccttgccgttgaacgcctggctcatctcctgcacggtgccgaagaatgccggatggccgccgggagcgagcatgagcacgttatcgcacaacttgttgatatacgacagtgaatgggtgaccacgataaccacgcggccggcatccgccagttggcgcaacatggtcatcaccgtaagatccagcgccgggtcgaggcccgaggtcggttcgtcgagaatcagcagttcgggttcggtgagtagctcgatagcggtggacacgcgcttgcgttggccgccggacagtctgtcaatgcgattcttacggcgagacgtgagttccagctcattgagcacgttgtcgatgatttcggcgcgctcggccttggttgagccgggcaggcgcagcttggcggcgtattcgagcgccgcatccacagagagcttgcggtgcaccacgtcgtcctgcggcacgaatccgatacggctgcgcaacagttcgatgttctgatgcacgtcgtatccatcaaacagcacgcgcccgtccgtggggctgttgagcccggcgacgatggaggtgaatgttgatttgccggcgccggaaggtccgattacggcggtgagcgtgcccttggcgaatacggcgttgatgccgtcaagcagccgggtgcctttgcccacggtcagtccgatgttttcggcgataaccgcgtcgttgctgacaaacggcgtgcggtcgcacagcacgccttcatgcacgatcaggtcggtgttgccgacggtgacgacgtcgtcttcccgcagccagatcttcgcgacgcggcggccgttgacgtaagtgccgttggcggagttcaggtcagtgagcaggatgccgctgctggtggtttccagcgagcagtgtttgcgggagaccagataatcgttgatgcgaatcaggcaggcggtatcgcggccgatgacgcctgtggtgtcgtgctcggggctgaaggacccgtgcacgcggttggtggtgagttgggattcgagccttaccgcttgcatgctgcctgccagaacggtgccggcggcattcgatggggaaggggatgcgcagggagacggagatggtgatgcgggtgataccggcactggcgatactgccgtcggtgccactgctgttgggcggggttgctgttgcaggtgcgcgagggccggggatacgcggtgcggggccagcggggctggcgttggttgcggttgtaccggttgtaccggttgtgccggttgcggtgctggtggtgtgggttgcactactgggcgtgcctgttgcggcgcgagttgcgtgggttgtgccggttgcgctgatggtgccggcggtagcgcaggctgggccacgtttgccgcagggcgtcgcgggggctgtgccggcgtggacggcccgctggttccgacgatgcagacgatggtggcaccttgtgccagcgtcactttggtgctgttcagcagcagtacggaagtggtgtgaatgccgttgatggacagtccgtttgcactacccgtgtcttccaagagccaaccatcgtcggtaaaggtgacgcgagcatgatggtgagatacgtacgggttgtgaatcaccagatcgcaatccggcgcacgcccgatggtcgtggcacgtgcaggattgggggtataggtggcggatccgtagtgaatagtaagggcaggtggcattggttcagacttccgtgttcttcgatctctctgcacacagatgtaccacgaccgcattacccccggtgaacggggtctgactgatggtcagaaactcagcacctcgaccttgccggtgtcgagctggtaacgggcgccgacgatcatcagctggtcggcagccaatgcctgctgaatgatgggggattgttccaccagcgtctcgatggtgtgggccacgtgtacgcgctcgatgtcttcatgcgcgtcgagctcggcttcgcgcgcctgccagacggacatgccggcctggcgcagaataatcgattcggcggcggcgatgtgctcgtcgaggtcgtccatcgcatccgcggcctccagtgagccgtcggcttcggaagtgatggtgtgcatcaggtcgtccagctcctgctcggcggcctcgattgcgccgcagtgctcgtgaccgagcacacagatcaggctgacgtgcagtttcttgaccgcgtactccagcgaggcgataaccgcgctatcgatgagttgcccggcggtgcgcacggtgaacaggtcgcccaggccctgatcaaaaatgatttccggaggtacgcgcgagtccgagcaggagagcaccgcggcatccgggttctggccatcaagcagcgtctggcgggtctccttgtcctgccatgggtggtcgggcttgccctcggcaaagcgccggttgccttgcagcatgcgactccacgttgcgttcgcggtcgattcctgttcaaagtctgactgagccatgaaacctccattatcagcggactgctggtacccatagtagcgattggaagtgcggattcgcgactgcgtgcataatctggctttgcccaaagcataatgagaacgctcacgatctcaatcctgtttaagggtgggccgtgatgatagtcaacacaagggctgtggctggtgtgataaggctcatatgttctgtccgcgcgagccgtgtgccgccacactacgatgggttctggtaatcgcctgaagaatcctgaaaggaccgaaaatgactcttctgcagcatgaactgaccgatttcaaggtgaacgcattccagaacaacgagttccacgaagtgaccaaggacgatgtgctcggccactggtccctgttcttcttctacccggccgacttcaccttcgtgtgccccaccgagcttgaagacctggccaagaactacgccaagttcaaggaaatcggctgcgagatctactccgtctcctgcgacacccacttcgtgcacaaggcttggcacgacgccaacgagaagatcgccaagatcgagtacccgatgcttgccgacccgaccgccctgctggccaaggatctcgacacctacaatgaggccgatggcatggccgagcgcggcgacttcatcgtgagccccgagggcaaggtcgtggcctacgaggtcatctcctccaacgtgggccgcaacgccgaggagctgctgcgccgcgtgcaggcctcccagttcgtctacgagcacggcgaccaggtctgccccgccaactggacccctggcgaggaaaccatcgagcccagcctcgacctcgtcggccagctgtgatcgacactgaataggtggtaaccttggctcccctctctgaggggagctgtcgctgaaagcgactggggggagtgctcgcgagagctagcctgatccgatatgcttccctcagtctcactacgacagctcccctcagagaggggagccagtgtatgtaagggagttttcatgactcagaccaacaatctctatgacgtcgtcgtcattggtggcgggccggctggcctgacggccggcctgtacttggcccgcgctcgctaccgtgtgctgattcttgaaaaagatgatctcggcggccagatcaccatcaccaacgaagtcgtcaactatccgggcgtgggccgcaccacgggccgcgcgctcacccaaaccatgcgtcagcaggctcaggactttggtgccgaattcctctccgccgaagccaccggtctcgacgtggatggtgacatcaaaaccgtgcacacctcacgcggcgacctcaagacgttcggcatcctcatcgccaccggcgccagcccgcgcaagctgggcttcgagggcgaggccgaatacgccggccgtggcgtggcctactgtgccacctgcgacggtgagttcttcaccggcaaggaagtgctggtggttggcggcggattcgccgcggccgaggaatccgtgttcctgaccaaatacgcctccaaagtcaccgtgctcgtgcgcgaaccggactttacatgtgacgccgcagtggccgccgaagccaagaacaacccgaagatcgacgtgcgttatcaggtcgagctgaagggcgtcaccgccggccaaggcggcctgcgagaagcctcgatcctgaaccttgccaccggccagaccgaaacgtggaagcccgccgacgccggcaccttcggcgtcttcgtgttcgccggctatgtgcccgccaccgatctggtgcgcggcgtagtggagctcgatgatcacggttacgtggtcacgcacgactacctcgaaacctcggtgccgggcgtatacgcggccggcgatctgcgcgtcaagaacctgcgccaggtggtcaccgccaccgccgacggcgcgattgccgccgtggaactggagcgttatgccaagcagatgagcgagaaaaccggcttggtgccgccgcgtcccactgcttccgcttatgaggagtccgaggccaaagccgcctccgccgcttcggccgctggcacgacgcccgccccggctcccgccaaacgcagcgccgatgccgcagccgcatccaacgccgccaagaagtccggcgaactgttctccgccgccatcaagcagcagcttggcgtggtcttcggccgcatgacccgcccggtcacccttgcccttgagctggacagcaccccgctttcggcggaattgcagggcttcatcggcgagatggtcgcgttgtcgaatggcaagctgaactcggtcgccgtcgatgccgcagggctgatcacggcggtggatggtgcttctgtgcctacttctttggtggttggcgagccattggccgtcactttgccggacggcaccgaactgcccacttatggttcgttggacgattccggccgcgccacattcgacgtcgccggcgtcctgccgctcgcccgtccgaccgtgcgcatctgcgtgccggctgagggcgacggcaaggccggcaaggacggcaatggttcactggtcttcaccggtctggccttccacggcgtaccttccggccacgagttcaactcgttcgtgcttggcctgtacaacgcggccggtcccggccagccgctgggcgatgacctggtcgaacgcgcgaagtccatcacggacccgctgaacatcatgatcctcgtctcgctcacctgcacgatgtgcccggaaaccgtgcttgcttcccagcgcattgcctccctgagcccggccgtgcgcgccgaagcctacgacgtctcgcacttccccgaactcaaggaccagtacggcgcgatgagcgtgccctgcatcgtcatcacccacgccgacggcacccagcaagtcgaattcggcaaaaagagcatcccccaaatgctcgaactggtcggcgcgtaagccgcacgacctcaggtactcaacagcaacaacaacgattctgccaaaatcgtgacgtacatcgattgatgcgatcgatgcgcccgactccggcagaatcgttgttttgcggcagctcagcctcggtcttcgacggccttcgtgacgtttctgtcgccgaggtacttgaccaggctgatgctgatcagggccacgacgaacaggccggtgagcaccgggatgagtgcggcgtagcggtgggcctgatcaggcgcatgggcaactacgaacgaggccaactggttgccggacagaccggcgaacgcccaggcgctcagcgtcagaccgtgcgtggtggagacggttttggtgccgaagtgctgatcaagcagcacgggcagcgtcgagaaaccgccaccatagcccgcgttgacgaggaacagcatggccagcacggcccacagcagagcgttgtcgatgctgttggtgaagatctgcagcaagcacacggcaatcgacatgatgaagattacctgatagacggtctcgcggcgcttcaggtggtcggagagtgtggagaagcccacgcggccagccgtgttgaacacggagtccacggcgagcaccagtccgatgatgccggagatggcggcggcaaacttggcggggctcaggttggcatactgcgggaaggccctgagcacatcgtgcaggatgtccttctcttggctgatgagggccaggccgcaggtgatgttgatatagaaggctatccagatgccccagaacacgggcttcttgaggattgtcttgcggctgacgtgtgaggtcgcgggatcgtacacccagccggccggacgcttgatgagcaggaagccgacgaacatcatcaccgcgtagaccgcggcgaggatgaagaacatgctgaccaggccaaccgtgccgatgagatattccatcagtgggctggcaatggccttggccaggccgaagccggcgacggcgatgccggtggcgaggcccttgttgtcggcgaaccaaagcatcaggttcttgaccggagtcagataaccgacgcccaggccgatgcccatgatcgcgccataacagatgaacacgcccggcaggaagttcagggcgatgctcacgcccgtgccggcgaagccgaccacgaagcagaccatggagacgagtgcggatttcttgatgtttttctccaccattggcccggcaaacgcggcggacatgccgaggaagaagatggcgagtgagaagccccattccacggaggcggggctggcgtggagacggtcagcgataagctgcttgaacacgctccagcaatagacggtaccgattgggatgtgaatcagcagtgcgggaataatcgcgctggtccaacgattctcggtaaaccttgccatatatggacggatcctttcgtaactggtgtacgatgacctgccgacccgaacgagagtcgcatcgcccatatccacgcacatcacgacggcatgcccccgtgaaccatccgggctgcacgaatcgaatcaaatcgaatcgtgcgaactgcgaacaattcgctaaacatccttggtgtgcatttcatcggcgctgctggctcttgtcgacgccgacaaacagaactataacgctgttatggggttgctgtggctggtttctgtggtcggaagctatgagctttctcacatcgaaaacagttatatgacggtatcggcgtgattgatacgtgacgtctgcccgtggacgcggcatatccctctcggaaaacaatgactccgtcatgtccatttcttggtttgacatgttttcgtttgcagcgtcggtgctcaccacggtgaccgcggcgttcgagtcgccgggcagggcctcgaccgagggtctcatcctcggctgagatgtgggcggtactatggattcttatcgataaggttcgtgatatgcggagatggtaacgatggtgaccttaaaggatgtcggcgaactggccggagtgaccgccaccaccgcctccgcggccctgcgaggcaaggattacgtcaagcccgaaaccacgcaacgcgtgtgtgacgccgcccgcaaactcggctacaaaatcaacctgtctggccggtccctgcgttctgggcggtccgataccatcaccttccttacctcgggcctcgagggcgactatttctcccatctggccatgtgtgtggctgaggaagtgcacaagcgcgactcgcacatgctcatcgaactgtcccggtatcttaccgacgacaacgatctgtcgtacacgttttcggacggcatcatcgccatcaatgcgccacgtgcggtcgatatcctgaagcggcacccggccgtcatgctggaaaactacgacaccagcctgcccatcgacaccgtgaacgcgccgagcgacgccggctcacgggcggcaatcgaacaccttatcgcgcgtggctgtgcgcgcatcggcatcgtcggcgacaatcacgatcccaacaatcccaacatcattcccggctcgcgtgatattcgtatgcgggccgccaaggagacgattctcgcggccggactgccgtttgacgagcgccgtgatttcatcaaatcctcgtggtcgattgacggcggtatcgaggccgggcgcggcttggccaagaaaggcaagtgcaagtacgacggtctgtactgcctgaacgacggtattgcgctcggtattctgcgtggtctggcggacgatggcgtaagtgtgccgggcgatgtgcgcgttatcggcttcgacggcctgagccagagcatgtacagcgtgccgactttgaccaccgtggccaccgatttcaagggcatggcggataccgcgctgaccttgcttatgcggcgtatcgagaacctggacgacgagttcttcccgcagaccgtgaatgtgggctataagctcatcgagcgcgaatccactgcggcgtagagtctttggccgtgttgagcttcaattgggtgattggactggcaccagcggctgatatcagatatgccgaaagcagcgatgatcggatttaagttgctggagatgacaggatggattgctctttacccctttcaccatcttgcaataattcttacatgtaagaactctctgttaacatgtaagaattattgcaagatggtgaaaggggatgctcatgttgccggccaaagaaagtttgacggttgagttcaagagtgagcagaagcgccctcaatcgcatgatgaaattgttgacaacgtagtggctctagccaataccgaaggcggcacactgtatctcggtattgaagacgatggcactgtgaccggcgtatgtgaagagcatcgcaatatcaatggacttgcggcactaattttcaataagactgttccgcagcttcctgctcgcgtgacgctcttgtatgagaacgaggtgccaatagtcagtattgaggtggataacagtcagcaaatcgtatctaccagtcaggggaagacattgcagcgccggctgaaagcagacggctcgcctgaggtcgttccgctgtttgtttcccaattcattagccgtttatctcagcaacggttctacgatttcagcgcgcaacctgcaccagaggctcggttggacgatttgaatccagactcacggaacaagttgagaagccatattcgcagtgccaatgcgcaaaactcgttgttgtcttttactgatgaggatttcgatcgggcacttgagctggttgttgatggcccgtatggattgcagccatctgttgctggtctgctcaccattggttcggttgatgctattcatcgatcggttccagccgcatcggctgtttttcaagtgatgaaaggcatgtctccaaaggtcaatatggatccgttcgtgttgcctttggtggatatgtttgatcgtgtaggcgagctgatggagccatggaatcccagccacgaagtcatgagcggcttgattcgtgtcgatctgccagacttcgatcgaggggcattccgtgaggcaatgattaacgctttctgccatcgcgattatgcacgaatgggttcggtgaggttcctggttgatgatgatgggttgaccatagccaaccccggaggattcatagagggtgtctccgaagataacctgcttactgcacaaccgcgttcccgcaatccgcagcttgccctgattctgaaagctgccggatatgttgaacgcaccggacgaggcatggataccatctatgccgggtcgattgcggcgggtggttctttcccggattattcacagtccagtgctgaggaagttatcttgttcttgcgccgcgtggtacctgacgaggcattcgtaaccatgattggcgacgaggaacgtcgacgtggggctccattgccggtctggtcactgattgtgctctcgctgctgcgtgagcatcgtaggtttaccgtggtccaattgtgcgatttttctcatttggagcatcgacgcatcgtgtccgctgttgagaatctggtggaagctggtttggtagagggggtcggtagcgggagctctcgttcgtatatgctgagtgcccgagtgtacaaacgttcagaggggctggcgtcttacgtgcgccagcgtgacatcgatgccacccggcgcagtggccttgttctggagttcgccgaaaaaaatgatggtgtcgtcactacggcggatgtcatggatttgtttggcctgagctatatcagtgcataccggttgttgaagaagctagaggatgcgggcaagttgcgccgcgaggggaatgggccgtcatcccgatacgtgttggaatgattggtacgcgtgaaagtaagttctttcatcacctttcaataattcttacatgcaagaactctctgtttacatgtaagaattattgcaagatggtgaaagatgtacacgaaacggggaagctctgctcgatgtgagcggcttccccatatgcgctggtgtgtagatcagcctgtgttctgcaggccggcagcaacgccggagacggtgcacaggatgaggtagatgaatcctgcctgctggctctgcgtgttttgcttcaatttttcttaagcagagtgagacccatcgtatcgttcgattctacgacgaacgttttgcatcaagcgcagataatgtggtgagtgcatattcaacaatggcggacggtcttgatgcacttggtttgacaaatattggaatgagcgaaagcatcctaaaaaaggctgccggtacagacaagcttcctgataagcaggaagctgaagtgagtgctcgggcgttcgctgcattcattgatcagccaagacggtagctcgcataatgcattatgtgtgggcagatgtgtcgtctgcccacacattcgctgttgtgctttcgatttggaattcctctgccagatacggggaaacttctaaaaggccgctatgccgaggaagagtcctgtaataccggtggccatcaatacgatgatggtgatgattccggcgaagatgcgtacaggaagggtttcttttccatggtttgatgggctgtccgcaactaatctcattactccagctgtaacccagcaaactgcgcccaggactagtgccaggaattctcgacaccattccgtttcaagtgcgggaatgccgacgattgatgacgggtcgcttgccagtcttggcggaatagcgcataggatacgctccaatatcaggtaaggggtatcaaaatggatcagagtcaaagcgaatgggagctgtagcgccagtcctatccaccacagcgtgcgtcggatggtcgcgagtctgtcgcccggcctagtgtccggcttgccgccttcgccctccgtcccggcaccgtccgcgggcgtgtggtccccctcgtgcgcgtccgtcgttccgtccgtgtccttctcctcattcatatgtcccctttcgatcatccgagtctgtcactcggccagcgcgcccgttctatgcgcgccgtcgccggccagtctagggccgtgcgacgcgaacggggaggcccgcgtcgcttatcggcacggaacctccccgctcgcttttgtcgatcggtcggccgggaatcagcccgtgttctgcaggccggcggcgacacccgagcaggagtgtcacaaagcccctgccgctctgggtacccaggtggcggtttatga

SEQ ID NO: 2617 - DNA, 11388 bp, Unknown
  R222_15m  MAG No. k141_26111
attcaatttgtaagtgcaacacccgtctttgggtggcttgtcttcgagagtaccttgccgagctcgcggtaccaaacctcgttgggcgtttcccggtccaggaccttcatgggggtgtcgttgatctcgtccatgatggcctgcaggtcctcgtccgtcaggccgtcgaaactggttttcttgggcaggtagcggcggatgcgtccgttgcggttctcgttcgtgccgcgctggtacgaggagtaggggtccgcatggtaggcgggcatgccgagggcctcgtccacgagcaggtggcaggaggactccgtgccgttgtcccaggtgcggtcgatgcgcgcgggcgcggggatgtccttgtagatgtcgtattcggcgcgcgccgtggccggcgcgctcttgtcggggatgaggcgggcgaacaggcggcggctcctgcgctcgacctgcgtgtcgatgcaccgtttcgaggggaccgtgccgatgacggtgtcggactcgaaatggccgaactcatgccgcgagtcgacacgtttgggccgctgggcgatgggcacgcgcatcgggatgcgcggccccttcgacctcctgcccttggcgcgcgtgcggcgccgcttgcctctgggcaggtactgcctgagatccaggatcctctgcggcttggcgtagatccactggtagaggcactcgtggctgaccctcatgcgcgggtcgtcggggaactcgaccgcgagccgtccctcgatgcgttcgggcgtccagcccttgcgcagcgcggtcatgacccatgcgagcagcgggtcgtacgccatgcgcctgggcttgcgcggttcacgcgcgcgttgttcggccttgcgctgcgcggtcatcgccgaatagaacggacggcacgtccacggccccgtcttcaagcgtttcggccggtacggccggtacgagtcgttctcattggacgcgaaccacaatccgcgtttcagctcgcggctgaccgtggccttgtcgcggccgatcctcagggctatctggcgcacgccgagcccgtccctgttgcgcaattcgtcgatccggatccgttcctctgccgacaggtgggaataagctttcatatcgagcgcagcactttctcttcggttgtggacttgaacacttccaaccatagagcgggtgttgcgcttctatttagaactcaggagggattcgccggttgtgcagtattgttattgttctgcggcggctctttaccgtcggccttccagccaatcgagggcggaagtgacgcggattccttgtgagacgtaactttgctcaacccgactggttacgtactgttgctcacacggtatgccgagaacattgccaattaaagtaaggtgccgggcgaaccggtcatggtaggtttgcccggatttgatttcgatcatcaggcgatgattcggatcggtgaaatccaacaaatccacctcgaccttgctggcatcgcggtagaagaataattgtggctcctgattggcgttcaaatgctgtttcatggtttccgcaatgatgaggttttcaaatatatcgccgaacttggggtgcgcaaccagtgcttcgaccgtccgaatgcccaagagatggcacagcaagccagtgtcataaaaatagagtttcggcgttttgaccacctgtttgcgtgcgttcgtgtagaacggcatgagatggaatgcgatgtaacttgattccagaatcgacatccatgcctttacggttcgcggacttacaccaagttcattggcgatgttggtgtagtttatgagtgctccggaactgagtgcgcaaagagtcaagaatcggcggaagtcagccaaattgcgtacatcaagatattcggaaacatcacgttcgatataagtgtcgatgtagttcgagaagaacagattgagcggcattctcgtgtcgtaaatgcgtggataaccgccttgcagcataaacgtatccggagtaagggcctgattcgccttgcatgcttcttggaatgagaacggcaataacttgaccaaaccgactcggcctgccagtgattgttgaatacgcttgagtagtaggaaattttgagaaccagagaggacatattgtccttgttcgctacgttcgtcggaagccacttgaatcatggagaacaaatcaggagcatattgagcttcatccactatgagcttggaaggacgctgccgaatgaatcccaccgggtcgtcaatggcggctttgcgtgtctcaggattttccagattcacgtagtcataatcagggaacatggcttttgccagcgtggatttgccgctttgccgaggcccggtaatagagaccacgggaaaccattgcgcaagttgtttggcctgtttcccgagcgcgcgtggaatcatcgatgcctctttcccataatccgacattactgattaccataatcttacattagagaaacccataatcctacattaggaaaacccataatctgacattagcagtgctcgtaggtttcccaaacgcacaaactatggcctaatacacagaattcccaccactctccctctgtcgcaacggaaggctttgcgttaggctagagcgcgtgactgaatccgtgaatactgaactccgcattgctgttatcggcgctggcccggccggcgtctattcctccgacatcttcctgcgccagctcaagaaactgggcgaagaactcggcctcggcaccaaggcccgcatcgacctgttcgagaagctgccggtaccgttcggtctggtgcgttacggcgtggcccccgaccacccgtccatcaagttcatcgcatccgcactcgagaagacgctcgacaatccggacatccacctctactgcgacgtggaattcggcaaggacgtaaccctcgatgatttgctcgcccgctacgacgccgtgctgttcgccaccggcgcagtcaaggacaagccgctgaacctgcccggcgccgacctcgacggcgtgtatggcgccgccaagttcgtcgaatggtacgacgggtatcccaccggtgcccgcgaatggccgctgacggccgagaacgtcgccgtgatcggcggcggcaacgtggccatggatgtggcccgcgagctcatgcgcaacgccgacgacctcaaggccaagaccgacattcccgacaacgtgtacgagggcatcggccgcaacaaggccaaggtgctgcacctgttcatccgtcgtggcgtggcccaggccaagttcagcgtgcaggaactgcgcgagatggagaagctgcccggcgtgcagctcatcatcaatgaggacgacttcgatttggacgacgagaccatcgaggtggccggcaaggacaagctcacccgccagatggtcgaggaactgttcgccatccgcgagatggccgaagacatggaagatgacggcgacgtcgacttcgaaggcaatccggccgaccgcaagtattacgtgcacttcaactccgcacccacggaaatcctcggcgaggacggcaaggtcaaggccatccgcgtggaacgcaccgaaaccagtgccgacggcaagatgagccgcaccggcgagttcaccgactacccggttgaggccgtctaccacgccatcggctacaagccggccgaggctcccggcatcacctacgacgagcacggcgctcacctggccaacgccaacggcgacggccgcatcaccaccgaagcggacggcggcgaagtgcgcgaccgtctgtacgccactggctgggccaagcgcggcccggtgggcctgatcggctccaccaagtccgacgcacttgccatcgtgaccaacatgcttgaggatctggccaaggccgccgaaggtggtcgcgtggccgaggatcgcgaccccgaatccatcgaccgactgctggaaagccgcggcgtcaagccgattgacttcgctggctggaagaaggtcgacgccttcgagcgcgccgaaggcgccaaggagggccgcgagcacaagaaggtcatcgagcccgaccagatgcgtgagctcgctctggcctgattgactatcagctcatcgcaccggcaactgcaccagcagcaatcggcgcgattgatacatcgataaataagaacgccggttatacgccagcgttcttatttatataaaagccagtgtcatgccagtcgagcaggccgatgggccaaacgatccaagcagccaaagcaggccaaacaagcaaagcgtcccgatcagaccaatcggtaaagcggtaaagcggtaaaacaggccaagcaaccgcactgtcaagcatcgtcaatctcatgtaaacaggctattccgatccccgccaaccgcaccgtaagcaccgccaacccccatccgattcacccctcggcgcacatccagccaatattcaggcagtgattttagtgtgagcctcatggatgccaaagtacgggtgcacggccatttcaacggcctgaagactacgctgctgttcgccttgatgtgggccatcatcatgctgatatggtgggccacgggcggcaggcagcagacgctgggcatctacgtcattatcgggttggccaccacgttcggctcatactggttctccgacaaactcgccatcgcatccatgggagccagggaggtcagcgagcaggaagcccccgaaatctaccagatcgtgcgcgagctgagtgccaaggccggcaagccgatgcctcgcatctacatcgcgcccaccatgagtccgaacgccttcgccaccggccgcaacgaacggcacgcggctgtctgctgcacgcagggcatcctgcagattctgaacgcccgcgagttgcgcggcgtgctgggtcatgaactgatgcacgtgtacaaccgcgacattctgacctccgccatcgcctctgccatggccaccgtcatcacgtacctcggttattctctgatgtatttcggcggcggcaactcgcgcgacgaccgcgataattcaggcggtctcggcttgatcggcgtgctcctcagcgtgattctcgcgccgattgccgcatcactgattcagatggccatctcccgtactcgcgaatacgacgccgacgaagacggcagtctgctgaccggcgaccccgaggccctggcctccgcgctcaacaagatctcctatggtgcccagaccacgcccatgcgcaaaacggccggcacccagtccgtctccgcgatgatgattgccaatccgttctccgcggtcggtttctccaaactgttctccacgcatccgccgactgatcagcgcatcgcacgcctgatgcaaatggccaatgaaatgaacggcactccggtggccgcatccacgtattccacgcgcgcaattcactagtccagcacagaactcaaaccggcacatggcgcaaggtgccgcataggtgatacacttgcctctcgtgcgtggaagcgcacatgcggacgtagttcatcggtagaatgaaagcttcccaagctttagaggcgggttcgactcccgtcgtccgctccatcgattttccttgaaatttcaacggttttccctcttttgagagcttattttcctgccgtatgaccgctatatgagaacaattcacgtcgtccgcgtatcgtgatgggcgatgtgtgaacccaagaccgctgcaaccaatggccaaccaacgccaaccctcgaacgcaccccgcacgacatcttcgtcggtgccggactggcgctcgccggaggcgtcttctggggcgtcaacgccaccgtctccaaactcctgatgaacgactatcacgccgatccgctgtggatcgcctgcgtgcgcgagctattggccggtgtcatctttctggtttgcgcaggaatcttcacgcctgacaagttcatcaactcgcttaaggactaccgttcctacccgagactcctgctgtgcgcgttcttctgcgtgctcatggtgcaggtctcctacttgaaggccattgactggaccaattccggcacggccacagtgctgcagacgctcaatctgctggttgtactcgtattcgtatgtattatgggcaaacggctgcccggcaaacgcgaaagcatcggtgtggtactcgcttttgtgggcacggtgctcatcgccacaggcggcgatctcagccagctcagtctgccgctgcccggtctgctgtggggcctgaccgatgccgtatgcacgtcactgcttgcgattctgcccatcgcattaatggccaaatggggcaacttcatggccagcggcgtcatgttcatcgtttccggcctaatgctgctgccgctcgtgcgcccgtggaccaccgcccccgcgttggactggttcggcattggtctgatggtattcaccgtggtgttcggcacattcggtgcctattggctattcctcggcggcacccagcgctgcggtgcaatgcgcgccaccatgctcggcaccagtgaacccgtaaccgccactatcaccggtgtcctattcgccggcgcggtctttaccccgaccgatttggtcggcttcgccatgattatcatcatggtgttcctcgtgagatagttcacagctcgcctggctccagaacctagtctggcgggcacaccccgagcgataatgaagccatgacaatcgcaacaccggaacgttatgccgaaatgctagacgccgcacgacgcggcggctacgcttaccctgccatcaacgtgaccagctcgcagacgctgaacgccgcgctgaaggggttcgcggatgccgaatccgacggcatcatccaggtgtccgtcggcgcagccgcatacctttccggcatcggcgtcaacgaccgtgtcaccggatcgctggccttggccgcttttgcacacgaggtcgccgcgaagtacccgaacatcaccatcgccctgcacaccgatcactgcgccaagcagtatctggacgaatgggtgcaaccgctgctcgcacatgaggccgatcaggtggcgcatggtcaggagcccacattccagtcgcatatgtgggacggctccaccgtgtcgctcaaggaaaatctggacatcgccgaggagctgctcgataagtcgcaggccgcgcacacggtgctggagatcgagatcggcgcggtcggcggcgaggaagacggctattccgccaaaatcgacgaacgcctctattccacgccggccgatggccttgaagtggcccgtcgccttggtttgggcgagcgtggccgatacatggccgccttcacgttcggtaatgtgcacggctcctacaagcccggcgtggtcaagctgcgtcccgccctgctcggtgatattcagtcccgtgtggcgcgcgcggtggtcgagggtgagctgcccagcgccgccggcatagtcgactttcccaacggcaagccgttcgaattggtgttccacggcggttcgggctcccgtccggaagagattgcagaagccgtgagccatggcgtgatcaagatgaacatcgacaccgacacgcaatactcgttcacgcgcccgattgccgaccatgtgttcgagaactatgacaaggtcctcaagatcgacggtgaagtgggcgaaaagaagttctacgatccgcgttcctggggccgcaaggccgaggaatccatgtccgcccgcgtggctgaggcatgcaagcaactcggctcggccggcaaagcactcagataacacccaaataaactgtcattcgccgtggcggcgccttggtgtcggcccgcctcgcgcaacgcgcggcaaagacaccagaagcccgattgcgtgagatggccgcgccccgagtagagggtgtaaggtagtctgtttccggcggaatcgtgcgaatgcggaggtgtgttatgcctggaattgttcttatcggtgctcagtggggcgacgagggtaaaggcaaggctaccgatctgatcggcaccaaggtcgattacgtcgcgcgcttcaacggcggcaacaacgcgggccatagcgtggtggtcggcgatgagtcgtacgccctgcatctgctgccctccggcatcatcaacccgaacctgaccccggtgatcggcaacggcgtggtcgtggacccggaagtgctcttcgaggagatcgacggcttggaatcccgcggcatcgattgctcccacctcaaggtgagcgaggccgcacacatcatcgcgccctaccaccgcacactcgacaaggtgactgaacgcttccttggcaagcacaagatcggcaccaccggccgtggcatcggcccagcctacgcggacaagatcaaccgtgtcggcatccgcgtgcatgacctgttcaacgccgaccatctgcacgacaaggtggaggccagcctgcaccagaagaaccagatgctggtcaagctctacaaccgtcgtccgatcgacgtggaccagaccaccgaggagctgctgaagctcggcgaacgcctcaagccgtacgtggccaacaccggcctgattctcaacaaggcgcttgacgaaggcaagaccgtactgtttgaaggcgctcaggccactatgcttgacgtggaccacggcacctacccgttcgtcacctcttccaacccgaccgccggcggcgcctgcaccggcaccggcgtgggccccaccaagatcacccgcgtaatcggcgtctccaaggcctacgtcacccgcgtgggcgaaggcccattccccaccgaactgctggacgagtccggcgaatggctgcgtcagcagggtcacgaatttggcgtgaccaccggtcgtccgcgtcgttgcggctggttcgatgcagtcgtcaaccggtacgcctcccaggtcaacggcctgaccgacatcgtgctcaccaagctcgacgtgctcaccggcctgaaggagattccgatctgcgtggcctacgacgtggacggcgaacgtcacgacgacatgccgaccgatcaggccgccttcgccgccgccaagccgatttacgagaccatgcccggctgggatgaagacatctccgactgccactccttcgacgagctgcccgccacctgccaggcctacgtcaagcgtttggaagagctgagcggctgccgtatctccgcgatcggcaccggtccgcagcgcgaccatgtcatccagatcaattcgctggtcgactgaccgtctgcaacgaatttcccggcttgactggtaacgacgcggcacatgatatccgccggctgattccgcgattcgaccacttgaagtggaagatggcggcggccggcatagtcattggtctggtttcaggattgctggttgtcgtataccgtctcggcatcgaatacggcacggatgcgtcccgttggatatatgcgcggattcgcgagaccccgtggctgattgcgccgtgggcggttgccgcggtggcagccgcgctggcaatcgcgtggatggtcggcaaggagccgatggctggtggcagcggcatcccgcagaccaacggcgtggtgatatgcggcttgaagatgcgttggcagacgattctgccagtccgtttcgtcggtggactgttgggcgcgttgtttggtctgtcgctcggccgtgaggggccgtccattcagattggtgcgtcgggcgcgcagtgtgtatcccaccgtttgcgcggccgccgccgtgaggacatgcaggagcattatctggtcaccgccggtgccgcggccggcttgtccgccgcgttcagcgcgccgctgtccggcatgatgttcgctttggaaggggtgcatcggagtttttcccctgcgattctgatgggcgccaccgccgcatcgctgaccgccgatttcgtctcaaaatactgtttcggtctgcgtccggttttggatttcggtgatatcggtcagctgtcgttggaagagtatgtgtggctgattccgttgggattggtggccggtttggttggttcgctgatgaaccgctcgttgcttggcttccagacgctgtacggcaaactgccggcatggagccgcccgatgattgcgattgcgatcgcgttgcctgtcggcatctggttgcccgatgtgctcggcggcggctcgaatctgattgataccgccgaacatgcgcgcgtcggcttgggaatgctgtgtctgctgttcgtggcgaagatgctgttcacatctacgagtttcggctcaggcgcgcctggcggtattttcatgccgattcttgcggtcggttcgttggccggcggcatctgcggtgaagtgttgcatcgattcggtgatctgccatccgacgcagtggcggtgtttgcggtgtgcgtgatgacgggcacgctcgccgcgtccgtgaaaacgccgatcacgtcgattctgttggctgtggagatgtctggaacgttgacgcacatgctgccggtcgcggccgtcgctttcatcgcgctgttggtgtccgatttgctgcgcaccaaaccgatttatggggagttgctggagcggtacgtgcgcgcgcaaggcatgcagatggcgatcgcaagccatgtgggcagcggcattatggaactgccattggaaatgggagcgattgcggacggcaagcgggtgcgtgacgtgcgttggccgtctgggtgcctgatcatcggcctgcgtcgcggcgaaagcgagatcgtgccgcgcggcgatacacggctgcgtgccggcgactatctggtggtgctgttcagtggcgaagaggagcgcgaggtgcgacctgcgatgcggcggctgtgtgatgcccggcttgactgagcctggctgaattcggctggactctggatgtacgaatctgcggaatcggacatccagggtgcatacgttggcgctccgtgtaaactcatatgcgttaggaaggtggcaaccgcggcccagctcgttgttgcacggcctatgggcggaacaacgctgtccgcggaaggccagtacagggggagcgcaatggaatcgcaagaacaatcgccgggagacgtggtgactgcgggcgaggactcacatcccatcacgcaggcaatcgacactgttgaggtgacgcatgctggtgcaaccgcgcccgccgctaacaccatggatccgcctacgattcccctggcgccgatgaaacgtatgcaggcgcggttcaatccgctcgccgacggactgatgtatgttgtggtgttcgtcggtggatttgttggagtcggctgtcggcatgcgttggatatgctcctgccgtcggtcagcgggacgccattcgttgtgggcacgtttgtgtcgaatatggtcgcctgcttcctgttcgcgatgctgaccgaattcatggcgaccgcttcgtggctgcgtcgccgggtgcggcaggttgtcagccgtggtgttgggctcggcttgctc

SEQ ID NO: 2618 - DNA, 7114 bp, Unknown
  R222_15m  MAG No. k141_27828
ggcgtctccctcgcccacccgcacggccaggtctactgctacccgttcatcgccccgaagatggagaaggaactccagcacaccgaggcctaccacgagaagaccggcggcaacctgcttaaggacatcatgaacgccgagctcgaagccggcgaacgcatcgtgatgcgcaaccacagctgggtcgcctacgtgccggccgccgcccgttggcccctcgaggtccacgtggctccggtgcgcgacgtgctcaccctcgaccagctcaacgacgaagagcgttgggaccttgcctccatgtactcgcacctcctgaagcgcggcaacgccttcttcgacaagggcgacggcaagggcatggatctgccgtacatcgccgcctggcaccaggccccgatccacgacgcccgccgcgagaactaccgcctgaacctgcagttcttctccttccgtcgtgccgccaacaagatcaagtacctcgccggctccgaatccggcatggccgcctggatctccgacaccacgccggaactcatcgccaagcgcttccacgagctcggctccatcgacatcgccgactgatagaaagaaaaacatcaatgactgctgttgaattcattgagccgctgacccatgaggaaggcgtctcgcaagccaccaagctgttcgtcgatacctacggcgctgcgcccgagggcgtgtgggctgctccgggccgtgtgaacctgatcggtgagcacaccgattacaacgccggcctgtgcctgccgatcgctctgccgcaccgcactttcatcgccctgaagccgcgcgaagacaccaaggttcgcgtcgtctccgacgtggctcccgacaaggtcgccgaagctgatctcgatggcctcaaggcccgtggcgtggacggctggtccgcctacccgaccggtgtggcctgggcgctgcgtcaggctggtttcgacaaggtcaagggctttgacgccgccttcgtctcctgcgtgccgctgggctccggcctgagctcctccgccgccatgacctgctccaccgctctggctctggacgacgtgtacggccttggctacggcgattccgacgccggccgtgtgaccctcatcaacgccgccatcaagtccgagaacgagatggccggtgcctccaccggcggtctcgaccagaacgcttccatgcgttgcaccgccggccatgcgctgctgcttgactgccgcccggagttgaccccgctggagaacgtctcccagcaggagttcgacctcgacaagtacaacctcgagctgcttgtggtcgatacccaggctccgcaccagctcaacgatggccagtacgctcagcgtcgcgccacctgcgaggaagccgccaagattcttggtgtggccaacctgcgtgtgaccgccgacggcatctccaaggccgatgaccagttccaggccctcaaggaaacgcttgacgccctgcctgacgagaccatgaagaagcgcgtgcgccacgtcgtcaccgaaatcgagcgcgtgcgttccttcgtgcgtgccttcgctcagggcgacatcaaggctgcgggccgtctgttcaacgcttcccacgattcgctggccgccgactacgaggtcaccgtccccgagctggacatcgccgtggacgtggcccgcaagaacggcgcctacggtgcgcgtatgaccggcggcggcttcggcggctccatcatcgcgttggtggacaagggccagggccacgagattgcacagaagattgctgaccgcttcgaaaaggaaggtttcaacgcacctcgcgccttgccggcgttcgctgcggcttccgcgagccgcgaggcctgatctcggaagctgatgcaaaaacgcgcgttggcgcacgtccatgaaaaaggacgtgcgccaacgcgcgtttttgcatgatttacttgtgggccagatggtgcatagcgtatcccacgacgatggccagcaggcacgatgccgaatgcttcatcctggctcccaggtgcggctactgtttggtttggtgctgtctgatcgtatccgtgcgcttcttcttcctcctgaaggaggggagcaccttttgtaagtagcggccgacttggtggccgtcatgttcggctacgcttttgtgcgtacaacggacgggttgtacgtgtatttgatggaaaaagatacgttatacgagtaacggcgtgtcgcgatgtgggtgattccggtgttctgcgagaacggcagtatggagccgaagtttacgtttgcggcgctgggtggactggtcaatgagagtgttaactattgagataaacgattaacgtttgacattaaacgattaacgatttatagtgttgaccaccgcaaagaaacagtcacaaagcaagtggctgacgggctcgtacaggtgcgtcttacatcggtacgaggaggaaacatcaaggaagaaggagcctaatcatggcacgaaggagtgttcgcctgttggcatcaatcgctgcggttgcgactatggccacggcgcttgccgcctgcggcaacaagcaggccaccacagatgagaatggcaagccgattgtcaacattctggttcgtcgcaacgtgaccgaccatccgatgcaggacacccagtacaccaaggatctggaagccgcctgcgactgcaccatcaagtggcaggaagtctccgacaacgcgtggggccagcagaagagcgccaagatggccgccggtgaattcccggacattggcttgagcttgtttagcatggtggatgcggccaagtacagcacctatttcgaggatctcaagccgcatctggacaagatgccgaacgtcaagaagttcctcaaggcccagccgggtgccgcgaagtacgttaccgatggcaccaagatcgccatgctgccctccgaccgcggcaagggttacgaggtttccggcactcacatgttcatcaacaagacttggctggacaagctgggactccagatgccgaccacttgggacgagctcgagaacgtgctcgatgcattcaagacccaggatccgaacggcaatggcaaggctgatgaggtgccgatgaacatccgcagcctcggcttcggcctgtggagccccctgacgctgatgaactccgaaggcgtggtcacctccttcatgggcggcggcgcttccgaacagggctactatgtggacaacggcaaggttaagagctattacacctccgacgcgctcaaggacgtcgtctcctacctgcacggactcatggccaagggacttatcccgaaggatgtgctcacccgcgacgcctcgcaatacgcttcacagaccgtcagtgacggcaagaccgcgctgaccggcgtctccttcggttggtccaactacgccgaatacggcgacaagctcggcgaccagtacgtcaccctgccgccgctgaagaaggacgcctccacgcccgactcccaggtcaagtgggattattcccaggacgcctgccgctgggcctactccggttctggcctgaccgtcaacccgaacgccgccaaccaagacgccatctacaaggtcatcgacgccatgtatggcgagaagctttccgtggccggtttcttcggctctattccggatatcgtctccgatgacggcgaccaccagtacaccatcgacaaggctaaagcctacgccgaatatcctgatacccgcgccgtcgccctgcaggaccgcttcggtggctggatccgcgacgatgtgaagatggtcaacgacaccaacgccgaccaggtcactgcgtccgacttggccattcgtgaggcgcgcaaccgcgtcgacggcgtcaaggatgtcgtaccgatttacgtgcgcccgaataccgaggattccaacaccctgcagaacaacaacaccgccatctccaactacgcgaacaaccagatcgcgaagtgggtccagaagggcggcatcgacaaggaatgggatgcctacgtgaagaaggtgtccgaaccgaccctcggcctcgacgccaacatcaagatttggcagaagtggtacgacaagtacaccaagtagccaagcaataccgcggggtccatcgcacgggttcgtttctctcccgtgactgccgccggaccccgcacttttgttccctagcaatcatcctaaattggagatcaacatgagtgcacaaacatcgcaaggcgttgctgcacggaccgtggcgatggaagcggctcccgaccgcaagaaaccaggtctgctcgatcgcatcgccgaccatttacgtcgctactggcagttgtggattctttccgctccggcattgttcttcgtgggactgttctcctacgtgccgatgtggggcatccagctcgccttccgcgagttcgatccgaccaaaggcctgaccggcggcaaattcgtcggtttcaaatacttcctggaattcttccacaacccgctgtttggtgagattatgaccaacaccatccgcatttccctgtggacattggttatgggcttcatcttcccgattatcctggccctgctgatcaaccagatcggttctaagaaaatcaaaggtttcgtgcagacgattacctacatgccgcacttcatctccgtggtggtcatcgtctccatgctcaacatcttcctgactcctggcaccggaattctcggtcgcttcttcggcgacgaatcactgatgggttccaccagcgccatcaccgcggtctattggatttccgaagtctggcagcatgttggttggaactccatcatctacctagctgcgctcgccggcgtggacacatcgctgtacgaggcggcgaagatcgacggtgcaggccgtttgcagttgattcgctacgtcgatattcctgcgatcatgccgacatgtgcgatcctgctcatcatgaacatgggctccgtgctcaacgtgggcttcgacaagatctacctgatgcagaactcgctgaacatgccggccaccgaagtcatcgccacatacacctacaaaatcggtattatcaacggccagtactcgtactcgacggcaatcggtctgttcaacaccttggtcaacttcatcttcctgatcaccgcgaatgcaatcgccaagcgcgtttccgatacgagcattttctagaagggttttatcatgtctgcaacaattgaggctgttacccagaacaagaacgacattccctggaacaagcacgtgcgtcagaagcagaagccgggtgactgggcggtgtcgggcatcatcaatgtgctgctgctcctgaccattgtggcggtgctctacccgctgtggttcgtggtcatcgcatcattttcaaatccgaacgccgtggccggcggtgaagtgctgctgctacccaagggtgtgaccttcgctggctatgctaaggtgttcgccaaccagcgcatctggcagggctatctcaacaccatcatctattcggtggtcggcaccgcggtcaacatggcagtgaccattccctgcgctttcgcgctatcccgtcgcgagttcaagccgcgacgcgtgatcatgttcctgttcaccgtgaccatgttcatcgccggcggcctgattccgaactacctgctgtacaagagcctcggcatcaacaacagcatgtgggtgttcatcctgcctggcgcggtttccgtgtacaacgtgatcgtggcccgctccttcttcgagacctctatccccgaagagctcttcgacgcggcccagatcgacgggctgagctactttggctacttcttcaagattgtgctgccgttaagctccgcgattctggctgtaattggtctgtactactttgtcggccactggaacgacttcatgacgggccttatctacatcaccgacgacacgaagcagccattgcaggtggtgttgcagcagttgctgctggtggcgcagggtactggaaccaatgtcaacgcggctgcgcagcagcaggccgccgatcagatcaagttcggcatcatcatcgtctctaccctgcctctgcttgtgctctatccgttcttgcagaagtacttcaacaagggtgtgatgctcggcgcggtcaagggttgagtcaaacgcaatccgacgagagacaaccaatccaaaagccagccgatagaaaggattcgctatgcttgcccgcttctctgtggcctacgagcggttctgccgtctgctagtcgcgattttcgtggtcaacgtggccatactcgcgcacactctgatgggagccgtcgtgctgggagttttcccctcgttcgcggctgcgcaggctacgttccgtgcgtgggtgctttctgaggaccgttcaatgcgggccaaggaggtttggacgacgttccacggcttctggaaaagcgaagtcaagagtgcgaatcttttcggttggcctttgattattctctgggccgtggtcatcgtcgactactacgtgatgaactggcatgctcgcggcgatttcgacatcatggtttccggcgtgctgctgctcatcatcgtagttttggcagtgttctcgtccttggtttgggtggtacgcgcgaactatgcggagcgtcccgtctggattgttcgtacaacactggcgatgattgtggcacgcccgttgtgcagccttctgcaggtcgggctgctgattctcactgtgcttgtatgggtgcaatggtctggaattctcatggtgttcggcttgtcgctgccgatgttctgcacagcttggattgtttattcattcggccgtctgcctggaatggacattcatgaccgcatggaacagagcacgggccgcgcccgaaaccagacatcgtgacatgttcgaaaaaaaggggggtgataaaatggtacagtcgtcggtaagtcaacgagtgaacaggtccaaacgattggtgtctatcaaagacatagctaaggaaacgggtgtttccgtatgcactgtgtctttggttatgaacaacaaggatcacaatcgcgtcagcaaggcggttgcgcagaaaatccgtgcgactgccgagaacatggggtacaagcctaattccgtggcgcgcaccttacgcaccagcaaatccaatactctgggattcgtcaccga

SEQ ID NO: 2619 - DNA, 60755 bp, Unknown
  R222_15m  MAG No. k141_30457
cggtactggagcgctccagcgcccgtgagaccgcctcccgtgtggccttgggcgaggtggccaagcagttcctggatcaggcgttcggcatccgcaccgtagcccacgtggtggcgctcggtggcgtgcagaccaaccctggtttgccgttgcccacacctgacgatctggaagcgttggatgcctctcccgtgcgtacgttggataaagaggccgaggcccgcatcatcgaacgcatcaacgaggccaagaaggccgccgacacgttgggcggcgtgattgaagtgctggcttacggcgtgcctgccggcatcggcacctacgtggaatccgaccgtcgtctggacgcggctctggcctccgcgattatgggcattcaggcgttcaagggtgtggagatcggcgacggcttcctggaagcctcccgccccggttcgcaggcgcacgatgagatcgtggtcaacgccgacggccgcatcgaccgtctgtccaaccgcgcaggcggcattgaaggcggtatgtccaatggccaggtgattcgcgtacgcggtgccatgaagccgattccgtccatccccaaggccctgcgtacggtcgacgtgctgaccggcgaatccgcacaagccatcaaccagcgttccgacagcaccgccgtgcctgcggcatccgtggtggccgaggccatggtgcgtctgactttggcgaagtacgcgctggataagttcggtggagacagtgttgccgaaacacggcgcaaccttgagtcgtatctcgcctcgtggccggagcacatgcgctgaacgaagtggagtatggttccgagacgactgccgcggaaccatcagcaactgtacccaccaatcgtcgagaggattcgtagattatgaccgcacgcccccgcgccgtcatcatcggcatgatgggagccggcaaaacacgtgtcggtaaggaagtggcgcatatgttgcgtctgccgttcgccgatgccgatgtggagatcgaacgtgaagtgggcatgaagattcccgcctacttcgatgaatacggtgagccggcattccgcgaggtcgaggccgatctcatcgccgatatgcttgaggatttcgacggtatcttttcgctgggcggtggcgctcccatgacgccatccacccagcatgccctcgcctcatacatcgaccatggcggtcgtgtggtctaccttgacgccgatccggcggaggccatggaacgcgcgaaccgcgggggaggccggcccatgctcaatggcaatgccaactcccgttggaagaaactgttcaagcagcgtgacccggtattccgcgaggtcgccaacgttcatgtccatacccgggggcttacgcctcagggcgcagcgaagaaagtgattgatatggtatctgagcgagcagtgcatgttaccggatcggcaattgagccgtatgatgtggtcattggcgaaggtgccatgaatcatctggtcgacgtgctgggacccaagcccgccaaaatcgcgcttatccatacccagccggtgcagcgacactccgatcgtgcccgcgccctgttgcgtcagggcggctatgaggtttccgacatcgtgattccggatgccgaacccggcaagaccattaccgtggccaacggcatttgggaacgccttggcaacgaaggtttcacccgatccgatgccgtggtggggcttggcggcggtgccgcaaccgatttggccggtttcgtggctgccacgtggatgcgcggcgtgcgctatgtaaactgcccgacctcgctgctggccatggtcgatgcctccaccggtggcaaaaccggcatcaacaccccgcagggcaagaacctcgtcggctcgttctacacgcctgccggtgtgctggccgacaccaagacgctggctacgctgcccaatgacatcttcatcgagggtctcggtgaagtcgccaaatccggtttcatccgcgaccccgaaatcctgcatatcctcgaagaccacgcagctgaactgcgcgctttcgacggctctacattcctcggctcgccgctcgaagacgtggttgccgagctcattgagcgcacggtaaaggtcaaggcctaccacgtctcctccgatttgaaggagaagggtctgcgtgaattcctcaactacgggcacacgatgggccatgccatcgaaaagctcgagcacttccgctggaggcatggcaatgcggtggccgtcggtatggtgtatgccgccgagctggcccatctgatcggttacatcgatcaggatctggttgactatcaccgttcgttgctcgcttcgctgggtctgccgacgtcgtggaatggcagctcgttcgacgacgtgctcgcattgatgcatcgcgacaagaaagcccgtggcaacgaactgcgtttcgtggtcctcgacgagattggtcacgtcgtacacctcgacaacccgcccgccgaagccgtagaagaagcattccgtcgtatccagcagtaattgaacggccgtaggccgtgccgttcgccatcccctcagaaaaagtacttggctcccctctaacggaggtgccccggagtcggatttaccttctacctccctctgatgagggaggtgccccgaaggggcggagggagagaagcacaaacaaaaggagtcccaatgaccaaagtcattgttgtcaatggccctaacctcggacgtctcggcgtccgccagcccgacgtctacggtcgtcaagacctcgacaccctgcgcaagctctgcgccgaatggggcaaggacctcggcctcgaagtcgaggtgcgccagaccgacgacgaagccgaaatggtgcactggatgcaccaagccgccgacgagaaaaccccggtggtcatgaatcccgccgccttcacgcactattcgtatgctctcgccgacgccgcgcacatggtcattgatgagaacctgccgcttatggaagtccatatttccaacccgtccgcccgcgacgagttccgcaagcgttccgtaatcagccctgtggccaccggcaccatcaccggcatgggtttctacggctacaagctcgcgctcgatgctgtggcgcacttgctgagcgaatagaaccaagccctccagccaatcacgggtagcagtcgacgttgcgcccgggattcctgttccgacgaatcggaccagaatcctcgtcctggtgcgccttatggacccgaagtacgccgtgtattcgaccatatgctggccaaggcagaacgagatgggctgcctacgcacgactacaccggccacgtcatgaacacgccgggtcatacacggatgatagagtgaaattccatggttagaagaacacatggtaattctcaagaacacgtcaccaagcatattttcgtcactggcggcgttgtctcctctctcggcaagggcctgaccgcatcttcgctcggtcgtttgctgcgcagccgcggtatccatgttctgcagcaaaagctcgatccgtacatcaacgtcgacccgggcaccatgaacccgttccagcatggtgaggtctacgtgaccgaagacggtgccgaaaccgatctcgacatcggccactacgagcgtttcctcgacgtcttcctgagccagaaggccaacgtcaccaccggtcagatctatcaggaagtgctgcgcaaggagcgcgccggcgaatacctcggccagtgcgtgcaggtcatcccgcacatcaccaacgaaatcaagtctcgtatgcgcgcccaggcttccgatgacgtggatgtgatcatcaccgaaatcggtggtaccgtcggcgacatcgagtcccagcccttccttgaggccgcccgcgaagtgcgtcgcgatctcggcccggacaactgcatgttcgtgcacgtttccctggtgccgtacatttccgccgcccacgagctcaagaccaagcccacccagcactccgtgatgatgctgcgtcaactcggcatctccccggacgccctcgtgttgcgttccgaccgcccgctcaaccagtccatcaaagacaagatctccctgatgtgcgacgtcgatgccgaaggtgtggtcaactgcgtggatgcgccgagcatctacgatgtaccgaagatcctgttcgaagaaggccttgatgcttacgtggtgcgtgagctcggcctgccgttccacgatgtcgattgggatgaatgggcagacctgcttgagcgcgtccaccaccccaagcacgaggtcaacatcgccatcgtcggcaagtacatcgatctgccggacgcctacctgtctgtcaccgaggccatcaaggccggcggctttgccaactgggccaaggtcaacgtcaaatgggttgctgccgaccgttgcgaaaccactgaaggcgcggccgccgctctcgacaacgtcgacggcatcgtgatccccggcggctttggcattcgcggcatcgacggcaagatcggcgccctgaagttcgcccgtgaaaccaagctgcccgcccttggcctgtgccttggtctgcagtccatggtcatcgaatactcccgccacgtgctgggcattgaagacgcgaactcttccgagttcgagcccgattgcgccaacccggtgatcgccaccatggaagagcagaaggacattgtggccggcaagggcgacatgggccacaccatgcgtcttggctcctacccggccgagctggaggaaggctcgctggtcgccgaactgtacggcaccacgcatgtcaccgagcgccaccgccaccgttacgaagtcaacgtggcctacaaggatcgtctgcgtgaaggcggcctgcgcatctccggccagagcccggacggcgagctcaccgagttcgtggaactgccgcaggacgtgcacccgttctatgtggccacccaggctcacccggagttcaagtctcgcccgaccaagccgcacccgctgttcgccggtctggtcaaggccgcgctcgaccatcaggcggcccgctgaccgtggatcccgcgcggtcggtccgcgcacgatgaaggcgtgacggcacggcatctcaggatgcttcgccgccacgccttcgccgtttggcgccatccgtgatgccgcatggcccgatggcgcccgcatgtaatcaagcccacagccaatatgcgtcaggacagctagtgtttgcacttgggttctgctaggttttcataggattaagtgtgatacaaggaaggcaggatggtgaccgaaaacacagcaccaaacgccgccgctgacgtggagatgagccagtatgtggctgatcgtacccgcgtcaacgaggacaagatcaagaaggatgacgagatcatcagccagttcggcgactacaactatggttggcatgattctgatgccgccggcgaagccgcaaaacgaggcattgatgagaacgtcgtacgcgcgatcagcgccgacaaaggcgagccgcagtggatgctcgacatgcgtctgcgtggattcaaggcgttcctcgaaaagcccatgcccgattggggtgtggatctctccggcttcaacgccgacgacttcaagtactacgtcaagccgatcgagaagcaggcgaagtcgtgggaggagctgccggacgacatccgcaacacctacgatcgccttggcatcccggaggcggagaagaaccgcctcgtctccggcgtggctgcccagtacgagtccgaggtgatctacaactccattcgtgaggacctgaagaagcagggtgtgatcttcgtcgacacggacaccgctgtgcgcgaataccctgaactcgtcaagaagtacttcggcaccgtcgtgcccccggaggacaacaagttcggcgccctcaacaccgcggcatggtccggcggctcgttcgtatacgtgccgaagggcgtgcacgtggacatcccgttgcaggcatacttccgcatcaacaccccggccatgggtcagttcgaacgtacgctgatcatcgcggacgaaggctcctacgtgcactacgtggaaggctgcaccgccccgatctggtccgaggactcgctgcacgccgccatcgtcgagatcatcgtcgagaagcacgcccgcgtgcgctacaccaccgtgcagaactggtcgaacaacgtctacaacctcgtcacccagcgtgcctacgtgcgtgagggtggcacgatggaatgggtcgacggcaacatcggttccaaggccaccatgaagtacccggcctgcatcctcgccgaaccgtacgccaaggcatccaccatgtccctcggcttcgccggcaagggccagtaccaggacacgggcgcgaagatgattcacctcgccccgcacaccagctccaccatcgtcgccaagtccatctcgcgcggcggcggccgctccgcctaccgcggtctggtcaaaatcgtcaagggcgcgtacggttcgtccaactcgaccgtgtgtgatgccctgctggtcgacgacttctcccgctccgatacctacccgcacgtcgatgttcgcgaagacgacgtttcgatggcccacgaagccaccgtttccaagatctccgaagaccagctcttctacctgatgagccgaggactcacggaggaagaggcgcgaggcatgatcgtgcgcggcttcgtcgaaccgatcagccgcgagctgccgatggaatacgcgcttgaactcaacagacttgtggaacttcagatggaaggatcggtgggctgattccgatgaccgacaacacaacacccgtcaaggaaatcaagattccggtcgccgaccccaacgacccgtacgcgattccggccgccatgccgtcctccgtggaccatgccgtgcgttcgttcaacgcaggcgactacccggagcccagccgcaagcaggacgaatggcgctacacgcctatcgagcgcatcaacgagttcttcaccgtgttcaagccttccggcgaaacgcagatcgaagtctccatgattgacggctcgccgttggccgaaggcgtgaagctcagccagatcaagctcggtgagggcctgtccggcactgtgtccaagcccaacgaccgcgtctccgcagtcgaatgggaatccggccacaccgcaaccattctggaactgtcaggtgagatcgcccagcccgtgctcgtcaaggtgcacggcgcgggggaggacctcgacgccttccatctggtgatcgccgccgccgacaaggctcatgcggacgtcgtcgtggaacacgacggtgacgcacgactggccgaaggcgtggaaatcaccaccggcaaggactcgcacgtctccaccacgttcgttcaggaatgggccaaaaccgccaagcatgtggccaaccaccgcatccacgtcggcgaaggcgcatccctgcgccactccgtcgtgaccttgggcggcgacatcgtccgcatccgcatggatcaggacttcggcggcgaacaaggcgacctcaacatgctcggcatctacttcgtggaccccggcgagcacatcgaacaccgcacgatggtggtacacaaccaccccgactgcaagtcccgcgtggtctacaagggcgcgcttgacggcaaggacgcgcactccacttgggtgggcaacgcgctcatccagcccaccgcccccggcaccgactcctacgagctcaaccgcaacctggtcctgaccccgggtgccatcgccgattccgagccgaacctcgaaatcgaaaacggcaacatcatcggtgccggtcacgcctcttcggtgggccgcttcgacgacgaggaactgttctacctcgaatcccgcggcatccccgaaaccgacgcccgcaagctcgtggtgcgcggcttcttcggcgaactcgtcgaggagatcggcattcccgccatctccgaacatctgatgaccgtgattgaccgccggctggcccgtggcgaaaacgacgccatggcacaggtcctcgaagacaagtaagaacagcatttttaggagcacaacaatgtcaacactcgaaatcaaggacctgcacgtccacgtcgaaaccaaggaaggcatcaagccgatcctgaagggtgccaccctgaccgtccactccggcgaaacccacgccatcatgggccccaacggttccggcaagtccactctcgcctacacgttggccggccaccccaagtacgtggtcgactccggcgaggccctcctcgacggcaaggacatcctcaagatgactccggacgagcgcgccaaggccggcctgttcctggccatgcaatacccggtcgaagtaccgggcgtgtccatgaccaacttcttgcgtaccgccaagaccgaaatcgacggcgaggctcccggtattcgccagtgggccaaggacctgtccgcagccatgaagcgcctcaagatggacccgaagttcgcctcccgttccgtgaacgaaggcttctccggcggtgaaaagaagcgcgccgaagtgctgcagctcgaactgctgaagccgaagttcgccatccttgacgaaaccgactccggcttggacgtggacgccctgcgcatcgtgtccgaaggcgtgaaccgtgccaaggaagccaaccagttcggcatcctcatggtcacgcactacacccgtatcttgaagtacatcaagccggacatcgtgcacgtgttcgccgacggccacttcgtcaagaccggcggccctgagctggccgacgaactcgaagagaacggctacgaccagtacctgcccgagggtgctgattccgagtccgcgctggcctgagtccgtgaccgtgggagtctgacatgccctattctcgacacgctccgggccgctcaggccaagtctttacggtcgcgaacaggccatgtccgactcccactcgtttcgtacaattgttacgtaagtaggggaacataatggttgattttaaggagattcggggcgagttcccgattctgaatcaggagattcacgggcacccgctcgtgtacctggattctgcggccacctcgcagaagccgaatgcggtgatcgacgccgaggcgaacttctaccgtacgatcaacgccggcgtgcaccgcggtgcccacgagctggcggcccgtagtaccatggcttttgaagaggcccgtgccaaggtcgccaagctggtcggcgcgaatgcagcggaaggcgaagaagagatcgtcgtcaccggtggtgccacggccggactgaacctgctcgccaccgcattcggcaatgcatcgctgggtcgtgggggagaagccgccaagcgttttgccctgaagccgggcgatgagatcgtcgtctcgcgcgcggaacatcattcagtgctgctgccattccaggagctggcctaccgtaccggtgccaccttcaagtggatcgacctgaccgaggacggccgtgtgcgtacggacaacctcgacgaagtcatcaccgaacgcaccaaggtcgtggccgtcacccacgtgggcaacaccacgggtgccatcaccaacatcgcccctatcatcaagcgtgcgcatgaagtaggttcgatcttcatcttggacgcttgccagtccgtaccgcacctcaaagtcgatttccatgcgcttgatgtggacttcgctgcctggagcgcgcacaagatgtacggtcctaccggcgtcggtttcctgtacggtaagcgcgaactgctcgaagccctgccgccggccaacttcggcggctccatggtcgaactcgcctacatggaccacgaggcccaatacatggcccctccggcccgcttcgaggccggcacccagccggtcgcccaagtggtggccgcaggcgtcgccgccgaatggatgatgaacatcgggctcgagaacatcgaggtccatgagaagaccatcgccgccgaactgctgaagctcggcgacatcgatggcattcgcatcctcggaccgcgcgaaaacgtggaccgcatcggtaccgtggcgttcgacgtggccggcgtgcacccgcacgatgtgggccagttcatcgacgcccagggcatcgcgattcgcgtggggcaccactgcgcccagccggtgcaccgccacttcggcctatacgcatccaaccgtgcctcctccggtgtctacaattcggtcgaagatgcccaagcattggtcgaagcggccaagggcatccgtaagttctttggagtggagtaaaacagaacaccatgaacgaattcggtatgagcggggatgacctcgaacagatgtaccaagaggtcatcctcgaggcgtcgaaacatccgcatggcaaggaatcctttgcgcccaacgcggcggtcgaacagtccgcggacgcggcgggcaatgtcaccgtgcaagccagccacgaatactgcacgcccggtgaatcgcaccagttcaacccgacctgcggcgacgaggcgaccatccatgtcgaagtctccgatgacgaaccgcacaccatcaagcgattggtgtgggacggccacggctgctccatttcgcaggccagcctgtcggtgatggtcgatctggtggacggcaaaaccgtggacgaggccatggatctggaacagacattccacaagctgatggaatcgcgcggtgccggtctggacgacgagaacctggaagaaaagctcggcgacgccgtggtattccaaggcgtgtcgaaataccctatgcgcatcaaatgcgctctgctaggctgggaagggctgaaggactccatcgccaaagccctcgctgcaaagaactgaggaaatatgtccaacgataatttggttcccgaaccacagccgtccgttttcgatgccgtcaacggcgtcctgcaggacgaggaggccgctcgccgcgtgatggccaacccggccttggccaagggcttcccgaacggacgcccgatcgagcactctgctgcgtccggcgatgacacctgtgcgtgtggcggtcaccatggcaaatgcggttgccgggatgacgaacagtccgatggcagcgagattccgatcaaggcgattgacgatatcggccgcgccactgccgaagacgtgcgcgaggcactgcatcaggtgattgatccggagcttggcatcgacgtgatcgatttgggtctggtctacggcattgagatcgatgagctaggccgcgccattattacgatgacgctgaccacgccggcctgcccgctgaccgaccttatcgaggacgaatgcgcatccacgctggccggtctggtcgaggagttccgcatcgactggacgtgggacccgcgctggaccatggagcgcatcacgcccgaaggccgcgaccagctcgccgcccttggcttcaacttcgacaacatgccaaagtactgatagcgcttagtaagctccctctgatgagggagctctatacgagaaaagccccgcatgatgcggggcttttccaagtctggactggtcaatcagtcatcgacgatggtgttcttcgggacaaccgtaatgccgtccggcgtgacggtgaagccacgggccagatcgtgctcggtatcgatgccgacagtggagttttcggtcaggaccacgttcttgtcgagaatcgccttgtacacgcgggcgcggcggttgatgatcacaccgtcgaacagcacggaatcgacgatctgtgcccacgagtggatacgcacattgggggagagcacggagtggtgcacttcaccgccggagacgatcacaccgggggagacgatcgaatcggtggcgtggcccagacggtcgcggccggcgtgcacgaacttggccggcggcaggttgccggacatcgtgtaaatcggccaatcctggttgtacaggttgaactcgggcacataggcgatcagatccatgtgcgcatcgtagaactgcttaatcgtaccgacgtcgcgccagtaagcgtgatcagtgaccgtggaacccggaatctcgttcgagttgaagtcgtagacgccggcctcgttgcgggaagcgaagtacggggcgatgtcgccgcccatgtcatgcttggtgtcggcagccttctcatcgagagccagagcctcgaacagggccttggtgttggcaacgtagttacccatggaagccagaatctggttcggattgtccggcagaccggtggtggtggccggcttctcctgaaagttcctgatcatgttcgggtgatcgggatcgacctcaattacaccgaactggttcgattcctcgatgggctggcggataccggccacggtgaactcggcgccggactcgatgtgctgctgtaccatctgctcgaagtccatgcggtagacgtgatcggcgcccacgatcaccacgatgtccggctggacgtcctcgatgatgttgatggtctggtagatggcgtcggcggagccgaggtaccagtgcttgccgagacgctgctgcgcgggcacaggggagacgtacgagccaagcagcggggagaaacgccagacctgggagatgtggcggtcaagcgagtgagacttgtactgggtgagcaccacgacctgacggtacccggagttcaccagattgctcaacgggaaatcgatcagacgatacacaccaccgaagggaacggcgggcttcgcgcgatcgcgggttaacggcatcaggcgggtcccctcaccacctgcaagcacaatcgacagaatcttgggattcttggccatcgtaactgtcctctctgttactgagcgtctttcgacaccgcactgctgggccggatgcttccttgcattcggtttacatagttaataattgcagaaaaattcgaacatgcaaggctttcgcccccgcgtgccgtgaacttgcgatgaacagtttcgtagatttgttaaggatccggccttttaggagcgcgtgcgattccttagcgtgtcgcgtagaacgccactgcgctggatgccgccacgttcagactatccacgccgtggctcatcggaatcttcacggtcaaatcggcgcgggcaatcgtatggtgggacaggccgtcgccctcggtgccgaagatcagcgcgagcttgtcgatatgcgtcggatcttcgtcaggcgcgtgcagacggcgtgtcagttcgtccaacgaaatcgaacgatcctccaatgccatggccacggtggtgaagcccagcgacttcaactcgtcgatgccctggaacggccagtaatgcttgttttcggtaccgtcgtcgttgaacccggtgatacgggtccacggaatctggaatacggtgcccatcgacacacgagcggctcgtcggtacagcggatcaccgcaggagggtgtgaccagcacggcatccacatcgagcgcggccgccgaacgcatcaatgcgcccacattggtgtggtccacgatgttttccattactgccacgcggcgggcgctcctgcagacctcggctacggagggcagcggccagcgtcgcatcgcgcatagggcgccgcgatgcagacgatagccggtcagtcgcttgagctgctcaggtgaggccacgtagacgggaatgtccgtgccccagcgcccgtcgatgaagtcgaaggtgtctttcatgccctccagccaaggttcctcgaccagcagtgacagcggttcgcggtcagcggccagcgcgcggtcgataaccttgggggactcggcgatgaacacgcccttggctggttccaagcgattgcgcaactgcatttcggtgaggctcacatacgcttcgacgcgcgggtcgtcaacggtgtccagcgtgatgaactgcattggtggcctttcgtgtgtgcagataacgaaaaaccccttgcaatgcaaggggtttatctgtgcccgagacgggacttgaacccgtacgcccgtataaaataggcactagcacctcaagctagcgcgtctaccattccgccacccgggcaggtgtcgtttggacaacgagtaaatagtttagcatgaaattacagggatgcaattcgcgcgtgtgcccggcgtgtcgcgtgtagccttgaagtcatgactgatgccctttttcttttcgacccgcaggtcgacgatgtcccggtgaacagcgacgaacttcacgccggctggaagctaaccctgcccgcgcacatcaagcgccatgctgtgcaggctatgcgactcaaggcgggggacagcctgcaactttccgacggcaacggcttgagaatccaggcagtgatggccgatcctgaagccggacttgctgaagttgtggaagtggggcgcgaacccgagccgctcacccgtttggcgctgattcaggcattggcgaaaaccggccatgatgagcaggccatcgatatggctacgcagatcggcgtcgaccaagtggtgccatggcaggcggaccgatccattgccaagtggaaggtcggccgtacggacaagaagtggaattcggtactggatgccgccaccgagcagtcgcggcgcgcttttaagccgcaactggaggcgtgcgcgtccagcaaggaggtcgtggccatctgccgcagggcctgcgtgcatggcgatgtggtgattgtgctgcatcaggatgctaccgatacgtggtccggcgtggaggagaaggttacgcagttggtggaacgcacgctccaggacggccggccgcggactgtcagtgtggtggtcgggcctgagggcggcatcagtgagcaggaggtagctgatttcgtcaaggccggagcggtgagctgcgtactggggcacaatattctgagagccgcgacggccggtcctgtagcgttgtcgctgttgtctcgggtgttgggacgttacgagtaacgcccacgcgctaagctggtgcgtagcaacatcaaaccaaggagcatgatgagcgaatccgacgattgcctgttctgcaagatcatcgcagggcagattcccagcagcaaggtctacgaggacgagacgacctacgcattcaacgacatcaaccccaaggccaaggtccacgtgctcgtggtgcccaagaagcactacgccaacgtcgccgaacttgccgccgacgacccgaccgagctggcccacatcgtctccatcgcgcagaacatcgccgacaaggaatttcacggcgcctaccgactggtgttcaacaccggtctcgacgccggccagaccgtcttccacgtgcacgcgcacgtgatgaccggcgaaaagctcgacgagtagtaggggaatatccgcttcgtggcaacgactacacgtaccatcaccatcccgccccaacttgaccccgtcgccgtgctcggcccggttgacgaggtcattcgcgaggtggagcgcgcctttccggacctgacgattatcgtgcgcggcaaccgcgtggcgatcgtctcccgctccaagcagaccgaagctcaagccgcacaggccgaggatttggtcaacaccatcatccaagccgcctacaccgcgcctatggacgccgacaccgtgcgtcgcatgctcgaccagaacgtgctcaagaaccacgtgcgcctcgaacatccaggtcacggcccggtgcatgacaaactggcgcaatcgacctcaaacgaacgcgcccatgcacgttctgccggctcccataacccgacgtaccgcaagcccacggttcccggcgtcatcacctttgccgccggcgtgccggtccgtgcgaaaaccgccggacaagtggcctacgtgaacgccatcgaatcgcacaccatcaccttcggcattggtcccgcaggcaccggcaagacgtatctggccgtggccaaggctgtgcgtgccttccaggacaagcagattcgccgcatcatcctcacgcgcccggccgtggaggccggcgaaagcctcggctttctgcccggcacgctgaacgacaaggttgacccgtatctgcgcccgctgtacgacgcgcttggcgacatgctcggcgccgaccagctcaagcggtacatggacgacggctccatcgaagtggcgccgctcgcctacatgcgcggtcgtacgctgaacgacgcgttcgtgatcctcgacgaggctcagaacaccaccgaacagcagatgaagatgttcctgacccgtctgggcttcaacaccacgatggtcatcaccggcgatatctcgcaggtggacctgaccgtgccgcgctcgggactggccaccatcgaacgcatcctgggcggcatcaacgacatcgcattcgtgcatctcaaaaccgaggacgtggtacgtcaccagctggtcggccagatcgtggccgcctacgaccgtcactccgccatcgccggcgaccaccgcgacatcgaacgcaagggccgccgcaaccataccgacttcgatgcccgccagcaaacggattcaaccaaccaaagtgagacagacgatgagcgttgacgtcaccaatgaaacccagtgggtcatcgaccccaaggtcttctccgatttgggtatttgggtactcgaccagatgcgcgtgagcacccagtccgacctgaccatcatgttcgtggatcccgatcccatcgccgaactgcacatgcgttggatgaacctcgaaggcccgaccgacgtgatgagcttcccgatggacgagctgcgcccaggcgacggcaaaaccgtgatggaaggagtgctcggcgacatcgtcatctgcccgtgggtcgctgcccaacaggctgccgcagccgggcacagcaccatgcaggagatgctattgctcaccatccacggcatcctgcacctgctcggctacgaccacgtgacccccgagcaggagcgccagatgttcggcctgcagcgacagctgctgctcaccttcttcgccctgcgccacgatgccaacgtgcaggccacgctgcccgccggcacacccgacgcgctggccctgtacgacgccgcgcacggtgctggccgcgacctcgattccaaataaacttccaaatcaatcacaccaaattcggattattctataccgttcaaggacattcaaggacaccgaaaaaacattatggagtattccagtaccacgctgatcgccgtcaccgtcattctcgtacttgtggcggccctgttcgtctggctttcgctgaccatggccgccgctgaaggcgccgtggcccgcgtaacgcgagccagcctcaacaatctcatcctcgaggtgcagaccgactccgaagcaagccagttcctcaagatgaagaagatcgacaagattcatcgcgtgcaacggctcatcgccgaccgttacgccaccgccggcagctgtgcgttcttccgcatcgcctgcaatgtgctcgacggcgtactggtgtcttccatcgcatccctgtggggtgcggaactgtgggttgaactgctcgccggattcctgttcgcgattatcgtagccgtggtctccgtactggtccgcccgcgcaccgccggcatgaccaagccggtcgacatcatgatttccaactcgcgcatcgtgtcgttggccaccaagctcacgccgttcgcacgcatcggtggcgacaagtccggttccaaggggtcgggccgtcgctccaaggactccgatctgtccgacgacgaggagcttgagaagattcagctcgagcagggcaaggccgccatcgaccgactggtggagtccaacgacttcgatccggaagtctccgaaatgttgcgcaacgtgctcaccctgtctgatacgttgactcgcgagatcatggtgccgcgcaccgatatgatctgcatggagcgcgactccacactgtcttccgcgctgaaactgttctcccgctccggtttctcccgcgtgccggtgatcggtgaggatgtggatgacctgatcggcgtggcctatttgaaggacgccgtgcgcgccaccgccttcaacccggcggccatggagcgcacggtcgaatccatcgtccggcagccgctgcttgttcccgaatccaagccggtggacgacctgttccatgagatgcagcgttcccgccaacatgtggccgtggtggtcgatgagtatggcggcatcgccggcatggtgactatcgaggatgccatcgaacagatcgtcggcgagctggaagacgagcacgaccgcacccagcgtaccgagccggagaaaatcggcgacaacaagtggaagatgcccgcccgtacgccgattgccgatctggaggagatcttcgagatcgacattgatgaggacgatgtcgataccgtgtacggcctgctgaccaagattctgggccgcgtgccgattgtcggtgcttcggccgtgacgcgcggtctgcgactgaccgccgtggactccgccggacgccgcaagaaggtgtccaccatcgtcgtcgaaccggcgcacgtcgagggcggcgaggaaaatagcaggacccatgaggaaactgacggcgagcccgtcgaaggcgatgataccgccagcaaggagtgatatgaccgaccagaacaacagcacgaacgacgtcgatgacattgacgtcaccgatgcttccgatgttgccggcgttgccgaagtcgacgcgaccggtgaaacggagaatgtgaccaagcaggacgtgccgtatcgctccggattcgtggccgtggtgggccgcccgaacgtcggcaaatccacgttgatcaacgcgttgatcggcaagcagatcgccatcgcatcctctcgcccggaaaccacccgtaaggcgattcgcggcatcctgaccgccgaccacgcgcagctcgtgctcgtggacacgcccggtatccaccgcccgcgtacgttgcttggccagcgtctgaacgacgtggtcgacgaatccttggccgatgtggacgtggtggccttcctgctgcccgccgaccaggaaatcggccccggcgacaagcgtattctttcccgactgcgtaccgacttcgccaccaagcgtgaggacggtacgttcaagtggcgcattccgctgattgccatcgtcaccaagatcgacgagcttggccgtcagcaactcatcaacaagctcatcgaaatcaacgatttcgccgatttctcggacatcgtgccggtgagcgccctgaagcacgacaatctgtctgaagtgaagaacgtgctcattgagcacacgcccgagggcccgcagatgtacccggacgatcagatcagcgaggagcgtccggaagacaccatcgccgaactcgtgcgcggtgcgttccttgagaccctggacgacgagctgccgcattcgctggccgtggtggtcgattccatcgactatccggaagacaacgagaccggtcggggctatgacggcaaggcgcaggtcaacgtgtccatttacgtggagcgtgactcacagaagccgatcatcatcggcaagggcgcctcgaacctcacctacgtcaagaagaagctgcgcaccccggtcaaccgcatcgtcggccaaaaagccaagctcgacctccacgtcaaggtagccaaaggctggcagtccgaccccaagcagctggagcgcctaggcttctaggaatcggccttcggccggttataacaaagggagattccaatggaatctcccttttgctgtactcgagtcctccttacttcttcttggtgtacatctgggtgttgaggagggtggagtagcgcttgatgaccttggggcgaatcaccttcatggaggcggtcatgaggccgttctcctgagtgaactcctcgggcaggatgatgaacttgcgtacggattcggcgcgggagactccctcgttggcccgatcgacccactgctgcacttcggcgcgcacggcggcgttccttgccgcgtcctcgagggacatgttctcgtcaagccccttggcggcgagccacgggcgcaacgacttctcgtccaacgtcaccagggcggagataaacgggcgtttgtcgcccagcaccaacgcctgggagacgatctcgcaacgctggatgacctcctcgatcgggccgggggagacgttcttgccgcctgcagtgatgatcagatccttcttgcgaccggtgatgtacaggaagccatcgttgtcgatacggcccaagtcgccggtggcataccagccatcttcggtgaacgacagctcagtggcctcgtcgttcttgtgatagcgcgggaacacggcacgacccttgacctgaatttcgccgtcctcggcgatgcgcagggagaatccggggaatgcgatgcccacggaaccagcgtggaacggcgtacccagcgggttgaacgcgcacggtgcggtggtctcggttagaccatagccctcgtatacaggcacacccgcgccacggaagaaagccagcagttcggggtcgagcggggcaccgccggccacaatccacttgacgcgaccgccgagcacttcgcgcagcgaagagtagacaatcggatcgaaggcagcgcggcgagtgcgggtcagtgcacctgccttgccattggcggagacttccttcatatagttctgcgcggccaccacggcggaggcgaacaccacgccctttggaccgtgtccggccttctgggacgcggcgttgtacaccttctccagcacgcgcggcaccacgatcatgagagtgggcttggccacctgcagatcgctgatcagcgtcttgatgccggtggcgatgtagatgcggacgttcgaggagacgacgatgtagttgatggcgcgggcgaaggaatgggcctgcggcaggaacagcaggatggtgttcctcttgtcgtgcagcagatcgggcatgtaggtcggcagattcagcgcggtctggcagtagtgttcatgggtcatttccacgcctttcggcgcggccgtggaaccggaggtgtacacgatggagcacaggtcggtcttcttgaccgaatcgatgcgctcgtccagctcctcgtccgagaccgtggtgccgtaggccttgatttcgtccaagccaccggtctcgatggtgatgatgtgctccagggacgggcactcttcgacggacccatccgccttcttacgcatgtccgtgtcctgcacgatcagcagtcgggcatcggagttgttgacgatattgcgaatctgctcggcggaatcggtgtcgtagatggtggcgagcacgccgccgcacgccatgatcgccgcgtcggtcaggtcccagtcgtaggaagttcggcacatgaatgccacggcatcgcccttcttcaggccgtaatgaatcaggcccttggccacggcacgcacgtcagccaggaactcgttggcggtgacggtcacccaatcgttgccggacttgtaggtgtacagcggctcatcgcccatacgttcggcgcggtccgcatacaggtcgtagatggacgtaccttcgtccagcggcggattgccttcggtggaggtggtgagcaggccggtggcggggtcgatgtcggtgacggtcaggtggccgtcgtcccaatcgtcgctgtgaggcaaagcgatattggtctcgaccggcacgtcggcgttagacaggtaatcgggctcgtccggggtgtcgtcgtggaccgggtggacgaagtcggatcccaacctgagcgccttacgggtgagattgatagtgtgctgcgtgaaggaattgataaccgacaagtcttgctcctgtaaacctttcagtgtcgtccagccatgaggcgaacgcttctcaaagttcaaattgtaatcgcccaaaccgaactcgtcaccttacgcaaccgtaggattctggcgggttaggggagtgcgtggcaaaatattgcacaggtcccgatattgttgagtaaccgtgagctacgaaacggtgattgtcgataattactgagcggttggttgctgatcgatgccgggtgattgttggacgacttccgagcaattcatccgcaatgcacatggacacattcgtatttctcactaatttcgggttcgtttctgtttcgattggcggaatctcaagtcatggcctttaccttccgactacactttctatgcggataaccatgtccattttgaagtagaacaagaaagggctctcatggcgcaaaacccagaagccaccgtggtgttcggcgttttgaatgaaacgtccgaaacggaatcccgcgtcgcgttgacgccggatatcgtcacccggctgaagaggagcggagtctcctcgattattgaggccggtgccggcattgccgccgaatacaccgatgaggattacgaaaaggccggtgcgaaggtgaccagccgcgacgaggtgctcgccgaagccgacgcgctcggttttgtggaccgaccgtccgccgagaccgtagccaagctcaaggccggccagtgggtcattggcatgctcggctccttcaccgatgccgattacgtggccgcgctcgagaaggccggtctggtgggcatcgccatcgaaaagctaccccgtaagctttccagcgcccagtccatggatgagatgacctctcagaactccgtgatgggctacaaggcagccatcaccgccgccgatgcttacggttccttcctgccgatgatgaccaccgccgccggcacgattcgcccggctaaggcgctggtgctcggtgccggcatcgccggcctgcaggccattggtacgctgaagcgtctaggcgcggtcgtcaccgcgtacgacgtgcgtcccgcctcccagggcgaggtcgagtccctcggcgcgaagttccttgatctgggacttgacttctccaagggccagggcgagggcggttatgcccgtgcgctgagcgccgaagagcaggctcagcagcaggctgccgtcgatgagaaggccgccggctttgacatcatcatcaccaccgccaaggtcccgggccgtaagcccccggtgctgctcaccgcagccggcgtcaagggtctcaagcgtggtgccgtgatcgtggactgcgcagcatccgacctcggcggcaacgtcgagggttccgccgtcggcgagcaggtcaccgagggcggtgtcaagctgattggcgctccctacctggcctccggcgtcgccaccaccgcatccaacctgctttcgcgcaatgtggccgacatcctcgtgcacttcgtgcgtgacggcaagctcggccaggatctcaccgaagaacttgacgacgcgctggtggttgccggccgcgccgccgccccggcagctgctgccgatgccgagaagtccgagaagtaaggaagaaggaataccatgcctactctcgtcgtttccattaccctgttcgtcctcgcgctgctcatcggtatcgaggtcatcggcaaggtgcccgccaccctgcacacgccgcttatgtccggcgcgaactccatccacggcatcgtcatcgtcggcgttgtgatcgtggcagccgaagccaatagcccactggcctacgtgttcatcttcctggccgccgtgctgggcaccatgaacgtcgtcggcggttatgtggtcaccgaccgcatgctcgagatgttcaagtccagcaagaacgagaagaagggggagtcgaagtaatgacctccgcaaccgttggcgccatcgacatcgtcgcatggttcgtctacctgttctctgccgtcctgtttgtggtcggtctgcatttcatgaattcgccgaagaccgcccgcaagggtaaccagatctccgcgttcggcatggtcgtggccgtgctcatggcgttcatcgtgcttttcgccaagggcttcgtgaacattgtcgccgtggtggtgctggtcgtcggcatcctgatcggtgccgtggccggtgtcgtctccgccaagaaggtgaagatgaccgacatgccgcagctggtttccgtgttcaacaccgtgggtggtggcgctgccgcactcgtggccctgaacgacatcctgaccaaggaaggcaccccggacatcgtggtgctcatcaccgctggtctcggtatcctcattggttctgtgaccttcaccggctcgctcatcgctgccggcaagctacagggcatcaagtgggtcaagaagctgaacctgccgggcaagggcgtatggaacattctgttcgccgtgctgtctgtcgcctcgctggtcatgctgtgcgtccagcccgaacagcgtctgctgtggtcgattctgaccaccgtgttcgccctgtgctacggcttggtcttcgtgattccaatcggcggcgccgatatgcccgtcgtcatctctgtgctcaacgcctgcaccggtacggctgtggctatgtccggtctggcgattgacaacgttgccctgatcgtggccggcgcactcgtcggttccgcaggtgtgaccctgtccatcctcatggctcaggccatgaaccgtccgctgctctccgtcttggccggtggcttcggcggtggtgctgacgccgccgctgctggcgacggtccggaaggcaccatgaaggagaccacgccggacgatctggccgttcagctcgtctacgcgcagaaggtcatcttcgtgcccggcttcggtctggctcaggctcaggcccagcgcgagctcgctgaccttggcgaactgctcaagggccatggcgtggaagtctcctacgccattcacccggtcgcaggccgtatgcctggtcacatgaacgtgctgctggccgaggccaacgtgccctacgaggagctcgtggatctcgatgagatcaacccgcagttcccgcaggccaacgtggctctggtcgtcggcgccaacgatgtgaccaacccggctgctcgccgtcctggcaccccggtttccggtatgccgattctcgacgtcgacaagtcccagaacgtcgtggtcatgaagcgtggccgcggcatgggctacgccggtatccagaacgaactctacttcgaggacaacacccagatgctgttcggtgacgcgaagaagagtctgcagtccgtcatcgccgccgtcaaggaactgctcgcgtaaccattcttggctcccctcacagaggggagccaagcttctatatctactacagcccaaacacccgcttaacaaagccgttaacgcgacgccaatagtggtccggatcggtgctggcgctcatcgtgtggtcggcgccgggaatcagcagcttctcgcggtcgatgctggcgcaggcgttgtaattgatgtccagatacttcgggttgacaaaagtatccgctccgccatgaatgaacatcatcggaatagtcgcgtgccgtaatgccttcacacaggaggcgtcctcaaaccggtatccagccttgcgtttagacacatgactggccactttgaccagcagcacggccaacgagtgcggcaaacggaacatcgcctcggcattatccgtaaactgcgagaccacggaactgtatccgcaatcggaaatcgcggcgacgacgttgcgggggagtcgcgcatcgccggccgccatcatcaccgtggcggcgcccatcgaattgccatgcaacagaatgcgtgcatccggatcagctgcggtgatcagcgaaacccagcccaacagatcgtcgctttccagcaatcccatacccacgtaacgcccttcgctcaattcatgggcgcgctgcgcgggtagcaggaccgtaaaaccgagttgcgcatagcgatgcgcccatttggccatttccgcgggctctccggtatagccatggcagcagatcgcgtatagatgcggctgtgggtcggaacaatccgggtccaacagccagccgtggagtttccatccatcatggctgcgcagcgtgaccgattgcttggcctcctcgaaccaccgggtggcctcaagctgctcggacatgtcgaattcgatgcctttcggcgtctcctcgtgcggcatgttgaacatcgaacgtttggccttggtgtccagcgcgaacatgaacatgacgttggcggccgcggctgtgacgccggctccggtggcggctatcgcggcaagtgccgcagccatacccctgacaacgcgagtgtgtgcggcgatgacgtcatggccatcctcattgatgacgtcgtccgaacgagtcatatcaacctcccgatacggtactcaccatcgtacgttatttttcgaaatcatccccaacttcgtgaaagaccgtacactgagtgtcgctgagcgtacggttttcacgaaatggcgaacgatttcgtgaaaaccgtatgatgagaacgggtaagcgtacgttcttcacaaagttagggattatttcgcggaaaccgtacgttgacgtagctgggacggcctatatgcagtgtcatcgaagcatcattacgcaaagtccggggttggcgtatacttgacaattgttgctttggcgagggaagtgtgcatgctgacacatgacacagattccgttatcgactcggcgtatttcactccttgtagggtgtctttcggcgcgtcgtggcgtctgagcgagacagtacgaaacgaagatacaaggagtatccattatggctaccaccattaagcttgagggcgaggcccgttccgagttcggcaagggcgttgctcgtcgtctgcgcgttgccaacaagattccggccaccatctacgccggcggcgaagagcccgccttcgtgaccttgccgatgcgcgagaccaccctggccctgcgtcacaccaacgccctgttcaccatcgccttcgacggcaacaccaagatggccgtcgtcaaggacgtgcagaagaacccggtcaagcgcatcatcgagcacatcgacttcctcgaggtcaaggccggcgagaagatcgacgtcgaggtgccggtgttcgtggaaggcaccccgaagggtgctgccgtggcgttcgtcgacattcaggagctcaaggtccgcgccgacgtcaccaacctgcccgagaagatcgtggtcagcgtcgaaggcctgaccgacggcaccaaggtgttcgccaaggatgtcgtcctgcctgagggcgtcgagctggacgtcgaggatccggaagagtccgtcgtcaccgtcgaggtgccggaggatgccaccgagtccaccaccgctccggaagctgctgccgccccggctgacgccgccgctgctccggctgccgacgccaagtgagtcggtcgcttcgatagcgaacaattcagaacataactgaaacgtggaagcccgcagccgttgagaacggtgtgggcttcttcgttttttcaccatgtgaactctgccacacgagtaacacatgggtgtgcaaaagtatgcaacagagttcgcgccacaagcgcacagcacacaccccatatggtggctttcgggccgccaaagtcaagaagaagtagctagtgatgactgaaaacacgcaccacgatccggcagcactcgacaagctcaccgaaccgttcaccgtactgccgaacgacaaccccgcatccgatgagaagcgccagtccctcatcgacaagccggctttcggccaggtgttctccgacaacatgacccacatgacttggaccaagggcgaaggctggtccgaccgccgcgtcgaaccgtacgcaccgctcaagatggacccgggtgcttccgtgctgcactacgcacaggagtgcttcgagggcctcaaggcttaccgtcatgccgacggctccacctggctgttccgcccggatgcgaacgccgagcgtttccagaactccgccaagcgtctgtacctgcctgagctgccgattgacgacttcctcggttccgtggccgcgctggtcaagcgcgacgccaactgggtgccgtcccgccgcgagtacacgctgtacatgcgtccgttcatgttcgcttccgagccgttcctcggcgtgcgcgccccgcaggaggtcgactactgcgtgatcgcctctccgtccggcccgtacttcccgggcggcgtcaagccggtgagcatctgggttgaagacaagtggttccgcaccggccctggcggcactggtttcgccaagtgcggcggcaactacgccgcctccctgctcggcgagtacaagggtgttgagaatggctgcgagcaggtgtgctttgtggacgccgccaccaagacctaccttgaagagctcggtggcatgaacatgatggccgtgcacaaggatggccacgtggagaccccgtccctgaccggcaacattctgccgggcgtgacccgtcgctctctgattcagctgctgcaggacaagggccacgacgtggtcgagaccatgatcgccctcgaccagctgctcgaggacatcaagtccggtgaagtcaccgaggtgttcgcttgcggtaccgccgccatcatcaccccgatcggtcgcttcaagtccgagaagttcgacgtcaccgtcgccgacggcggctccggcaagctcacctgcgaactgcgcgacgagctgctcggcatccagctcggcgaagtcgaggacccgcacaactggatgtggaaggtgtgctgaactagcaccttttgtttccgactaagaccccttagaatgtcaacaattccaaggggtcttggcgtattggaaatgttcctggctagagaggtacagatggatttagcaacatttcgcaacaaataatatgatttaggtcttctgcacgttgcgggggttggttatggttcatccagatgagaacaggagcaaacctatgagcaagatgagtgacatgacggaatactatgcttcagcctaccgtttgccgtcaggcttcgagcattgctcgaaactgaagccggtggcagaggcagcgacggcgttgcgtcggtggtgagacaagacatgagcttctggcgacgctgggggatgttcaatgtcagtaatggttcaaggtttggactgctgacgtcgctgagacaccttagcgtcgttaacgggtcaagttctggcgatcaaacgacggtaaaaaggggcttagcgtcgttagctgtacataagttggcacggcaacgacactggagcgcgtgatcgtcggtgccgtgccaaactttggccaacctccgacaaatgagaaggactaacgtcggtggctgctcaaagtttggcgcgctggcgacgctgtaagaaaaaagtgtggagtcgaaccggcaatagcatttattcggtttgttctctagtccaattgcgtcaggcaaggcctgttgtaggctcgggtacgacgggctgtagcgccgaataaggatgaacgggaacagaacgaagacggactgagacgaaccgaagcggtaccagaggggagcggctcatgcaggtggtgttggagaacaacatcgtttttgtggtcatcgagtatttagcaatcctgtgttggggattgtcgggcggacttgccgccattcgcaagggctacgacatcttcaccatcatgctgtgcggatggcttaccgcactcggcggcggtcttgtgcgcgacgtgatgctcggtgccctgccgccggtcggcatcaccgacaaaggctatgtgctcaccacgctgttctctggcgtcatcgcggtggtggcccacccggagatcaccaaactcaaatggacgatgactgtcatcgatgctctgggcctcggactattcgcagtcagcggcaccgcaaaagctctggcctacggttcctcaggcatgacagccgtattccttggcatgttcacagcactggccggcggcctcattcgtgacatcttcatcggcgatgtgccaatgattattcgagacaaacacctctatgccgtgccctcgttcatcggttgcattctgaccgtgcttgtatggcgtggtgtgcactacggttggttcgacatgtgctcggaaatgctgctcgacgtgctgatcgtcatcatcgtggtggcgctgcgcctgctctcggtcggcttcaacgtcaccttgcccggagccgtcgagcgtcatcgcgtctacctgcccagcgaaagccgatatctcaagcgcccggtcatccatccgcacgccgataccgtcgatcccggcgataccaccaaggacgaagaagacaagcctcaggatgattcaagaccgcctcagggctaactgccttcaaagaggtacatttggccttctgcaaaatgacaactgctttcaaagaggtgcctgaagcacgaaacgtcgagtataagcgttgcaatgacggcgtttatacttgggctttctcggattcggtacctttctgaacggagatgtcatttcgcaagaccgccaatgtacctctttgaacggagatataaaaagtcccgcaagccagatgacttgcgggacttgctaaaaccttaagaggcttatgctcacagagcgttgatcgcaacagcgaggccggacttgcggttggcggcctggttcttgtggatcacgccagcgccagcagccttgtcgagcttctgggcggcaaccttgtaggcggcctcggcggcagccttgtcaccggcggcgatggcttcgcgggtggcgcggatggcggtcttcaggccggacttcacagccacgttgcgaaggtgcgccttctcattggtgagcacgcgcttcttctgcgacttaatgtttgccacgtttactccaaacgatgtgtgttataaggacatacaaaaggtagaggatagcatgagccccggaaaaacccgcgcaatgccacgccgaatacagtccctcggctacactaggtgaagtttgagtatatgccaagaggaggaatgcgttggtcgtccaacacaatcagccgggttccacggatcagtcggtgattcgcaacttctgtatcatcgcgcacatcgaccacggcaagtcgaccgtggccgaccgcatcctgcagttaagcggcattgtgcccgagcgcgagatgcgcgatcgcttcctcgaccgtatggatatcgagcaggagcgcggcatcaccatcaaatcccaggccgtgcgcgtgccatggacctttgacggcaccgaatacacgctcggtatgatcgacacccccggccacgtggacttcacctatgaggtgtcccgcgcactggccgcctgcgaaggcgcggtgctgctcgtcgacgctacccagggcatcgaggcgcagaccctgtctaacctgtacatggccatcgaccatgatctggccatcattcccgtgctcaacaagatcgacctgccgtccgccgagccggacaagcatgccgaggagatcgcaggtctgatcggctgcgagccgagcgacgtgctgcgcgtctccggcaaaaccggcgaaggcgtggccgacctgctcgaccagatcgtcatggacgtgcccgccccgcacggcgaccccgaggcccctgcccgcgcgctgatcttcgactccgtctacgatccctaccgcggcatcgtcacctacatccgtatggaggacggcgaactgcacgaccgcgaaaaggtccacatgatgggcattggcatgacccacgatcccatcgagatcggtgtgatcagccccgatatgacccgtaccaaggcactcggtgccggtgaggtcggctacatcatcaccggtgcgaaagatgtgagtcagtccaaggtgggcgacaccctgacctcggccgtccgcccggccaccgagccgctgcccggctaccgcgaccccaagccgatggtctacgccggtttgttcccgatcgacaacgcgcaattccccgaactgcgtgatgcactcgacaagctcaagctcaacgacgccgccctgatctacacgccggaaacctccgtggccttgggcttcggcttccgctgcggcttcctgggtctgctgcacatggagatcgtcaacgagcgactctcccgcgagttcggcctcgacctgatccagaccgccccgaacgtcacctacgacgtgaccgccgaggatggcagtcagcatcatgtgaccaacccgagcgaattcccggacggcaagatcaagaagatcgtcgagccgatggttgccgccgacatcatcacacccaaggaatttatcggtgcggtgatggatctgtgccaggaccaccgcggcattatgggcacgatggagtacatctccaccgatcgtgtcgagatgcactaccgcattccactggccgaaatcgtgttcgacttcttcgaccagctcaagtcccgcaccaagggctacgcttccctcgattaccatgaggatggcgagcagtccgccgatttggtcaaggtggacatccttattcagggcgagaaggtcgatgcgttcagtgccatcgttcaccgcgataaggcgtattcgtacggtgtgatgatgaccaagaaattgcgtagtctgattcctcgccaacagtttgagattccgattcaggccgcaatcggttcgcgtatcatcgcgcgtgagaacattcgtgcgttgcgcaaggacgtgctcgccaagtgctatggcggcgacatcacccgtaagcgtaagctgctcgaaaagcagaaggccggcaagaagcgtatgaagatgctcggccatgtggaggtaccgcaggaggcgttcatcgccgccctgtccaccggcgaggactccaacgaccgcgacaccaaagacaagatccgcgccgctcagaagaccgagggctagtgttcgaggtctacatccacgtcccgttctgcttgcggcgctgcggttactgcgacttcaacacctacacggctacggatcttggtgcgggggcctcgcgcggcaactatgccaatatggtcattcgtgaaatggccctgaccaagcagtggcagctcgaccacggcatcgaggagccaccggtctccaccgtgttcttcgggggtggtacacccacgattctcgccgcccgcgatctggtcgccatgctcgatgccatccgcaagatctggagcatcgcgcccgacgccgaaatcaccaccgaagccaacccggacacggtcaacgaatattacatcaatgagctcgctgccggcggcttcacccgcgtttccttcggcatgcaatctgccgtgccgcacgtgctcaaaaccctcgaccgcacgcatacgccggccaacgtggccgcaggcgttaatgccgccaataaggccggcctgcgctccagcgtggatctgatttacggcgcaccgggggagagccttgacgattggcgcacctcggtcacgaccgccatcgacctcggcgtgaaccacatctccgcctacgcactgaccgtggaacccaccacgaaaatgggtcgtcaaatcgcggccggcactctgcccaaacccaatgacgatgacgaagcagccaaatacgaaatcgccgacgacctgttcgccgccgccggcctcgaatggtatgaggtctccaactgggcccgccccggatacgagagccagcacaacctcggctattggcgcaacgtcgattgggccggtctagggccaggtgcccactcccactacaacgcggtgaccgaggctgaccacccccagtcggcttcgctgacagcccccgccagcgggggcaagtccgaagccattgcctctgcctcagctgatggacaggccaacgccgaacttggagaaaccaacgccgaactaggtatgatcaacgcgcatgggaacaactcccaagaaattcatgcccccgctggcgggggctgtccggcggatgccggactgggggtggtttctgtctcacacggtctgcgcagctgggacatcgcgcacccgcgtttgtggggcacggccatcaacgagaaccgtgtgccgtgggccgatagcgagacgatcactcccgaggaaaacctcgaagagctcatcatgctcgggctgcgcctgcatgagggccttggcctcgaccgcatcaaccgcgccatcaacgatgcaggtatgagcagcacgccccagactctccgaaccgtttcggttgaccaactcgcccccatgatcagcgaaggcctgattaccgtatccgataatcatcgagtggtgcccactcgtcgtggccggttgctcaatgactcggtaatcgaacagttcttcgattacgtcggtgtatgagtcggtggtatggtgcgcggcagtcgccattacccgttcgctagttgtggttacaccgtcagagggagcttttttgttttaccggcgggggagggaaccgcgtaggactacgtccggggcgctttgcacgtagatcaggcggttggcagtgccgccggtggcctccgcgtcatcgcggttggacaggatgctgtccacggcggcctggcccatttcggccagcggcagatgcacggtggtcagtggtgggaacacgtcggcggagtaggggatgtcgccgaaaccggtgacgccgatttcctgacccggctcgatgccgttggtgcgcaacgcggtcatcgcaccgatggccatcacgtcgttgagcgcgatgattgaatcgatgcctttgccgtcgtacagtgcgccttcgcccggcttcagcagtccggatcgggccatttgcatgacggccgcatagccgtcggtgcggctgaacttaccgtttgccacggctttcgggtccacggtgatgcctgtctcgtccaacacttccatcacaccggccagtcgttctttggaggagcggtgtgcgtcatcgcccttgagaatcgcagggcgcgtatacccggaatcgacgataagctttgcgatggcacgcgcgccgacgtcgttcgccacgtccacggccgggaagggcaggttgcggttgagtacgaacacggcatgtccgccggacgattcgtactggatgagttccgtctgcaacgcctggcgttccggcgcgtcggtgtattcgctttcggagatgatgatgccgcgcggcctggtggatacggacttacgcaccgcctccaactcctcgtgcggggtggctgccacgccgatggtcacggagatgccgcgttcggccgccgccttgaccacgccttgcgacacggatgcgaagtagggatcggagatatcggagaccagcagcacgatgttcggtgcagtgcctttggccactgcctgagcataggcgttgggacgatagttgagcttggtggctgcttccatcaccttgacatacgattggttgcgtaccttgcgggtgctgccgttgagcacacgggatgcggtggcgatggagacctgggcttctttggcgacgtccatcaatgtcgctggcgattgcgccttatcgttctgtacagccacgatcgaatcggtccttttcttccctgaaacggaaaacatgtctaaacgcttaccgcaatgatatcgcagttttgcttgcaatagtagcattgtggattggaaagcctgaattttgaacaaaaataatcacgcgaattacggaaagcgcttaccgttccgcgtgtcgtgcggtatgctcgaagcatgacgcgatacttatgtgcccctgactccttcaaagagagcctgaccgccatggaggcggcccgggcgatggctcaggggattgagaatgccgaccacgatgccgaggtccgttgcctccccatggccgacggcggtgaaggcaccgcacgtgcgcttgtcgacgccactggcggatcgatgcacgccgtgccggtccacgacccgctcggccgacctgtcgaaggccgcttcggcctgctcgccgacggcacgaccgccgtggtcgagacagccgaagccagcggcctcgcactgcttgaagccaaaaaacgcaacccgttgattgcctcctcctacggcaccggcgaactcatactcgccgccgtccgttccggagccaagcgcatcatcgtcgggctcggcggcagcgccaccaacgacgccggtgccggacttctgcaggccctcggcgttcgtcttctggacgggaacggcaacgaccttaagcacgggggagcggccctcgctgatctggccaccatcgacatcagcacgatggacccggctctcaagaacgtctccatcaccgccgcctgcgacgtgaccaacccgctgaccggtcccaccggcgccagcgccgtgttcggaccgcagaaaggtgcctcccaggccgacgtcgccacactggacgccgcgttggcgcacttcgcgcaggtcatcgaaagccggctcggcgtcgctgtgaacgacgtgccgggcgcgggcgccgccggcggtatcggcgccgcgctgaaaggcttccttgacgccgaattccgtccgggcatcgccatcgtcatcgaacaatccggacttgatgcggccgcgcaatgggctgacgtggtgttcaccggcgaaggctccatcgacttccagaccaagttcggcaaaaccccggccggcgtggccgaaaccgccaagcgccacggcaagcccgtgatcgccgtcgccggacacatcggcacgggcatcgacgaactgcatgaggtcggcatcgacgcggtattcggcatcgcccccggtgccgccagcctcagcgaactgctggccgacgcggccgccaacgtgacccgcaccaccgaacaagtcgtacgaaccctacaactgaagcagcttcacaagctccctctgatgggccgagccgtgaaggaaacgccggaggcgtttccaggcgagggcttgacgacagtcaagccagccgaaggctccataattgcgggacgagctgccgcggcaaagccgtgactgagggggagacttgtggcgcagccgcaaaaaatggcatcggctttcagccgatacagtcattcgtctgcttctctccctcagtcagctgcgctgacagctccctcgtcagagggagccacacaattcggaaagaaagatatgcgcaccatgctgtacaccaaggtgaccagcatgctgagcaccacgggcatcgccagcgagaaatacgccttcggaatcggcgccttttcgaagagttcgttatccatttccgtcccttggtgttttcgtccttcagtcactgcgcgggatgccgttcggcgtgcatcacaggcattgtagaggcaacagtgtggacaacgggcggggggagtatctcatgatgcggtgagggcgttgatgatgacgcatcgtgtattggtggccgtgtgcatcgtatgtgaacctgtgctggcacggcgtacacacgatgggaaaagaaagaatatatggaccccgttgtcccggttattgttcagttattactgtgttgaattattgcgttattcaattattgtggtgtgccggccgattgcggcctgcgggggattgccttcgtatgtgtcgtgcaatctcatgaatgggatcgttcgctagattcagcgagcgtccttgttggcggcgttgatgatgtcggcgaacatcttggagtcggcgtagccggcgcgggcgatggcgtccataccggagagggtgaaaccgcgaatcatggaatccatgaatgacataatgtgttccttgtcttgacttgcaaagccgtgggctttgcgatgtgttgttgtttacgttatgagacgggccgtgtgtgagcggcgagtcagggaagaggctcagcgagcgttcttatcggtgtcgttgatgatgtcgagaatcatctgggagttggcgtgaccggactgggccagggaagtggcaccgtacatagccagaccgcgaatcatggaatccttgagagacatcatgtttcctttcgttggtcaaaaccttgtggctttgagttttgtttatcggtttctttctgaaaccggtttcagaataacgcagtccgatgacaaacgcaaggggactattccgctctcggcgtttctggcggaatatcgccgttctatagataccgttcggtagttaagaggctgtctagtcgactttctgacggtcttgttctgggcgcatggttttcacgaaatggcctcatgtcgcggaaatcgtacgctgggtcgtcgtaagcgtacggtcttcacgaaatggggtctcatctcgtgaagaacgtacactgagtcgttctgggcgtacggttttcacgaaatggggcctatcttcaccggattttgggcacaccggccttgagcagcttggtctcaagattgatggggcgtagcagatcctcatagaacacatggacgatttcggtgacgccctgttcccggagatgccgatcacgtctgcggtcgtactccattttcgcctggaggcttgcgcgattcttgttgctggtgtcggcgtatttggccatgccgtcgtattctgccacgatgatgcggccgtctgcgagcttccaacagaaatcgacgcgatatggcattgcgggattgtcgggattcatgaactgcacctgcagcaggggaatgccgaaagacaattcggtgatctggccacgcatcaatgattcgccgccgttttcgctcaggggatccgcgtacttcagcagcttggtcacggagacctcgtcgcagacgctttgaatcatcagcgactgcacctcttcgatggtcgtcagggactttctcagagccgaatcgtatatgggcagcgcctgtgggaatgggaatgccgcgcagtcgagcagcgttcgcgccggagtcgtcaagagaatgccattatgcttccgcgtcggaatccgattgatatagatgcggttgagacgcgcctcgtctccgccgccgatgccggacttcgaggcgatgtgcactgtgccgtcgtgcagggaatagttgtgctgcagtccgtatacgcacgccgcactcaaccccgcaaatacccactgagggtggattgcggacagcgcacgtatgacctgcaatgactgttgctctctggtcatggtgttccaaagtattcggtcggcgtacaggttcttatacggtgacaccagctccccggcatgcaggcgacgtttcagggcgcgccgttgcgcatcactggtgccatagcagcagcgacgctcctgcttcgcctgctgcagcagcgcagaaacttccttgtgttctttcatatctcgacgctaagggtgattttgattgttgcacaagctcaaccggcaaatgtgaatactatgtcacgcgaattgttggtgtggataacttgaatcgacgtcgacggctttgccgacggtcttgtcggaggcgatattagcctaggacaccttgctgcgccgccttccataccgagaacagtcatcagtgacaccgagggcatcttcagcgtatgttcttcacgaaatcagctgccatttcgtgaaaaccgtacgctcagaatgactcagtgtacgttcttcacgagatgaggccccatttcgtgaaaaccgtacgttgacgacgattcagtgtacgttcttcacgaaattagggatgatttcgcggaaaccgtacactcaccgcaactcagcgtacggttttcgcgaagttattgatttggatataggttccccgtcatgaactacaatgaatcgcggcgaaaaacggggaaccgaagtcggagcgcggctgaacggatatgggtgtgactggatgactgccatggtgatgccggttctccttgacgtacgcaataacaacaactgacaacaacaggggagacaaggatggcgagaagtgcgggccgcacccgaccggtgatcaaggacgtggccagactggccggagtctcggcaccgaccgtctcccggtatctcaacggcaccgtcaatgtcaccgaagacaagcgtgaacgcatcgccaaggccatcaaggagctgggctatgagccgagcattgtggcgcgcgccctgtcgaaccgggagatggactccgtggtggtgttcgcggccaatccttccgccttctccacgtccgaaacgaaccatggggtcgaggccgccgcccgtaaacgtcggttcctgctcaatatcgtttctttggatgagtccgacatggactccgtcaaggctcgtgtgcgcatgggtttgtcgatcaggccggcgggcgtgatcgtctacgagtacgaccgggccggcatcgccgcactggaatacattcccaaagatatgccgatggtcgtggtgggtggcagcttcggcgacggcgaataccagatcatcaacgccgaaagggatggtggccgttggatgaccatgcatctgctggatctcggccatcgcaccgtgttccatgtggggcgcccggaaggaccgaccgataacacccgcaccaatgggtggcgtgacgcgctcaaggagcgcggcgtcacggtacctgacccaatcatcgtgcccgacgatgatttggaggagtcggtcaaggctgggcgcaccttgggccgtcgtggtgatgtgactgcgattttcgccggcaacgacgagaccgccatcgctgtgatccgaggtctaagggaggttggtcgccgcgtgcctgctgacgtgagcgtcgtaggctttgacgaccgcaacttcggtgccatgtggaatccggcgctgaccagttacacccagaacttcctggacatgggggagcggtccttccggatgctgttcgaacagattcaggccaagcgtgccggcgatgacgcgccgccctcgcaggtcgaagtggtgcaaggcaagccgtgtctgcgtgcctccgaacgcgcgtacggcgacggcgaaatcgcgtagtcgatggggcgtgcgtatcaatcgatagtgactgtagcgcattcatatcgtgacgaggagtctcccatgccgaactgtaagcgcttaccttaaatagttcataatgtgatttacgtcatactaatagatgttctgaatcatagtgttctgtaaggattccttgcggaaaatggctatttatcaacagttttcgaaaagtccgcatgatgggcgactgtgagcacgctttatggtaatcgctttccgtagtgttattgttacagtgtgacttttgaacaatcggtaactctgaagactcagccccagacctcgggcactatctcagcggcagacgccgcgatgcaatcggcccgcgacgaacgcatccccggcaaactcatctgcgcgatcgtggccgtcggctcactcgcattcttcggcatcctgaccgaaaccgtgatgaatgtgctgttcccgcagctgatgggcgtgctccacatcagcgaggccaccatccaatggctcaccaccggctatccgctggtcgtgtcgattactgtgccgctcagcgcatggctgcgccgtcgcttccgccagcgcagcatcttcctggcggcaacgcgatgttctccacgctgcagcagttcacgggtgcggccggcaccactgtggtgggctaccgtgatctccgtgttccagtccggctcgggcaaggtgggttccgccggctatgccgccgccaccgtgaccggcgcatagattgactacgcgatcatggctgtggtcatcgttatcgttatcgtgttcgtcgccatgctccacgccctgcgtaaccggaagtagatggtaagtcgagtggcaccatgctaccgcgcaacggctgggcatggagttttggctaggaatcgttcgacaggcgttggcgcggccgctgagagcattcgcgtcgaaaggtttgccggagctcgttcggcgtggaatgggccgattcaccggtgattgttggtcaaacagccaatgctgacccttctgccaatggttagcgaggttcctatcataagcatttcggagagcgatctcgaaaaaggcgacatccttcacgaggatttgaccaaggtcaacattccactcgtataaagtaaggctgtaagcgcatcttggtggcaagcgtcaaggtatgtacggaatcgcggggcgaaaagccactcctcaatccactgcggattggtaataacggatgattgtaacgcatgaatcacgaggcccccttacctcgtattgcaatgccccggtgacatgaaaaacggcggtcaacacggggcttgtacattaaggatacaggaagggtagttataagttgctgatatgccgtgttttttacgatagtcatcggcctctcccatacggcggaacaggaactgacggatgccgagatgccgtgattcggcgggaggacctgtactggcccagtccttctgctcggtagcggtaccgctacgccgactcttcccgacgctccagtgccgccgatatcagtgaatgcccagcctgatgtcggtagagttaaggctattggcttggtctcgacggtgagacttctccaatggccaatatgcactgttgcaaaggagtatgcggtatgcaaccaatcaaagccattcaatacggctgcggcaaaatggcgaagtacacgattcgctatatgcacgagaaaggcattcaaatcgtcggtgccatcgacgtgaatccggaagtcgtgggcatggatgccggtgtgtttgcaggcatcggccccatcaatgtgccgattcgcgccgatgccgaggctgtactcaacgagtgcgacgcggatatcgcggtagtcacgctattcagcttcgagaacgaaatcgccaccatgtgcgagcagtgcttggcccgcggcatcagcgtgatcaccacctgcgaggaatgcatctacccgtggaccaccgatccggccaccacgaaccgtctcgacatcatcgccaaggaagccggtgccaccatggtcggctccggcatgcaggacatctactgggtgaacatggtctccaccgtcgccgccggatgccacagcatcaagaagatcaccggtgcggtgagctacaacgtcgaggattacggcctggctttggccaaagcgcacggctgcggtctgaccgccgaggagttcgaggccgagcttgcgcatcccgaaaccgtggtgccctcgtatgtatggaattccaatgaagcgctggcccagaagcttgggcttaccatcgcatcgcagacccaggccagtgtgccgtatttcagcgatgtcgacgtgtattccgagacgatggacgagacgattccggtcggcaaatgcatcggcatgtccgccgtggtaaccaccgaaacgaatcagggcatcacgttggaaactgcctgtatcggcaaggtgtacgggccggatgatggcgatatgtgcgattggaagatcgagggtgaaccggacgtggagttccacgtggtcaagccggcgaccgtcgaacatacgtgcgccacaatcgtcaaccgcattccggacgtgctcaacgcgccagccggatatgtgacggtcgatcagctcgatgaaatttcatatctcacgtatcccgccgcgctgtacgtggcatagacccatattttcagggatgaaggccggcactcataagggtgccggccggtatcaggcggccagagtcgacgtgcgtggcatcacctggaactggatatggtcatgggtgatgtcatcgggccgttcatgccgtaggttcgactcgatcagcgtcaccatgcgatcgataaccgtacgagccattgcggggacgtctatcgccacagtgctaatgggtgggttggcgcagtcggagaaggggaggccgtcgaatcccatgagccgtacgtcgtcgggcacgcggatgccatgttcggtgagttcgcggagcgcgccgatcgctatggtgtcagacatgcacaggatgccacaatcgcccgggacaggcgtcaggaccgcaagcagcatcctgctcggcatcggcggcgacatcgccaacttcaaaagcgcggcccacctggccgcccacgccggcatcgctccggtcaccggccagtccggcaccagcatcaagggcgagaaaccctccagacggggcaacaaacgcttatagactttgcgccttgtataaatgcgaactgccagtcaaccttaccgttgactggcagttcgcatttatcgctcccgctggcgggagctgtcatgcgaagcatgactgagggtggtccacagccgccaatccgtaacatcacccaacgcagcatttcacgatacggacgtttccgtatcgtattttcgtgtggccaaatagacatttcgggcgaaaaagttcgaaatacccccataactggccataaaaacaattgcttgagaatcactattgacttttatggcgactcggtatatggacacgcgaaacgaaaatgacatggagcaacggtactgtgtcaacagcaatgaacgaagaggcacgattcccttacgtgcccacaagcaattgaggtgattccggtgacattcaaagccccgctcgatctcacggtccacgctccggacggtatgtatgatcccgccaacgagcatgacgcctgtggtgtgggtatggtcaccactttgaacaagcgtcctgaacgcaaaatcgtcactgacgccattgaggtactggtcaatctcgaccaccgcggtgccgtgggtgccgaggagaacacaggtgacggcgccggcattctgatgagcatgccggatgagttcatgcgtgccaccgtgcccgccgaactgcccgaagccggccactacgccgcaggcatcgccttcctcgaccgcgacatcgaaacctccggtcagcaggaacaggccattgccaagatcgtgcgcgaggagggccttgaagttctcgcatggcgcgtggtgcccaccaacccggacggcctcggcctgcaggcccttgccgccatgccgggattcaagactctcgtggtcgcctctccggacggtgctctggccggcgtggacttggatcgcaagaccttccgcatccgcaagcgcgtcgagcatgaggtaggcgtctacttcgcttccctgtccgcccgtaccatcacgtacaagggcatgctcaccaccatgcagctcacccacttcttcgaggatctgaacgacgagcgcatgaaggccaccatcgccatcgtccactcccgcttctccaccaacaccttcccgagctggccgctggcccagccgttccgtctgctggcccacaatggcgagatcaacaccattcagggcaaccgcaactggctctccgcccgtgaaggtcgtctgagcagcgaactgctcggcgagttcgagccgctgctgcccatcaccactccgggctactccgattctggcaccttcgacgagtgcctcgaactgctgcacctcgccggccgttccctgccgcacgccatctgcatgatgctgccgccggcttgggagaagaacccggatctcgatccggacgtgcgcgccttctacgagtacaacaacacgcttatcgagccgtgggatggcccggccgacatcgtcttcaccgacggcacccaggtcggcgccctgctcgaccgcaacggcttccgccccggccgctggcagctcaccgacgacggctacatcgtgctggcctccgaggccggcgttctgccggagatcgcgcaggagcacatcgtgtccaagggccgtcttgagcccggcaagatgttcctggtcgacaccgccgaaggccgcatcatccccgatgaagagatcaagaagaccctcgcctcccagcacccgtaccgcaagtgggtggaaggcaactcggtcgagatgagcgatctgccccgccgcgagcacgtgagccactccggacagtccgtccagcgccgtcagcgcgccttcggctacaccgaagaggatctgaagctgttgctcactccgatggccaacaccggtaaggaaccgctgggatccatgggtaacgatgcgcctatgcccgcactctccagccgcagccgcatgctgttcgactacttcacccagaagttcgcgcaggtcaccaacccgccgctggactgggagcgtgaggagatcgtcacctcgctcgaatccgccatcggccccgagcctaacctactggccgattccgagctgcacgccaagaagatcctcatcccgctgcccgtggtcaactctgatgagatggcccagctcaagcgccttgacaaggcccgcatcctcggcggctactatcgcccgtacgtggtcaagggcctctaccaggtcgccggcggcggcaaggccctcgaagagcgacttgacgagatctttgccgaaatcgacgaggccatcgccgacggcaagaacttcatcgtgctctccgaccgtgaatccaaccacacgtggggcccgatcccgtccctgctgctgacctccgccgtgcagcaccacctgctgcgccgccacacccgtacgcagatctccatggccgtcgaggccggcgacgtgcgcgagattcaccacgtcgcactgctgatcgcttatggtgccgcctgcgtgaacccgtacctggccttcgaatccgttgaggatttggcccgtaacggctacctcaaggtcgacgcggacaccgccgtgaagaacctcaccaaggcgctttccaccggtgtgctcaagatcatgtccaagatgggcgtctccaccatcatgagctaccgtggcgcacagctgttcgaggctgtgggcctgagccaggaagtcatcgacgaatacttcaccggcaccacctcccgtgtgggtggcgtgggccttgacgagatcgccgaagaagtggccatccgtcaccgcgtggcctacccgaaccagtggagcgcatccccgcaccgcaacctgcgcacgggcggcgactacaagtggcgtcgtaccggcgaggaccacctcaacgatcccgaggccatcttcctgctccagcagtcgacccaccgtggcgactaccagatgttcaagaagtattcgcaccacatcaacgacacgtcgaaccgactcatgaccctgcgtggcctgatgaagttcaacaacaaccgcaagccaatcgacatctccgaagtcgagccggcctccgagattgtcaagcgcttctccaccggtgccatgagctacggttccatctcacaggaagcgcacgagacgcttgccatcgccatgaattcgattggcgcacgctccaactccggtgagggcggcgaatccgacgatcgtatcaacgacccgcagcgctacagccgcatcaagcagatcgcgtccgctcgcttcggcgtgacctccgattacctcgtgcacgccaccgacctgcagatcaagctcgcccagggcgccaagcccggtgagggtggccacctgcccggtgccaaggtcccgccgtggatcgccaaggtccgtcacgccaccccgggcgtggagcttatctccccgccgccgcaccacgacatctactccatcgaggatctgaagcagctgatcaacgatgcgaagatggccaacccgaaggcacgtatccacgtcaagctcgtttccgagttcggcgtcggcaccatcgcggccggtgtggccaagtgccatgccgacgtggtgcttatctccggctatgacggcggtacgggtgcagccccgctcaacgccatcaagcacgccggcaccccgtgggagatcggcctgtccgaaacccagcagacgctgatcctgaacggcctgcgctcccgcatcgtcgtacagtgcgacggcgagctcaagaccggtcgtgacgtggtcatcgccgccctgcttggtgccgaggaattcggcttcgctactgcggccctgatcgtggaaggctgcgtcatgatgcgcgcctgccagaagaacacctgcccgcagggcattgccacccaggatcctgagctgcgcgcccgctttaagggcaagcccgagtacgtggtcaacttcttcatgttcatcgctgaggaggtgcgcgagatcctcgcccagctcggcttcaggactcttgaggaggccatcggccacgttgagtgtttggatcaggacgaggccatcaagcgctggaagtccggcggcatcgacctgaccaacgtgctcaagcaggccggcccggtacccggcacgatcctgcaccagaccatcgagcagaaccacgagctggagaaggcactggacaacaagctcatcgaacttgcccagccggccctcgaacacaaggaacccgtgcgcatcgaaatgccgattcgcaacgtcaaccgtacggtcggcaccatggtcggctacgagatcacccgccgttacggcgaggaaggtctgccggacgacaccatcgacatgaccctgcacggttccggaggccagtccatcggtgcgttcatcccgcgcggcgagaccatgcgcatctacggtgaagtcaacgactacgccggcaagggcctgtccggcggtcgcatgatcgtgcgcccggaagacaccgtcaccttcgacaagcacagcaacgtcatcgccggcaatgtcaccggtttcggcgccacttccggccagatgttcgtggccggtcgcgccggcgaacgtttcggcgttcgtaacggcggtgccacgttcgtggtcgaaggcgtgggcgaccacggctgcgagtacatgaccggcggcactgttgtggtgctcggccccaccggacgcaacttcggtgcaggcttctccggcggtaacacttatgtgcttgacctcgatatgaagaaggtcaacccgggtgccatcaagtccggtgcactgctcttcaagtcgcttgatgccgaaacctccaagctggtgtacgcactggtcaagcagcatgccgaagagaccggttcccagttcgccgcggccctgctggaggactggaacgaaaccgtcaagcggttcactcacgtggtgccgaagcagttcgtggccatgacgaaggccatggaagaagccaaggccaacaatgtagatttcaatgcgcccggcacctgggaaaaggtgtacgagcaggttatggaaggagcgcgctgacatgggcgacccgagaggattcctgaaggtccgtacccgccgagagttggctgaacgccccgttgaggagcgtatcaaggactggttcgacgttcacgccgaaaccggcctgcaaccgtggacccaaacgcaggcggcccgctgcatggattgtggcaccccgttctgcatgaccggatgcccgctgggtaacctgattcccgagtggaacgacttggtccgtcagggcaagtgggaagacgcctacaaccgtctgtccatgaccaacaacttccccgaagtcaccggccgcatctgcccggccctgtgcgagcaggcctgcgtgctcggcatccaccagccgccgaccatgatcaagcttgacgagcagaccatcatcgaccaggcatgggatttggactacgtcaagccgctgccgccgcagcgtctgaccgaccagacggtcgccatcgtcggctccggccctgccggcctcgccgccgcacagcagctcacccgcgccggccacaccgtcgtcgtctacgagaaggacgacgccatcggtggtctgatgcgttacggcatcccgaacttcaagcttgagaagggtctgcttgaccgccgtgtcaagcagatggaggccgaaggcacccgcttccgcaccaacgtggaaatcggcaaggacatcacgtgggatgacctgcgtgaccgttacgacgccgtcgtagtggccatcggctcccgcgtgccgcgcgatatgaagattccgggccgcgagctcgacggcatccacttcgccctcgacttcctgcccgacgccacgcgccgtatcttcggcgtcaagccggtgcacgacatcaccgccaaggacaagcacgtcatcgtcatcggcggtggcgacaccggttccgactgcctcggcacctcgatccgtcagggtgcgaaggacgtcaccgtgctacagatcatgccgaaagagccgtcaagccgtccggacaacagcccgtggccgaccttcgcccgcacctaccagaagacctcctccatggaagagggcggcgagtacatctactccaccgactccgtgaacttcgagggcaccgaagaggagaaggccaaggtcaccattgataactcgaccaccgccgaaggcttcgtggccgatgagcgtggtcatgtcaccggcttgaaggtcgtctccgtggctcccggcgaaaatggtccgttcactcgccagcctggcactgagcgcgtgctgcccgccgatctggtcctcatctccgtgggcttcctgcatccggacaccgagaccatcctcgaccagctgcccgtcgaactcgacaagcgtggcaacatcgctcgcaatgacaagttcgccacctcccaggatggcgtgttcgtgtgcggcgatgccggccgtggccagagcctcgtggtctgggccatcgccgaaggccgctcctgcgccgcagccgtggacgagtacctctccaaggaaaagagcgagctgccggccccgatcaaggccagccagcgtccgatgatgatgcctcgctgaatactgttccaaacagaaacatgaaaatcccttcttcatgaggggatttttgcgtttctgggattaattactgccttgagtcttcagtaatgtttatatttcgagaatattgcatacatggttaacatgaagctcctatggtgtctttcgtcgccaaaaagacgacgccagaatatttgggagagattcatgaacacacgtcatgtcacttcactggtcgcggccggtgcggcaatcgtcatgctgctcagcggctgcggatcgaccggtacctccaattccagcaatgcttcagattccaatatcatttccgtgtacggcagtgagccggcacacccactattccccggcaacaccactgaggccggtggcggcaaggttgtagaccagctgttcgcaggtctggtgacctacgatgcgaagggcggcatccacaacgaggtagcagacagcatcacctccagcgacaacgccacgcattacgtcatcaagctcaagagcggatggaagttcaccgacggcactccggtgaccgcgcactccttcgtaaacgcatggaattacaccgccaacagtgccaacaagcaggccagcgccagcttcttcagcacaatcgaaggctatgatgatctgcaaaagccggacgtggaccccaaggccacgctgagcggcctgaccgtcgttgacgacaacaccatcgatgtcaagctcagccagcccgactcggcattcccggtcaaggccggcagccacgcctacatgccgttgcccgaatccgcgttcaaggacccgaagaagttcggtcagcacccagtgagcaacggcccatacaagttcgtgtcctggcagcacaaccacagcatcgaaatggtgaagaaccctgactacaagggcaatcgtgtcgccaagaacgatggcctgaacttcaagatctatacctcgcccgattcggcatacgccgacctacgcggtggcaacctggacttcacgaacacgattcctgacaccgcacttacctccttccaatccgacaagtcgctgaaggcatacaacgagcccggtggcaatacgctcaccttcaccattcctgaatggctggaacacttcggccagaacgaggaaggcaacctgcgtcgtcaggccatttccatgtccatcgaccgcaagaccgtcgccgagaagatcttccacggcaccgccacgcccgccgtcgacttccttgcagccccaatcagcgcctactccaaggaactcaagggaaatgaagtactgaagtacaacccgtccaaggccaaggaactgtgggccaaggccaacgccatctccccgtggagcggtgagttcggcattgcatacaatgctgatggcactgcgaagaactgggttgaggcaatctgcaactacatcaagaacacgctggatatcgatgccaagagcatcccgatgtccacttccgacgaattcctgtccaatgtggattcaggcaagatgacctccgcataccgcagcggttggggccctgattatccatccgcggacaactatctggtacagctgtacgattccagttcggccgacggcaagggcggcaacagcggcaactacaagaaccccgagttcgatgccatgatggacaaggctctttccgccccgtccaccgaggaagccgacaagtattatcagcaaggtgaggagattctgctgcaggaccttccggctatcccgttgtggaaccagaatgccaccgcagccagcacctccgcagtctccggcgtcgcattcgactacggcggcggcccagtgttcaccgcactgaccaagaagcagtaagcagtaagtaataaacagacagcgctagccccccgctggcgggggctgtcggcaaagccgactgggggtggtctcaaacagcagaccacccctaatcttgttatatgagcgagctcccgtaagcgggagcaatcgagaacatacaggagcacattaactatggaattcaccgtatccggcactaccgtgcgattcgatgaacgaacaatgcagttcgcttttacgcgcgacggtgccgaatggaatacctgcgctgatttcaagccgaccctgcaatgcgcgcaaggcaccttcgcgttcgcggatgccacttccatcacccatgagcagcgtgaaaccggcacgggaaccggcattcgcagcatcttcaccggctttgggcacagcgcatactcctttgaaacctatgtatgggtggagcgtgcctcaggcgatgtgctcttcgaatggattccgctcaatgagcaaggcctgaacatcaccaatgtgacgtggcccgcagccatggacttcgattgcgccgacgaccatgacacgacactcatcacccatgagcaaggtgtgatgatccccaacacatggcctaccgccgtgagcaccaaagatatcgccttcgacggtcgcttcgaaacggctggcggttacatgccgtggttcgcgcagctccgcgcagacggacacgggtatatcgccatctgcgaaactccatggaatgccggttacggcatcgaccatcccagcgatggcccgtacacccatatcaatacttggtttgagccaagcctcggcacaatgaattatcgccgcgtggtacgctaccagttcctcgaccacgccgatcacacggcggtgtgcaaggcctatcgttcgtacgtcaacgaacgaggtcgcctgcgtacgctcgccgaaaaggcggcgcgcaatccctccgtgcgtgacctgattggtcgttcatgggtgcacatcggcatcaaaaccaaagtacagcccgactcgtactactacgataaggaccaccccgagaaaaacgattcattggtcacctttgcgcagcgcgaaaagcaaatgcgaacattgcacagcatgggtgcaggccgactgtacatgcacttggatggttgggcacagcccggatacgacaacgcacaccccgactatctgccggcttgtcaggaggcaggcggctgggaaggcatgaagtcgctggtcgacgcctgccatgagcaaggcgatattttcggcacgcatgaccagtaccgcgattactacttcaccgcgcaaacctttgatgccaacaatgcgattcggctggcagacggtacgatgcccgaacacgcacgctgggcgggcggccgccagacctacctgtgcgccgagctcgcaccggactacgtacgccgcaatttcgccgaaatcgccgcgcatggcatcaagctcgactgtgcatacttggatgtcttcacctgcaacgaaggcgacgaatgctcgaaccccgaacaccgcatgacccgccgcgaatgctttgaccgccgcgccgaatgcttcgaatatctgctctcgcacggcatcctctcctcgtccgaagaggtatcggactgggcagtgccaagcctgatattctgccattacgcgccatacgacttccagatgcgctcacccaacgagccgcgccaaggtgtgccggtgccgctgtataacctcgtctaccatgattgcgttatcgagccgtggatgatggagcgtgtggtggacggcgacgattacatgctgtacgccttgctcaatggcggagctccatacctgattcgcgatgccgcatacatcggcgttgacggcgacatggacgacgaacagcgcgctcgcacggaaaacgacatcgaacgctgccatacgatcgctgcattccatgagcgggtcggcatgcaggaactggttcgtcacgagttcgtggatgatgatccgctggtgcagcgttcggtattcgcggacggcactgcggtcacttgcgacttccatacgcaaacctatcgcatcaccgattgaccgcatcactgactgaaaaaacaatgacacacagtgggttccgatggactggtggcaaattgccgccgataagcgggtaatatagccaacagtgtcaccgtcgaaacaggagtagtgaaatgccgaatcgtgcagaacgccgtgcccaagccaaagcaggccgcaggggagtgccgtcgcagtatgaccagacccgtggccgtggccgttcgggaatgattgacgaatatcagctgcagcagaagtcccagcgtctgcaggacggcaccgacagcaccgaatggaagcccagcggcggtacgattgcggacaccgaaaccctgctgaccactaacccgaactacacgaatccgaagatgttcaaggcaccgcattcgctgcgtcagtggttccgtgtgggcagctggacgctgattgccatcgcgattattgcgttcttcgtggttatgtggctgccaagccatccgatgtggctgatcatcaccgtttccgcggtgttcattgtgggtgtgctgagcctgttcttcaccgctggcgattccaagcataatccgaatttggatcagaacggcacggcagtctgatcttttgcccggtaaatccggcttgaaaagcaaaacgcacgacggaagttgtgcgttttcttgtatgcggtgccctaaagtaagaagtgcttgagtttctttctgacgcacgaaggagaggcagtccgatgaaagttgatattctaacccgcgaatacccgccgcacgtctatggtggggccggtgtacacgccgaggaactgtccaaggtgcttgccgagcgcatcgacgtaaccgttcgtgcgtttgatggcaagcgcaccgaggcggacattcctgctatcccgaatgctgccgatgctaagggcagcttgaaggtcgtcggctatgacacgccttctgagctggctgatgccaaccccgcattgaagaccttcggcgttgatttgcagatcgccaatgatgtggacgccgacatcatccacgcgcacacctggtatgcctgcttggcgggctacatggccaagatgctgcacggcactccattggttattaccgcgcactctctggagccgttccgcccgtggaagcgtgagcagctcggcggcggctacaacctgagctcctggggcgaaaaggaagcctacgagcacgccgaccgtgtgatcgccgtgtccggcggtatgcgcaaggacattctgaccgcctacccgaacctcgacccggacaaggtcgtcgtggtgtacaacggcatcaccatggccgacttcgccaccccggcccctgacgacccgggctggaaggtgttcgatcgttacaacatcgaccgttcgaagcccaccctgctgttcgtgggccgtatcacccgccagaagggcctgccatacctgctcaaggcactgcacctgatttccaaggacattcaggtggtgctgtgcgccggtgctcctgacaccccggaaatcgccgaagaggtcaagatcgcgttcgccaagctggatgaggaacgcggcaacatcgtctggattgaagaaatgctgccgaagcctgagctgaatgctttggaacacggctgtgatgccttcatctgcccgagcatctacgagccgctgggcatcgtgaaccttgaggccatggcctgcggtctgccggtcgtcgcatccgccactggcggcattccggaagtcgtggtcgacggcgaaaccggctatctggtcccgatcgaccagctgcacgacggcaccggcacccccaccgatccagacaagtttgtgcacgacatggccgccgccatcgacaagatcatggctgaccccgaactcgccaagaagatgggtcaggccggctacgaacgcgcccgcgacgtgttcagctgggagaccatcgccgacaagaccgtggaagtctaccagtccgtgctcgacgagcagaagaagtaagtagcgctgcaacgagtgctcccctcagtccggctgcgccggccagctcccctcaggtaccggtttcttggctctcctctctgaggggagctgtcaccgcagtgactgaggggagtcgtcagaccgcgaatcataggtagtatttcactcatgacaaacaccgtcctccaactcgacaacgtcgaattccggcgtaaccgtcgcgtcatcatcaccgacgtgaacctcaccatcaacgcgggggagcgttgggtgctgttcggtccgaacggcatcggcaaatccaccgcggtcggcatgctggccacccgcaccttcccctcggaaggccgcgtattcatcctcggccatcaactcggcaaatacgacgtattcaaactgcgcacccgcatcggtctcgcctctgccgacctgggccggcagttccccgagttcgaggacccgctggacgccgtggtcaccggcctgtccgccgtgaccgggcgctggcgcgacacctacacgcaagaggaatacgcccgcgcccgccagctgctgcgcgattttcgcgtctcctatctggaaggcaaggagatgtggcgactgtctgaaggcgaacgcacccgcgtattgatcgcccgtgcgctgatgggagatcccgagctgctcatcatggatgaaccgaccaccggccttgacctgggcggccgcgagcaggtgatgcgcacattgagccgaatcggcgaagagaactccgagcgtgccgtggtgctggtcacccatcgcttggaggagattccggccggtttcgaccacatcgccatcatgggacgcaagccgattcccgccgaggacgccaccgaagcgggcgtggattcaatgggtaatcccggtgctggcaccattgtctacaccggttcgttggagaatggcctgaccgacgaacgcttgtcggaattgttcggtatgcccatcgaagtccagcacacccacggtcgctgggccgcctacgccgtgtgatgcttgtaggtttttaggcgggattttcttcgccccctctggagggggctgtcagcgtaagctgactgggggaggtccaaccagttacgaaggcaaccatgacaaccaatagcaaactcgtattcatcgatatcgacggcaccctagccgacgaaaaccacgtcgtacccgaatctgccagaatcgcttgcaaacaagcccaggccaacggccacaagctcttcatctgcaccgggcgttccgttccgaaaatcgaacgcagcatcctcgacctcggtttcgatggcgtggtttccgtggcgggcgctcaggcgaatatcggagacaagctgctgttccagcatctcgtccctcctgaagcggtcgatgcggcgatggcgtattttgccaagcatcatatcgagagctaccaatggcaaggtgcggacggcatgtacatctcggaaggctaccgtcaacatctggaatcgaaaggcaagacctggaatcgtggcgaattcgcgcgattctggcacctgttggatgaggtggaggtgccgactggctcgactttgggacagacgattcgtgtgagcaaggggtcatacttcacctcgccgaatcctgacgtgactttcgaggagactcaacgtgatttgagcccatggtttgagctcgtgcatggttcgtatgacaatatttccccgaacaatggcgaactactcatcaacggcatcgacaaaggtaccgctgtgcgcgacgtggcttctttgctgggctatgccattgccgacaccatcaccatcggagactccgacaacgacactgccatgctcaaggccgccggcacatccgtagccatgggcaacgccattcacggcatccaagccttctgtgacttcaccaccaccgacattcaccagaacggcctggccaacgccttcaagacgttggaactggtgtgaggctatgtcgtttgctctcagacgaaggatcctttcgtgctgtagtatcgctattgaagcattaaaatctggaatgtcatttacagaagttacttattacctcaatcagctttatttcatgcatcaaggaacgtaccccttcgtctgctgcacacggaagctaccagatgaactcacaaactgcaacctatcctgtagtttccattcaatccaagctatcaacggtagtgttattgcaatagttccctcatggataaaaggcaaatgttttcgcttaccagaaagtctcttagtcttttccaataagaaactggaatatgaaacgcgctcggtaaaatcgttgaaggatgagcagcgccggatatgctcatttatccgttttttgaagatttttcttcataccttattttgaatcaatacttgaatgacgagatggcaactcttcttcaaagaatcgctgatctgtttaggcagaggcttcagaacatcaatatcatggtcatccaagcaaatcgattcaaaataattagcaaggatgagtactacgaacttttttcactattgactaaaatgaaaaaaattgtaggaaagcaaatacgtttgctttcaagcaatggatacctatttgaccagtttggggcattcgtacgcagcaataacatagggtatccagtcaaaattcctacagaacggtgcggcaggtgctgttcaaaaatagatttctttgatttttcaaaaacgcattcttaccaactatgcatgaggacatgtcccatctgcggaatctattccatccaagtgggcagcgaaaagttcattcagcattattctgtgactaatgaagcagggaatacagcattctcgatagccactacagggtatgaattttactatttccgactgtatgataaaactcatggcactcttgcatatgagcaattcggagagtgtggtgagaacatcagaatgtacacggacagcctgtctcccgatgtaccctcttatagggttgttctgtttggtggggatggggtcgcgtattcacatggaaaatttatcaaggagggggaataactgggtttatctgctttccgttgtaagcgacaatctcggcagttcgttgatgactttcgtgttgccgcttatcgtgctcgaccttaccggttccggtattcatctttcgatcatctcttcgttcgagacgctgccgttcttgctgctgggtctgcctttcggcgctattgtggacaggtgcgacgtcaggaaggtgctcatccgttccgatgccatcagattcggaggatacgcgttgctcgcggcggttctttcggctcggagcaacgcgaccgtgacgctgatagccatctatctcgtcaccttggtcatagggtgcaccaatgtgttcagctccgtttccgagataacgttcatctcgtatttcgtgtcgaaatcggattattcgaagatgaacagcatcgtgtacggcatccagtacacggccgggctgctcatcccgcttgccggcggggcgctctactccgtggtgccgatggggctgctgaccctgatctgcgccgcgtgttttcttctcagtgcgggtgccattctcctgatgagggtcggttcctcgaagggcgccggcgggttgaggggccccgtgccggccgcggtgcgaacggtcatcggcgacacccggcaggggctttcctatctgaagaccaggcgtgtggttctctacccgcttgtgctggccgcgttgttcaacgtgctgaccgggaatttccagaacgacagcctcgtcatcatgcgcaagagtctgagcttcacgtcgggccaggtcggcttggtcatgtcggttacggccatgggcgcgttggcggggaccttcatcgtcaacctgctgaacagaagcttcaagttcgaaacggtcctgatcgcgaacttcctcgtccagatgtgcttccgtctcctgtttgtggcgttcggcaacatcttcgcggtggcgggcgcgctgttcgtggtggacctgtgccagtccgtgctgaacatcatcattatcacgaaccggcagaatctggtcgaaacccgttacctcgggagggtgacgagcatatacaaggcggttctgatcggggtcaattcgctcggtttcatatacggaggcaccctgtcgaacaccttcggcccgaggaacgccgtcctatggtcaggcgtcgaaatcctgatactgaccatgattggtatcggagcctacgctcatctcaacaaagaaagaaccaccgatgagtaatgtcaaaatctggtatgtaagagaaagcttggtcatagctaagagcctcaaatcgatcagcatattgtggcaaatacttttgggctctttgtatattgaaattagatacgtcgcatgcatataagttccatccccctgagaggagtggaaacgcattccttccgtttccgcagcctatgtagagtcctttgtccaaaggagaagaaaacagtcttacataatcacagattggaagaggcgaattgtgcgaattatgattttctatcaatgaggtatacacgattgttatgcttttattcggattttctaggtagcgcagcagcgagcataatggcaatacccatagcagcaggaagcacacaattagcggcagtaatcgtgctagcaaagagtgatggccctacaatattctggaattgtccaccaagattaatagcgcttaagtcagtagtcagataatcttttctgc

SEQ ID NO: 2620 - DNA, 162057 bp, Unknown
  R222_15m  MAG No. k141_31109
cgccctgttgggcgaatccggtgtcttggttgttcttgcgcctaagacccacgtcactggtcatcgcgatacggatggagcctgtggtcatgacgtcttccccttcttacgcgcgcgcttgacatgcgtcgtgtgcgacttggctgcgtgtctatttgacagtatagccacgcttttcagggaaagtcgtgtacgtatcctcctgaaacgcggcaaagaagcgagcattgccttgcgcaattggtcgactcctgtccaatatgtggtggcttggcccgattcaatgtcttgccccgagaacgtggcgtagtcggcttcccggccaagctggatcaaagcctggtcatctgtgccgagttgacgggcgatggcaccggcctgatctcgacgagtgcccttggctgtgatgccgctttgctcggcaagcatgcgtatggcattccaacctgctgccacacgggctttcggactgccatgccgccgcgctcgcgccagcagcatggccttgaacatcagaatcagaccgcagacgatgagtagggtccacaatgggctgccgtacagggccaccttgcgggtcactcgccagaaccgcacccagaacaggttggtcggcgaatcatcggcgtcggcgccggccaatgagctttggcccctggcttgcgtctgatcgcgcagcggatcggtcaacggcaccggtggttgccggaccagcgtctgcggattcggcggcgtcaggttctggttttcatcaggcaccttggtctccttgggcgtcggatagaacgccacccatcccaggccctgcaatttgatttccacccaagcggtgacatcgttgccggtgaattcgattttggtgccattgcccgaggtcttctccgtgcgggcatcggtgatttcgccatcctcgtttttcggcaggaagcccaggaccacacgggagggcagtcccagctcacgagccatcagtgccatggcggaggcatattgctcggagtcgcccaccatggccgtgcctgccagcagcttgttgatacggtagttgccatggccggcatcggagggataatcgccttcgagtccatgagagaaccatccggagtctttcaatgtgtcggccaacgccgtggctgcggcaccgcccgaggactgtccgccggcaatggacgtggccagtttgctggccgaatcgggaacatcctgggcttccggttgggtgatgcgggccgcggccgcactgctgatctgcttatcggtgggcttgcgggcgataatgccggattcggtataggtgaggcttttacgcgtgccggcgggaataatggcggaatcggtatccgtgttgtagtagaacgtgtcattgccgttgtcggcatcgttggcgaagctcacgccagtggccgctcccgccagcggcagccaggtgtcggtcaatccctgatcgacggtgaaggtcgcagtgaaggattcgccctgctcatccgccttgatcgtggtgcccacgcgatgataattcgaggagtccgtggcttcggaagaatcggacaggttccatactgtgccgtcgaatcggtccatcaccgcaagtttgactggtgttccggccggcagattatggacggtcagcaacacgtcttttttgtggtccttgatataggatcgcatgccgctgagcgggctggtgtaatcgtaggggcttaacggcggatcgtagcggtcacgcagcacgaaacggtcctgcggcaccagcaacgtgcctccgaaagcaaggccggcagcgagcacgacgatgatcagcgcggatatccagcgcccccattccagcagttcaagacgccaagacagccagataatcagcagcaaggcaaaggcaatgccgcagatggcacgttgccagccgctgtccgtacccagcagagcacatacggccacggccgccgcaagaggcagcactcccaccagagacaaccatgcgttggcattaatggcaaacacgccggtgaggaacgtaagccacaggccgatggtccataccgccagcagcacgccgtcttgcgtgcccagaggcggatcgacggaaataatgtacttgaacgagccaaacgtcatttcccaacctgaactcaaggtcttcaaggtgggaatcacgtaatgggacgtggtggaactcagcgttaccaccggaccgatgatgaattgggcaaacgtcagaaacacgatttgccaccacagtcgcaacgccggcaacatgcccgccagagcgatgatcgcgcccagcaaggtggccggtacggcggcgatcgcccaagtggccacgccgccgtacacgtcgatgagattggcttgcgccagcaacatcatcgccgctatgagtacgaggctggcgattcgtttgccccacggctggcgactgaggcccatgccgcgaagcacattgcctctggtcatccagataaccgaatgtgtggagtcggcccaggagccggtggtggtggcggttccggtgtacgtgccggaggaagtgccggtgtatgtgccgctcgatccggcgtacgcagcggtattggtattggtgatactggactggtcgaaggtcatgcgagcacccccatgatcagtgggagatcatcgagttcgccgatggtggccaatgtgaagttggcgaatcttctgatgccgcgattggcgccggcgctggcctgcaataccacgcagctggccgatcggggcaaggccaaggtcatgcgcttgatttgctcgatgtctttcagcgatccaacagtgaaaaaatagaacgaagcatcaggactgtgcttcagcgtgccctcggcgagattcggattgtcctcacgatcaggctctatggcactggcgttgtcgaggaactccatggcgttgcgcggctggccgtgcgcgttgcccgcgtgacagaacagcgggcgattctgcagcaggcatttgacgccgatggaggagtggatggacaccgccatctcgaattcctcgccgttgacgtactcatccgggttcacgctgatggtcaccgaggtgtcggtgcggcgcgtggcttcatattggcgaatcatcaacgtgccggttttcgcggagctcagccagtggacgttacgcacgtcgtcgcccggctcgtattcgcgcaatccgtagaagtcgagatcatcatccacgatctggccggatggttggccttccagatcgcggggcacgccggcattcaaggtatcgagacgcacggtacgagggtggatgaatacgatgatgcggtcggccagctccttttcgtgacgcaccaggccgaacgggtctcccttgcggatgcgcaatggtccgatgggcagtattgcgcgcgataccgtacggaactccacatcggtttgcttggattgcccgggagccagcatggggatgttgaatcgttcatgcgcatcgccgattggcagatatccgcgtgccgtggttgtcggcgttctgccggtgttgtcgatgccgacgataacggatatggtgtctcccacggtcacgcgatgatcggatacggcgatggacgcgtggaagcgtgtgttgccgagggaaagcgcgattgccgcgagcatcatcaccatcgccacgatgccgaatacgagcagctcataccagcccagaggcaggaacgcaataagacatgcgatgcctgcgcccgttaccgcccagcccaagggcgagacgtaggatgcgaagaaccgtctgatgcgtcttaccgcgcgcttgaacatgcgttcagcgcgccggcgacggcgtaatgcggcggatgtagatgccatggtcggatacctttccaggccctatcaggaaccgatggtgggggagggaacgtcttcgagcacctgtgcgatcaggctttccggagtcgcgccatcgaaggtggcttccggagtcagcgtgatacggtgtgcgagcacggccactgcaaggtccttgacgtcatccggcaccacgtaggcacggccatcggccgcggcccagatacgggcgcatcgggtcagcgccaaagcgccacgcatggaggagccgactgtgatcttctcgttgtggcgggtcgcctcgacgagcctgacgatgtattcacgaatcgcatcatccacatagatttcggtggccacctgacgcagccgcatgacatcgtcaccgctcagcaccggggaaacggtctgcgcacggtcggtgatatcgacctgcttgaggatatcgacggacacatcatggcccgggtagccaatcgacgtcttgataaggaagcggtccatctgcgcctcaggcagcttataggtaccgagctgctcgatggggttctgggttgcgatcacgatgaacggctgcggtacatcatgggtgacgccgtcaacggtgactttctgctcttccataacctccagaagtgcggactgcgtcttcggcgatgcacggttgatttcatcggccagcacgatggaggcgaaaatcgggccctcgcggaactcgaattctccgcgcttctgatcgtagaaagtcacacccaccacatccgaaggcagcagatcgggcgtgaactgaatacgcttgaaaccggtggaaatggagttggccaagcctcgggccaactgggtcttaccggtgccggggttgtcttcaagcagaatatggccaccgaccatcagtgcggtgacgcattgcttgatgggaatggtcttgccgataaccaccttggagacattctcgaccagcgcattgaaggactgctggaaatcccggacctgagccgtgggctggggcagtagtccggaattgatgctggcgggcagtgccgatgcggctgcttgcgcggctttgctcgactgacgctgcggctgggattgcggctgggattgcgcggcggcctgctgattggctaccggcccgcgaccagccacggtttcggcgttggatgctgcggtcttgccggcggttgtggtcgtccattgacgggaggtctgggtggcgggggcagcattcgcagtagcggcctgcttgccggatttacgtccgaagtgcggaagcgcgactttgggcgtgctggtctttgccggcatgccgacctgctgcgggatggctggcgccgcgtccttgcgcggcttgagcacggtgctgtcattgcccgcaggaatggaggcggcatcagtagtaggagacggcttttctgacgacgcttgtgacggccgctgcggcaggttaggcaacgcaacgggttgctgtgccgtctcggtgttcggggtggtgccagtgtgcggttccgatgccagatgtgtggcatcggacaagtgcgtggcgtcggatagctgcgtgctgtcagacagctgcgtcgcgtcgtcgatgttctcgctcatggatgttctcctactgcttgtgaatggtggttgacgatattggggtattaccgaaaccaagaatccaagggttcttggccaaagtggtgacatcggtaccggatttgagcgactcggtcccctccgaggaatcagaggggcgtgtgcccgcgacgctgctgccgtccgccgtattgtcgagaccggagtatcccggcccgccggtgactttgacgctccacgtgtagttgccatcggcggccacggccaagtcggtgacgtccaatggctggccggggttccacgtgaacggttggccattgatgatgatttgtacggtggcctgcttgccatagacctcaaccgaaccgccggtgacgttaatgacgtgagcgttgtctgaccagcgcagctcctgcggtttgttgattacagccttcttctcataggtgtaaggagcgccattgtacgggcctccggtggcggcatcgctggtagcgccgttgaacacctgttgcaccgatgcggtattgcatttggcccaaggactcattcggaagtcgagtgagttccggttagtagctgtaccggaatcgatgccatcggcagtcacgttgtaggactgcgcatgcccctgcttggtccaatgcacggtgcatgtactgccggatccggtggtgtagacgtcagtgggcggctggaccttgtactgcgggacaaacctgctcttgcctgtgccggcggaagcatcgcgctgcggcaccacggtggccgttacggtgatttcccgggtgttcaaatcgttctcattgatatcgaacgtagcgccaccgtcactgcaatcgatggtgtccttgatgtctcctcccaaggaaattcgccggcagccggcattgcggttgttgccgagagtgactttcgccgttcctgtggtgtcgtcgttcgacagcgcaatggtcggcgcatccgggtctccccagatgtcctttggctgtgatgaggcggactcggcactccaattgattttgttatgggctttgacggtcgccgtaatggcggtgccatcggaaatgtcgttgttgttgaacgtaaacgacagctcggtggccgtgttgccggtttccttggtctgcggagcacctgcaccggtgacggtcaccgaatagttgtcgacggcgctgaaatcaccgctcggcgctttccacgtcactttggcggttttattgccacctgtgaccgtgacatcggtgggagcggacggcaccttgtccggtgtggcttcgacggtggtggacggtttggaccaaccgacgtcatttcgcgcggcgacggtgaaggaataggttttgccgttcttcagacccgtgacctggcatgaggtgacggcaccgcaatccttctctccagtggcggcgccggtccaactgaccttgtagttggtgatcgggctgccattggcggcaccgggcgtccatgtgaggctgaccgcgctgtcctgcggttccccggctacgggggagagcagtggcggctcgggcttgtcgatcacggacacggtaatcgatgcggtgacttcacgatccttggacttgctgccgtcttgcacggtgacgagcacggtgttcgtggaagcacccggatcggatgcgacggcgatggtgacgtttccggaggcatcgcatccggcgatagtgagtttggcggcgtcatccgccttgcagctgatgacggtcagcgaggaatcggggaacggattgtacgcgccggtaagcacgttcacggcatcgctggcaccggccttgatcttcagcgtcttgtcgccgacgcgtgccagcggacgggtggaagacactacgcgcacggtcacaccggcattcacggtgcccgcgccgtatgcgatttgcacgggaatggacgcggtggtgccaggagcggcatccttggtggcggaaacctgcaagctgccggaacgggacaggttagcggtgattcgcccggacgatgagcttccgccggaatacgtgtattgcttctcgtcgtcatacacgccggacggtgcatgggtgagcgccgtcagatcaacggtcttggggttcgcgcccgcctcgacatcaatagtggaggacgagaacgtgggcggcggcacatcgcggcctatcaccgtgatctggagagtgatcactgcggaattgatgatcttggtcttatccgatccctgcttgccatccacagcggtaaaggtaatggaggcggggcctgcgtagtcttttgccgcagtgaacttcagggtcttgtcgttcacgtagaaatcggagttggaagccttggtggcgctgacggaatcagcgctttcgatatacggttccttgccggcaccgacgcgaacatagtcattgatgttgatttcaatggtctcacgcgaattgaccttcaattccggtgccttgggacgcaacgtgggcggaaagacaccataggccggtacctggatgaacgcggtggaggtgatgttgtatttcgtattggtcaccgtgtaaggcacggctcgcgcctgtgacgtcaggtcgacggtgatggtggtcgaatgctcgccgcccttgacgtgagcgtgagcgctggcggagggatgcacgccgaccttgagctcattggctgtgccggaaggattggcgatccactgggaaacatccacatccacggacttcttatcgatggtggcggcggacggcacacgatagtcgtaggcggtaggcggctcgatggcggcattcggatccacgtttaccgtgagggtggccgtatcggacaagccggccttgtctttgaccgtgtaggcgatataggcggtggtggcgctgccgggcgtggtgaaggagatcatgttgtctttcacgctcaccccgtcgagaccttggacctcgacatgcttgtcgacggtcagattggtgttgtcgccggagatgtcgttctgcgcgaccggcacggttgcggccgtattgggcctcaacgtgatttcgtcatccctggcgtatacgccggagtcggacgatccttggaatacgcccacgcggatctgcgcctgtgcgcgctgaccggtccaatcctccacggcataggagaaggtgtcggtgccggacgaatccggatacgcttcatagaccaagtagtcggaaccgacttcggatatgcggcccagcgtgggtgccttgttgcccagacccaacagctgatcgtcgtcgccatccgtgtctatgccggtcagtgtgatggggatgcggaccttctgtccggcggcaacctgcgcttcggcgtcatgcggggttggcgcggccttgctcgctgcgtcgctcttatgcacggtaatggtgatattggcggaagccacattacccagattgtcttcaaccgtataggtgatggggaagttgccggtctcgctggatgcttggtagcggaccgtgtctccagagacgaaggccagacccttgaacgtctccttgtcgtattgcaggttgttcttgagcttgaccgtggtgccatccgagtaggccacatggtcaagcacatccacggacacgatgccgccggtgcgcacctgggcattgatattgctggccttgggcactgaattcgaggtggtcagagccggtggctgcaacacgatggtgcccttggcggttccggaggcgttggccacggtgtaggtaagggcgacgggtttcgtgggcacctgacgcgcagtgatatacacgcgcttatggctgacgagaccaaccttgatgccggagtcggccggtgcgctcaccgtggtgacggacagcacgccgcccatcggatcgacgtcattggtgagcggctccacaatggcggtattatccgcgccaagcagggcgacatcgttggcggcaaccggtttggcggcctcgccggtggcgggctgtacctcgacgcgagccaatccggtggccggaatcgagccttgagtaatggtgtagggcacataataggtgccgggattggtggccttgaacgtcaacgacatatccgccgcattggtggtcgtcgaagcgccgttgggcgtatccatctgagtcagctgtgccggctgcaaggaagtgccatgcacgtaagaggacagcttgacgacggtatccgtgttgggaacggtggttttcgctaccgggtcgatgaccgcggccaaggtgttcgcgggcttgaccgagaaatacaccatgccggtgccggtcgccgtgccatcggagacggtgacctcgacgcccacgcgtcccgacgccagcgcaccggtgttgaacgtaagctggccgtcggctcgggtggacacctgcaccgggtcggtgttctgggccacagcggagaccagagtgagcgggtctccatccggatcgttgaagctgctcagcgcattggcggtataactggctccctgctccacatcgatctcgggaggagtgtcgaactgtacgggagcgtggttgcctccatcattcagggttacggtcaccgtggcggaagaggtctggccgcggccatcggaaatatcgtaagtaaaggtaacggtgcctgcggatgtggcggaggcatcgagttgcagataccggccgtcgtaaatcggcgaaatggtgacgtctttgttgtttggtgcgccaaccttggtgattttaagcacggaacaatcggtctgctcgtcattgcgcagcacgtcgagaatctgttccgaaccggctcgtgcgccgatttcatcatcctcggctttgatttggccggattgtgcggaacaggtcttggagaagtcgtggtggttgttggccgagtcgttgttctgctgttctttctcggtctgctcggcctgtattttgttccactgtattttgatgactttggtggaatcctcagggttccacacattgccgttaaccgtgtcgttgagcaccacaaggcgatggttggtgcggaacaccaattcggaagtagtattgacggattcgagggtttgcggcttgacgctggtatccgcgggggagcaggcgcgaatgtagttgctggccttctggctccaagccgagtacacgcagcccttggacgataccggtcgtgccggattcgccttgcccccgttggctatgaaattcgccgtggcattggacttcaacgggataagcgtaaggcctctcggtgatgccgcggccacccaatcggactgtacgtcatcggtgggaggctcctgaagggtgagggtgccggtcgtgtcgacatcgacgcggccgcccttgaatatgacggttttgccggttgcgattaccggcgtgctcccgatgacggtaaagctttcaacggtctgctgcttgccgtcggtcagcgattcgagggttttggccttggcgctgctgggattgtcaagacgcagcaccataccatcggatggacggtatccgtagaccttgccatcgtgggttactacgatgcgcccgccctcgcccagcttcattttcggatcggaagtggtgggggccacggaatcaaggttttccgacaagccggtccacacattgccggtcttctcgttgatcagggctacggtatccccgccgaccacagtggtggtgttggctttgatgtcagtcttgacaccggtgctgaccgtggatgccttgatggtggaggctttggtcgtttcggtcaggatggtgtcgccattatgctgcgcgatgtcgaatcgtggggcggaggaggagacgccggcgtcggcctccttgttctttacgttgaatcgtgcggccttctggttcttcagcgaagtgacccacacggtgccatcgtccagttgcacatggcggcgcgtgacggtgctcatgatcaccgcgccggcaacaagtcccagaagcagcaggagcgtgattacgggaaccgtccacgtatgccctccggagggcataaggcggcgcaaagccgcgctgatgcgtcggcgacgatcgtatgactgggacgatgtggccatctgaactccctgaaccctggtttctctggttgctagtgtaatgacaacgctttacggttccaatacctgccgttcctgttgtccatttggtgaattcgccactgccggtcgcatgcctgatgcgatacgcaatgccaaggtggtatgcccggcagtggcgagcggatcactcttgcggcttggccgcacaggcgatggcggggctgacggacatctggcggttcttgcgcacaatggacacctgaatgcaggtctgcgagccttcctgcgcgttgacggtcaccgtgggatctgacgttgtgacggtttgcgcgctctggtcggtattgctgccctgcactatggcccacgcataggtatcaccgctttgcgggtctggattcgtccaggtgaacgtcacggatgacccatccgccgcataggtgccgttcagattctccggggaaggaatctgggcgttcgcggtatcggtgatcacgtcatcctgattattgcggttgttgtcatcatccttggtgccgggcgtcgccacctgtttggtatctgatccggtggcgctgtccatgcggggaacgaccacgaaggcgaatatcagtgccgctgcggtgatcgccgcaagtataccgacggtaatacccaccggtttgacccatcgccgtgacgaacgggtggtctgatctcgctggtccgtggcccggcgccgacgctcgatgtctttggggtaggccggcatcccttccacggtaacgggagtggcatgcccgaaatatgcgaattgcacacgctgcatggcgcgtgcgaactccaacgcggagtagtaccgctggtcggggtccttgttcagggcccggcgcagcaccgcttccacatcggccggtacgtcggggcggttgaggcgaggcaatggctgattgacgatcagcgaaatcagttccgattgcgaacgtggatgatattcgtactggaatggcgagcagccgacgaacatggcgtacagggtggccgccagtgaatagatgtcggcggcttccgaaccattggtcagatgctgaagcacttcaggcggtgcccacggcggcgagaatccggtttcggtacggtcatacacatcggtggagataccgaaatcacccagaacaggcaaaccctgcgaggtgatgagaatgttgctgggcttgatgtcgtgatggatgatattgctgcgatgcgcggtgaacagcgcgcttgacagcttgatgccgaggtcgagtacctgctcgcaggtcatggaccgggccttcatgatgctgttgtaggtgccgcccggcgcatattcgatgacaatgtagccatggccatcggaggtgacgccggcaccatataccggcagaatgtacgggtgggatgacagcttggccatgaagttggcctcgcggttgaacagggcagcggcccgtgggtcaagggttttggcgctgacctttaccgccaccgggcgtgcgggcatacgctggttatataggtacaccgtggcggtggcaccgcttcccaacatctggacgaaatcatatccgggcagcttcggcggcctcatcggaatattggccatctgttccctccctccttggaaaatgcgctctccctgcattcgttctacaggataccgtcaagggtacgattcttcgtcgggttcggtaaaatttttccctctgtgacggtcgggtttaggctggagccatgatgacgagacttgaacctggaacagtgctggacggcatcgaccgtgatggagcggcgaggctgattgtcggcacgcctggaagcggcaaaaccgaattcgccttatcggtgttgatggcggggctgcgccgctacggtggcacgcaggcggtgatggccgtatccggccgtgtggccgccgacgcattgggcaatcgggtgattcgtgagctcgggttttccgtgcaggccaggccggtcaccacgctgggtgccgtggcattccgggccatatcagcttcgcgcgagggaactggattgccgtcgcctcgattgttgaacggtgcggaacaggatgctttgctgcgtcaagtcatggccgtgcatctgcgccatgccgtagcgggagatgattgcggcacctgtgatttgctacgcgtctactttgcccaggatgactgggcgaaactcatacgcgatgccggtgccggcgagatgcccggctcggccgcttccgcacaatcaagcctctcgcaacaagggtcggattcgccgtctccgacgtcggcaggcggctcgaccagcgcggataggttcactcgcggtatttcagatgcgtttatcagccagttgcgcgatatgctggcccgattggacgagctcggtgtaggcgttcacgaagagccacgtctcttggacgccgtgacggaggacgcgcgattgtcggtgcaatggcgtttggctttcgcgttgcgccgtgaatatattgcagcccaaagcgcggcatatccggggcaataccgtttggatgcctcgtatttgctggtggcaggagctcgtgtggtgcatgaggcattcgccgccgatcacgcggatgattccgaccggcctatgcgtatggaggcgttgggcttgccccggctgctggttgtggatgatgttcaagacaccacgctggccggcatgcgcttcttggaggagttggggaatgccggcgtcaagttggtgctggtcggcaacccggatgaatcggtgcagaccttccgtggatcgtatccggaatatctgatgcgccgtgccgtggaagggtggctgaaagccaaggaagaacagctggttggcggcagtaccggcgctgatcagtcgcacatgacgatggctgatgtgatcgcgtctcgtatttcgctgtcgattccctcgccggaagacgagccgctgcctccggccgagcgtcccggcaagctgaccgccatgctgggcggagtcgatgcagcgaattatcagtcggacggcacggtgaccgccggcctgtaccgatcctcacgtgaggagctggatgatgtggtctggcgcatcaagcgggcgcatctcgaccggcatattcggtggaacgacatggcggtcatcacccacgacaatgccgccgtgcggctgttcggcgaacgactgcgccgagatggcgtgccggtgcggtattcgtcggtcacccgtcctttgaaggacgagactttcgtgcagggattgttcgcgcttgtggagcttgcccgattgcgtgccgagggaatggcggaatgccagatgacgttggcttcctgcgcggcatatataaggactagagtggccacgttgatgaacggcccgttggtgagtgccgggggcagacccggtcaagggcgtcctgcaaggctcgctccgatcgaatcggccatggggtcgttggagtcgctggcgcatctcgccacggatgatgccatgctgacctctctgacgacggcatgggagacattgcgtgaaacataccatgaaacacggcgtgaaacaggtcgtgaaacatcctcatcagtggttccgtcgccagtgtctgtcgaaatactcggtgaaccgtccgacgatgacttggcctttggcgttgacgcgctgtacgtgatgcttgccgttgatgatgccgccgcgccggcgcaggctgcgctcgcatccatccatgcggtgcttggcaacgaccctcaggcccgcgcttttgcgaacctgtggcatctggtgggcagcgttgcttccggcttggagcggctgccggcaagccagcgcgtacagccgcgttatgcactgtctgttgcctggaacgccaccggtctggcaccggtctggcagcgtgcggcattattcaacacggcagaggggcgcacggccaatgaccggctggacgcggcaatgcgcctgttccagttcgccgatgattccaccgccagccgagacatcacgtcattcatggcacaggttcggggcatggaagtgcaggccgattccttggcccacatagggccggtggaagacgctgtgacattgaccacgccggcaggcgcggccggacgccactggggatatgcgtggataccggtggtccagcaagacgtgtggccgaacctcgccgggcgcaacaccatgttcggtggtgaagaccttgccgagctcgtgctgaggggagcgcttgaagaaagtgacaaaaccgggcatgatccgcggttcgcggctgtgctgtcgggcgagaagaagggtttcctggtcgcgctgacccgtgcacggcgaatcatgatcagcgcggtatggaacgacagcatgagcccctcggactttcttttcgggtatctgccggaatactatccgcgcaaccggcaacaggcgcctttcaccacagtgggggcgcatacaggatccgccgaatatgatctggccggattggacgccgacccacgtgggttggtcagcgccgcccgcgcggttctggccactgctcaaccgcagcaggctgccgcaaaggacgccgcggttgcgttgacactcctgtcggagcatggtgtgcgcgccgcaaatccgcagagctgggcgttcgtggaatcgccggcccaatcggatagcgcgtcatctggcggtgcgtcatctggcggtgcctcatccgacagtgcctcatccgacagtgcctcatccgacagcgcgtcatctggcggtgtacagtctgacggtatccaaacggggaaaggcaagacggatgcgcaggccgcacccatggtcaccctgtctccatcggcggtcgacagcctatgggcatgtccggtgtgctggatgctggagaaccggtttgccggtcctcgccccagctccgtggccaccagcttcggaaccctcatccatgcggttgcacagcaaggcagcgaggaagggctggaccatctttcccacaatgcccagacgttggccacactgggcttggactccacggccggcacggaacgccgcatcgaggctgtcacggcacggcttaatgccatctatcagagcaaacgccccgatccgaatgccatagccgacacccggaaccgctatgaggccacccgtaaggacgagtccgcggcagatgccctgcgcaacatcgccgattactttgtgcgcagcgacgccgatccggaaacgtatcttggcaagaactccagcaacttcagcattggcgcattggccggtgccgaatgcgaacgggagtttgccgcacgattcgatgtgcgtgacatactcgacgcatacaatgccgtgcccggcatgcacccgatcgatcggaacatgctggtccgtctgatgggagcactggtcggagggtggccggaaggcatggacgagcatctgaccgtgagactgtccgggcgcatcgaccgtatggaaacccgcgtactcgcagacggcggcgaatgcattcgcctcattgactacaaaacaggcagaacgcccacggtcaaacagattttcaatgatctgcagctcgtgtgctatcagcttggcctcgtgttccccgaagacgggccgcgcggtgccaaggcacttgccgcaatgccgcatatcagccaaagcgcgctgttccatgtcgggcagaatgcggcaccagccagaagctacgccccggaaggtgccttccagccgccgctgttcactgatggttcgttgaatgccgaaccgttcacgccacgatactggtataaagaccccagccgtttcttcgacatacccgccatagatccggctactcctcccgaaggtgtgagtgccgaagcgtgggcgcaattcgccgcgctcgccggtacgcagacgttatggtcgctgaccatgatcgcccgcgtattctatgccgcggcggccagcaggtcggccatcatcgaggcccatccgcaagacacccatatcggattctgccgtatgaagaacgtctgccctgcctgtgcgggccagatcgacacgattttcgaaacgaggcaagcatgagcacgttcactcccagtgcggaacaggccgccatcatcgatgcgccagtcgatgctgacgtactggtggttgccggtgccggttccggcaaaacctttacgatgacccaacgcatcatcgcgcttatcaatcgaggtgtggcacctgaacgcatccttggcctgaccttcacacgcaaggccgcaggcgaactgctggaacgcgtctccgccgcagtggccggtgatatggcgggctctacgaccgccacggtgtctgatcgggcattcctcaagccggccattttcacgtatgacgccttcttccagaccatcgtgcgccaatatggactgcttgtcggattcgatcagaacacgcaaccattgagcgcagccggagcgcttcaactggccaccgaagtcatcgacagtcacatggatctggcgttcagtgaggattttggcgccttctccagtttggcgaaccgtgttctggcgttgtcggatgccattggcagtgccatgatcggtgccggctgcaccagcttcgatgatgcgatcaatcaagtacggcaatgggattcggcattcatcaatcgattgcagcaagccgtcgcagacgaacccatgcccgaggacgagccgaaaatccccaagatcaaacgactgaagaaagataccgacgccagctggcaagccaagctcgatgaccgtgccgaacatttgcacgcccgctgcgcctatcattgcggtgcgctgctggagaccacacgcaaacgcgatattctgctccagctggtggaggcctatgcccaagccaagcgggaacgcaatatggccgaattctccgacttcaccattgccgcgtatcagcttatcgagcgcttcccctccatcggagagcgcacgcgccgcaggtacagccatgtgctgctcgacgaatatcaggacacctccaccacgcaggccgctttgctggcagcactgttccatgtggatgcgtcacggaggtccgccgtcaacgcggtgggtgatccgttccagtcgatttacgcatggcgtggtgccagccctggtgcattccgtatgttccagcaagatttccacctgcctgccggatacaagccattcccgttgtccgtcaccaggcgcaacagccgtatagtgctcgaagccgccaataatctcacgctgccgttgcgctccaatccgtcgcgtccctccagctcattgatgcgtgaggtcgatgtctcatcgctcgaccccatgcctgatgcccccgaaggaacattgggagtactgggcttcgccacggccgggcaggagatcgacgccgtagtgcgtttctgcaagacggccatcgcacggcaccgttccgcagccgaacaacaggaacagatgccgggcgaacagaaagcgccggtcgccgtgctgtttcggtccaaatcacatatgcccgaatatcaggcggcattggaacaggccggattgaccacattcgtggtcggctattccgcgctgctggaacgtccggaaatccgcgatctgatggcgttgctgcacgtggccgccgaccacaccgatacgggatcgctgatgcgcttgctggccacgccacgattcaccatgtccgcagcggatttgaccatgttggcccgttttgctgaagaacagaacatggaacaacgcttccaagcattggtgcaggccggccttgcccaaccggatacaccagcgaatgaatgggcggctgtggtgcgtgagtaccgcgatcaggtggccaatgcggtattcctgccagacgtattgctacgcggcgacctggtaaaactgcttgaacggttgagcgcacacgggcgcaacgccataacccgggccgcggtgatgctccgtcaggtgcatgatgccgtcgggcggccactgggcgacgtgattcgcgccggcatagaagcgttggatcttgacatcgacaccgtattggccggtgtgctgcataatccgcagcaccgcgccaatcccgctttggcgcatatgcctatggatgcgattgtggatttggtggatacgtacacgcaagagattgccgctgagcaaactccctcgttgcatgggttcatcacatgggtggatcatctggcttcggtggaggatgaagccgccagtctccccgacgctccggtggatgtggaactgatgaccgtacaccagtccaaagggttggaatgggatgccgttgcggtagtggggcttaccgccggcggattccccagcaatcagggcgaccatctcaagatcgtgctggacgaacaccatacgggaggcaccgagcaaggtcactggaccgcacccgaatatcacgagaccgccgactcctggctcaccaaccccaccgccgtgcccgtgcctatgcgcgccgatgccggcattttgccgcgattcccccatgatgccgatgtggaagccgaccccatcgcatcgttggcggctttggatgatgtggagcttatcgatgatgaagtgttcggctccatgcgcgaattcggcgatggcgtggaagaagtggatgcatccggctggtatttgacgcaggcggaggaatatgggcgccggctgcatgccgacgaacgtcgattgatgtatgtggcgcttacccgtgcacgggaagatgccctgatgacctattgcgcctatacgggcgaatccgggcgggacccatcagtggtgcccaaaggctctcacgccgctcagccatccaatttctggcttgaagtgcatgacgcgctccaaacccatgagcatgcgatatcggctcaggactgtgtggaacggctgcaagccgccaatgccgggaagcccatgctgatctcggcgcaaggcgaagcgattgccactcccgaagggttctttatcggagagcatgccgcggcatacggtgacgccgtggtgggggaggcgtggcaaacgccgattacgcagacgaatgccgccgccgaattgccgtggccggctaccctcagcgacgcggtgcatgaacagctgtcacgcggcatcgatgtcatcgccgcagattcctcgtcacttgagcagcaccaagacgccggcccactcctgcaacgggcacaattgctggtggacgacgccgatttgatggccgatgccgccagcggccagtcgcttgatgaggcagtcaaagccaaggcgcaacgcgttctggctgcaggacgccagaacgtgacaagcctgcaagcccgcgtaggtggcatgaacgaacgggaggagcgcctctactggcgtagcattatccgcccgattccgcgcatatcgtctccggcggccgaggccggcacgcagttccatgcgtgggccgagcaattcatcaatgccggtaagccggatgaagcggtactggcatatgaagccgaaccaagcatgccgcatacaggtcaggatgcgggattcgtttcccgggaagccatgttggccgatttggccgaacgggagcggcaatgccgcaagccatccacacggcagcccgctgtcccacagcccacggctcaacaatccgtatccgccgtatccgccacttccataagcagcgacaatgccaccgagtccaagctggtggcgtggcagcgcagactggccgaatcatcgtgggccaagcgcatcccggcgtggacggagcgtgccatcgtcgtggacgtgccgggcgtgggcctggtcaatggcaaactcgatgcggtattcatcggtggacttgacccgtccagcaccaccgcacgctttaccgtggtcgactggaaaaccggtcgtcggcccaccaagccagacgacatcacccgcaaactcgcccagctcgacatgtaccgactgctgctggcagcggtcgaaggtgtggaattggacagtatcgacgccactctctactatgtcagtgagcccgacgagggcttgcgcgagcttcacgcccgcgcgaaaaccaaacaggaaatccttaccgagttgagctccggcattcccgaacaatctgacaacgactgagcccaaaggctcatgacctgtacagcatcggacggccttcaccggtggagagaccttatgcatcgcaaggcatctccgacgatgaagacgactggccacgtaccggtccgcggttgaaacgcaccgcgtgacgttgctcgggaaccgctaccctcggatggcacgtgtgggcgggcgcacgtgccggacaacgcaccagtaaggagttattgtgtccacgactcgcgcggtttcgaagtcgtccgctgcccactcgccctaccagcgcctgttcatgctgcccggagccaaggcgttctgcctgtccggcgcggtggcacgattgccgatctccatgatgagtctcggcatcgttctggcgctcaaccatctctacgacaattggaccatcgccggcaccatgagcgccgcctatgtgctggccatgagctgcgtcaccccgttctacgcccgcgccttcgaccgtttcggccaagcccgcgtgggccggcttgcgctcgccgtgcagatcgtggccatgctcgccttcgccttcgcggcgttggtgcgcgtgccgattccgctgctgttcgtcctggccatcatcatgggtctgacgcagttctcattcggcgcattggtccgaacacgctggtcctatgcgttgcgcggtgtggaagatggtgaacagctgctcaacacggcctacgccatggaagccgccattgacgagatcgtctttattctggggccgattctggcggcttggctggccacctccgtgcatccggtatcccaactgttcgtgcccaccgtggcatgcggtatcggcggcaccatattcttctcgctgaaatccacccagccaccggttatcgtggaacaggtcaccgtggccgcgcacgatgacggcagccctgctgcaagcgaagatgccgaccagctgaccctgcgccagctcaaacgcagcggcgccaagcccaagagcgtattgctctatgccggcgtactgccgttgctcgccgtgttcatcgtgttcaatatgagcttcacgtccttcgacgtgtccatcaccgccaccatgaaatccatgggacttgagcccttcctcggtctgcaattggcgatgttcgcggtcggctcgtgcatcggcgcgctggtgttcggctcttgccgactcaaaggctcccattgggcgcatatggtgatgttcctatcgctgctgaccgtcggctacgtgttcttccggctgtcaatggacaatctcatcctgctgggcgtcttcgaaatcctcgccggcctgaccgtctcgccgacgttcgccaccggcaacctcatcgtcaaggatctggtgccggcggaatccctgaccgaaggactgagctgggtaaccaccgcaggcacggtcggcacatcgatcggctcgtccgtggccggcattgtgcttgacgcctccaaccctcatgtgggcatgatgctgccattcatcttcacgctggcgtccgtgccattggcgttggccggatgggccttggccaagcggcgtgggtgaaacggaatcgggctacgcctgatggatggttggcggcttcgccgggggtctctccctcagtccgcttcgcggccagctcgaacgcaattagatgatggctttcagccaactgaattattgctcactgtcgttcgccctcacctaaaaacgcctccggcgttttcttcacggttcggctcatcagagggagctcgacttcacggttcggctcatcagagggagctcgattctgtggacgggatattggcgtgagggcttggcggtgataggctgattgccgattggaaacgttccgggtacattgccgggcaggtacgggtagacagggaagaagacatgatcaaggtttcggtggtcggagcaaagggccgcatgggctcgcacgtggtcgaagcggtgaacaacgccgaggatacgcagctggcgctcgcattggatgccggcgacgacctgacccaggtcaccaccgacaacaccgatgtggtcgtcgaattcaccgtgccgtccgtcagcctgaacaacgtgctgaccctgatcggccaaggcgtggacgtggtggtcggcaccaccggttggaccgacgagaaactcgcccaggtcaaatccgccatcgccaacggcccgaagcccgaaacccagaaggtcttcatcgcacctaatttcgcgatctccgccgtactggccgactactttgcaaccaaggccgcgaaatacttcgaatccgccgaagtcatcgaactgcaccaccccaccaaggtggacgccccctccggcaccgccattcacaccgcccacggcatcgccgaagcgcgcaaggccgcaggactcgcccccgtgccggacgccaccgaaaccgatggcggctcacgcggccaggtggtcgacggcatccacgtgcacgccgtgcgtctgcgcggcctcaacgcccacgaggaagtgctcttcggcaacgccggcgagcagctgaccattcgggccgacagcttcgaccgcaccagcttcatgcccggcgtcctgcttgccgtgcgcaagctcgccggcgacgctccggctggcctgaccatcggcctcgaccacttcctcgacctgtaatcgacccgcagtcgaccagtagtcgcccccgcatttcaggcagggaagcgcgccgggacgcgcatcacggcattgccaccggctccggccataatgccacgcattcagcaacaatcaaggtacgtagtataagagtccacaatgggaagtacggtgaacactatgagcgagcatgacatgcaccttcttgagccagcacctttcggccgcattctgccggctatggtcaccccgatgaaatccgacggcagcgtcgatttcgccgccgcgcagaagctcgccaaatacctcgtcgccgatggcgcggatggtctggtggtcaatggcaccaccggtgaatcgcccgtcacccatatggatgagaaggtcgagctggtcagggccgtcaaggaggtcgtcgacgttccggtgatttccggcgccggctccaacgacaccgcacacaccgtgcgtatggtcgaacagactcaggaagcgggcgccgacgcggtgctcgtcgtcatgccttactattcccgcccctcgcaggacggtatcgtcggccactacaaggccgtcgacgaatccgccgaaaagccgatcatcgtctacgatgttcccggccgtaccggcttgaaggtcaaggtcgaaacctacgaccgactggccgaacttgaacacgtcaaggctgtcaaggacgccaccggcgatcttgcagccgcagtggagaagcagcagcgcaccggcctcgcctggtattccggcgatgacggcctgttcctgccgttcctctccatcggcgccgtcggcatcatttcggtgattgcccacgtcgcctccaaccccatgcagcagcttgtccaggcattcgatcgcggcgatatcaccaccgcccgtcgcctcgccaaccagctcgccccccttgtccacgcgttgaatggcgacggctatcaggccgtcatggccaaggctgcgctcaaggtcaagggcgttatcccctccaccaccatgcgtctgccgaacatcggtcccgacaccactcagcttgacaaggctgaagagggcatgcgcgctgccggactgctgtaagcccgaaacgctgcatacgggttgccagcccgccgcccctgcatgacagagcagaggcaccacaacagaaatcccaaaaaggttatggcacaagaacaaaagaaaacaagcaagaacacgaattctcgccgtcgcggttccgcgcgcggccgcaacgccaacggatccaacagccgtacgccgtcccgtaagatcaacgccacccggcaggccaccgcaccccagcaggatgccgtgctgatcgccccgccgaagtaccgcaagggctccatgcgcatcacgccgctcggcggcttgggcgaaatcggccgcaacatgaacgtgatcgaatacaacggtcacctgctgctcatcgactgcggcgtgctcttccccgaggaggagcagccgggcgtggatctcatcctgcccgatttcagctacatcaagaaccgtctcgacaaggtcgacgccctggtgctcacccacggccacgaggaccacatcggcggcgtgccctacctgctcaagctgcgtccggacatcccgctgatcggctccaagctgaccctcgccttcgtggacgccaagtgcaaggaacaccaccagaaccccaccaaggttgaggttgccggccgtgagaagctcaaggtgggccccttcgacctcgaattcgtcaacgtcacccactccatcccggacgccctggccgtctacgtcaagaccccggccggctccctgatcgacacgggcgatatcaagctcgaccagctgccgctcgaccaccgcatcaccgacctcgtcgaattcggcaagatcggcgaaaagggcgtggacctgctgatgatggactccaccaacgccgaggtgcccggcttcgtcaagcccgagacctccatcggcccggcccttgaccaagcgttcgcccaggccacccgcaagatcatcgtcgccagcttctcctcccacgtgcaccgtgtgcagcaggtggtggacgccgcccacaagtacggccgcaaggtcgtgttcgtcggccgttcgatggtgcgcaacatgtccatcgccgccgacctcggctacctgcacatccccgaaggcaccgtcgtggacctgaagcaggccaacgacattcaggacgacaagctcgtcttcatgtgcaccggttcccagggcgaaccgatggccgcactcggccgcatcgccgacggcaaccaccgcgacatccacatcaacgagttcgacaccgtgattctcgccagctccctgattccaggcaatgagcacggcgtctacaaggtgatcaacaagctcgtgcagctcggcgccaaggtcgtcaaccgcgacaacgccgccgtgcatgtgtccggccactgcaacgagggcgagctgctgtacatgtacaacatcgtcaagcccaagtgcgccatgccgatccacggcgagaaccgtcacctggtggccaacggcctgatcgccgtcaagaccggcgtggacccgcagaacgtggtcttggccgaagacggcgacgtggtcgacctgtatcacggcaaggccgcggtcgtcggctccgtgccgtgcggttacgtgtacgtcgatggcgattccgtcggcgagctgaccgatgacgagctggaaaagcgccgcattctcggcaccgagggcttcgtatccgcgttcgtggtggtcgacaccgacaaccacgaggtcgtcaccggcccgaagatctacctgaacgccgtggccgaggacgaaagcgagttcgacaaggtgcgtcaccagatcgtcgaacagctcaacgaccagatgatgcagggcacgcgtgacacctacaagctgcagcagaccatgcgccgcacgctcggcagctgggttgcgcgccagctgcaccgcaagccgatgatcgtgcccgtcgtggccgacatcgcccaggacgtcgaaaccgtagaaaccaagtagtccggattatccagggacgaccgtaaggagtaattgaagtcatgcccggttctaatctcactcgtattgaagccgaagaacgtaaggccgttatcgaagcgccgattcactatcacgtcgaccttgacctgacggtcggcgcgaagaacttcggttccaagtcgctcatctgcttcaacgcgaagcctggttcgtcgaccttcctcgacctgattgccgacgaagtgacatccatcgacctcaacggcaagtccctggacccagccgtggccttccaggacaaccgcatcgaactgaccgacctcaaggagaagaacgaggtcaccgtcgaagccaagtgccgttactccaacaccggcgagggcctgcaccgctcggtcgacccgtccgatggcaacatctacctgtactcccagttcgaggtgccggacgcgcgccgcgtctacgccgtgttcgaccagcctgacctgaaggccaccttcgatttcaaggtgctcgctcccgccagctggatcgtcacctccaacatgccggttgccaccatcgaggacgatccgcgcgaaaccctcgacggcaccctcggcgacaagccgaacgagagcacccgtctgtgggacttcgagccgaccccggtgatgagctcctacctgaccgccatctgcgccggcccgtacgccgaatggcacaccgaatacctgaacgaagacggtcgcaccgtgccgatggcccagtactgccgacagtcgttggccaaggccttcgcgaaggacgtcgactacctgttcgacatcaccaagaagggcttcgcgttctacgccaagacctggggcgtgccctacccgtacgccaagttcgaccagatctacgttcccgaatacaacgcgggcgctatggagaacatcggcatggtcaccatccgtgactcctacgtgttcgagtccaaggtgaccgacgcgctggccgagcgccgcgtggtgaccgtgctgcacgagctggcccacatgtggttcggcgactatgtgaccatgaggtggtggaacgacctgtggctcaacgagtccttcgccgaattcacctccacgctggccactgccgaagccaccgaatggcatgacgcctgggccaccttctgctccggtgagaagagctgggcgttgcgccaggatcagctgcccaccacgcacccgatcgtcgccccgatcaacgacctcaacgacacctacgtcaacttcgacggcatcacctacgccaagggcgcctccgtgctgaagcagctggcattctacgtgggccgcacgcagttcttcgaaggtatccacaactacctgaaccgccacgcctactccaacgccaccctggccgacctgctgagcgaactggagaagacctccggccgcgatctcaaggcctggagcgccaagtggctggaggaatccggcatcaacacgatcgccaccggcctgaccgtaaacgcggacggcaccatcgccgaattgaagctcacccagagcgcgccggccgaacacccggtgctgcgtccgcatcgcctggccgtcggcttctacaacgaagacgccgaaaccggcaagatcgtgcgcaccgagcagttcgaactcgacgtggatggcgaaaccaccatcgtcgaggccgcggcaggcaagccgcgcccggcattcgtgctggtcaacgacgatgacctgacctacaccaagattcgtttcgacgccgaatcccaggcattcgccgaagccaacctgcatcgtttcgacgatgccctggcccgcgccgtgacctggctcgccttctgggatatgacccgtgacggcgaattcccggccgaacgcttcgtggacatgaccctgcgtcttctggccacggaaaccgaatccaccaccttccgttacgcgctggcctgcatgagcaccaccgcccaccactacgtggcgccagcccgccgcgacgatgtgctgcgccacgtggccgccgagctgtggaccctggccaacgccgccggagccggctcggacacccagttccagctcgccaccgcctacctgggctatggcgaggagggcgatgccgcattcgccgccaacgcacacggtctgctggacggcaccgtgcgtcttgaaggcctcgaaatcgacaacaacttcacgtggaccatcgtccaagcgctcacctccgtcaacgagatgaccaacgacgacgtggacgcgcagctcgccaagaaggagaccacggaaaaccgcgagttcgcctacggcgcccgcgcctccatggccacgacgcaagccaaggaatgggcttgggatcaggcactccacaacgacgagctgaccaactcccagctcgaagccgtggcccgtggcttctccgccaccccgcgccacgacctggccgagccgttcgccgcccggtatttcgaggccgtcgactggatctgggcgaacaagacctaccacatggccgaggccctgctcaacggcctgtacccgggttacgccgatcccgccacgctggtcaagctcggtgacgcctggctggacgagcacattgccgccgacaacgccctgaagcgtctgatcgtcgaaaacgtggcatcctcccaccgcaccctcaaggttcgcgaatacaacgaagcgctctgatttccttctggctcccctcgggtgcgaggggagttgtcgcctcaggcgactgagggaatcgcttccgcgaggagctacgtccacattccaacataaaacccgcaaccaatcctcaacagcgtattctcgctcaaggccggcaatgtgccggtcgatgagcgacaaggatacggggaatgattgcgggcttttccataacttcattactactgattctgttggccggaatcggcgcaggattcgtgggctatgcggtaggcgcatcgtcactggtctcatacccggccttgctcgcgttcggcattccgcctgtattggcaaacgcttctaacaccgttggcgtggtcggcacgggcatcggtggcgtgatgggcgcgcgcaaagaactcaaaggccaagcggtacgctccattacgtatgtggtcattggcgcgttcggcggggtggccggtgcgtttctgttgctcaaactcgacccgagtgtctttgaattcgccgcaccagtgctgattttgctgagctcgctgatcatcgccatcaatccgcgcggccgcatgcaggccaagcaggccgccgcggatgccaccgcgcaactcaagcacatcgaagccactgaagccaccgatgccactgatgccgccaagcgcgcaaccacccctaccgcacctcaccgcccgccggaacaactcgtgcagcccatgagccaggattcctggtgggtatggctgggcgtggtggcagtcgccatctactccggctacttcggcgcgggcgccggcaccctggctctcgccatgcttgatgccgccaaaatcggcccattccacaagatcaatgcattgaaaaccctgatcggcacaggcgcgaacatcagcgcctcagtggtattcatcatccaaggcgcggtcgattggccggccgccatcatgctgtgcatcggctgcttcatcggcgggtacatcgccccgcccatcacccgcaagattcccgcaaacatcatgcgcgccgccgccgtaatcgccggcatcattctcaccatcgatctggggctcaaaacctattgattcatgccttacactgatgcagtgaagcatacagcatggccgccaaccgcagcgtggccgcagaccccgataaggtggccaatgtctggcatttggcgactgcggaacctgagcgcctagaaaccaacgcggtaggcaaagaggtgagtgacttcctcgatccgccagacacgtcgcagattcacggcgttgcgtgccatgctgattggtggttcgcggcgcgagcaggtgctgttcgccggcgttatgaaggagctactcgcgcccatcaacaatccgcgatatgtcatcatcggcaaggaatggggcgtgcgcacgtacggtgtaagcttcccattcccgtccatatttgcccgccgccagcaggacgccgaaatactgcgccggcagttggaccgctgcctgacgcattgcaccatggtatacacccgcactgaggaaggccggcgtacgctacttcgttgccaaacgcgttctttcctcaaccgtgacgaactactgccgcgcatactgaccacaacatcggagtgatagatcgttgcatgcatagccgagaccactccggtagaggagatgccgttgggcatgttcaccgcatggctcagcgtgttcctcgccgtcgtgttgtatacgatcacgtttgccggcccattcgtgctggtacgccgtcttcgttcccgcgccagagcccatcgacctgcccggcatgcccgttaaccgatacttctcattgttcgtctatcgagcaaggtggcacgtacgatacttggtataggggagagtttctcgctgtctgtggtggaaaatccgagttttattatctgagtcagtgctttgggtttgcgttttgggctcgatttactattggacggcgatatccggggcgggcggctagctgttggggttcttgtcgcggctgtagatgtgtgttcggtctatcggtgatgcttgtcctgttcgtggaccgggcgaagtgcgggacgacgcgcggatttcgcggtttttcgtctgccgtcccgcagagagcccgggggatgattatggtccgtaacggggattggcgtgattgcgcggttctggcggttgatagtgtggaacgccacgaacgtcaaacgattgatttctctaccatcccacgttcctgcgggacgccgcgcggaaaccggccaaatccgcgtgccgtcccacaggcatgaggctgtattcggccggccactgtccatggcggacggacgaacagaccccactggccatcgtctgcgcttctgcagcgctcaccccggccttccacggaaatcatgacagcatgaaggtgacgaatggcctggcttgcctgtggacgccgatcaatgtgtgcgacaatgattcgcggtacatggcccctggcgctggagtcgcagatgctgcttgtgtggcacaggagctgtgctggtacgtgtgatagccggcttgttgtccgtactgctgactgtatggttgccttacgaagcggtttttgatgagagaaggttgatgatgtgggatcgtgtggatgctgttgccggtgcggttgttcgtcggcagttggattggccgtggtacatgctagaggccgtggtgttcgtcggcgtgctgtggctgctgaatgctgataaatctggttttcctttctgggtgggtagggttttccggtacggcattgttgtctggtgcgtgttcgtggtggctggttcgttgctcggctggcgtatggtccgtgtcaggcagcgcatgtggccgacgtggcggtattggtatcgcaacggcgtcatcgcgtcgttcgtggtggcgtgcgtttgcattgcgatgatgtgttgggctttttccgtggtttcggggttcctgtgctggttgagatccgttatgagccggctcccggagtttcttcggtcacgtattcggtccatgcgcgtgattggcaggccaaacggaccgtcgatgctggaagcacggtggtgcttcgtggcgaagccgtgcgtaatatgcgggtgaacaggttctacagcaagggaccgtggctgacgttcacgctgaatgtgtatgacaataatggctttttgagtaattacgccatgcggtatatgcaggtggtggtgttgcctgtgccggctcgttcgcagggggtatgcgtggtgctcggtaagcgatttgttggggcatgcggttcggccacagttggtggggccgccgcagaatgtgttgcaggtattgtccgctcatccgttgcactccaatgtgattgttgcttcggggcgggcgtatctgtgggtgtccctgtgcgataggtggaatatctacgaccgtttcatgaaccccggtttggagtcgcagatgctaccggtggcgcaggagttgtgcggttttcttgccggccgcgtgtgatgtgtattatgtacgcggcgatgctggtcgtatggtggtgtcatgccgttctttgagaggtcgtcagggcccacgcgtcatattttcaagtatggtccgtctcgtatttattgttacgatcggccggattcgctgttgatgccggtgggtgcccggcgcacgtacaggtcattgctgaagtgggagcggaagttgccctgtgccacgccgttggatgggatcgcgcgtgatctgggtgctttctggctgttggaccagtggttcacggtcggtctgcatgggtgggccgaatcgatgatcagctccagcatatcggatcgcaatcgtacgttctgccagtccgtgttccgtgcgtccgatgccgcgaaccccaagtatgtgccgttattgcaggaacatcgcgatatgctgttcgaccgggtgcgcggtggtgtggcggggttggatccgtctgcgatggattatgtcgggtttcgcgcggcccgttgccgtgcggggcttgcggattggctgttcggcccggatcgggggatactgctcaatgatgttccgggcactggcgcgtggaacacggacccgttcccgcctgatggctggcgcgagcagctgggctggacgccgccggtttagtatgccgcacgccatctgtacagtctgtacggcatcgttgggggcctcgtcatgtccggtccggtatctggtttgccgggcctgggcatctgctgctcgtccttgttccctttcttgacaatgacaggggctttggctgaacagaatgtgggagtatgcttagtttcttgtagggggttcttttattgaagctcctcggcgtaattgaccaatgacggcgtgagccgggaagagttaaggagatgggccatggcagaacatatttccgctgaagccggcgcgcttgcgaagggccagcaggccgttgcggaggcgaggcagggcatccagcaggagatcaccagggttcgtggcgagatcgagcagatgggatcgtactggtccggcgacgcggcgaccgctttcacccgcatggtgaatgcttgggatgagaagacttccagcatcaacaaccagctgaaccagctggagcagtccctgcggtccacggagcaggagcaggagcgttacgagcaggagacccagcagtccacctcgaagatcgccagcatgctgagctgattggttcggggaaacaagtatcaggcagataaggaaagcaaggaaatattatggctattggttcttttgccgtgaatccggctcaggtgcaggccctgtccgagagcattcgtaatggtgctaacggcattcagcagaagctggatgatctggacgccaaggtcagccagctgaagcagaactgggatggttccgcgcagcaggcgtatgctcaggcgcagagcaagtggaacgccgatttgaacgatgtgcgcaacattcttgcgcagatcgcttcggccactgctgagatttcgagtggctacaccgccagcgaccgcaaggccgccggtttcttcggctgattgagccgattctttgatgtgctgtgtttgccgttccattgcggtgttggtgtgggacggcaaacgcgtgtatatgcggtggatgcgttgatgtgagtgaacgggggagaaccatggcggaagagattcgttacgatgccgatgaggccaatcgactggcggcacgcttggaaacagcatcggagtcagtcaacgattccgcgagtgagacttatggcgtgaaggtgactggaggatggaaagatccatacaccaagcgaatcaatgagtttttggcccgcagcgtcgcagtaattcgtgaagaccggacgcgctattcgcagaatatggctgactatggtaagcgtttggcggatgctactgcccatacctcgagattcgaagaaagctttcagactcaattgcaaaacaagcaaaatgagattgagtcatttgaagtacatgagatttaaatagttgctgttatcttgacgttgtgcagcgctgtgaaaagaggagtaatgaccacagatagacctgtcttctccgtgtgttcaggggtattggcggcttccttgttgttggtgttgtcgccgtccgcgtatgcggatgatatgggtggcttgtggccggtgaaggacagtgcgattgtctcggcgcatgagtctggtctggatggttctggggtgaagatcggtgtgctggacactcgtgttgtttcggattatccagggttgtcggacgcgacgaacatcgaataccggttggggtcgttcgtcaatgcgactaccgacgaaccggatgagtgtctgataaaaggtgtaccgcttcagaagacagtcacttccaaagaggggaatctctattcgtcgcatggcacttacatgctcacatggctggtgggcaatggcaagagttgggatgccagccaaggggtgacgggcttggtgccgaagtccgatgttctgtttctcacgataggacaagatacttcggacggcatcaaaatgatcactccttgtgatggggctgctatgtcggatatcgacaaggacgttagtaccgcggtcgactggggcgcacgcatcatcaacatgtcaaatggcggtggcgtaggagattatggtaatgatgggatgctcaaggcgctacgccatggcgtgatcattgttgcgggccgttcgaatgacaaggagactgacgctattgtcaatggcagcagcacggatgtgatgatcggcgaccctagagagcggagttctttcccaggtgtgatccgcaacaacgaggtcggtcccgacgggcagatcgccggcatttcggatgtggctgatgcgaacgtgaacatcctttccccgggtgatcaggtgcttcatcagcgcattaattcgaaattcatttcggtgggtacgggaggtacgtcgactggttcggctgtgttgtctgggtatttggcgttgactgtgcagaagtggccggacgcgacgggcaatcagattctgcagtcgttggtgcgtaacacgaagggcaatgattcgggtgaggcgaagctggacccagagcataagaggggttatggccaggtcgatccgggcaggctcctgacggtggatccgacgcagtatccggatgtgaatccgattttggaggcgcaggtgaccactgcgtcgaagctgtcggatgatcgttcgaagtggtatacgcaggattgctccacgaaccctgacggcgtaggcagcctgctcgactcgtatcccgttttttgccaggccggtgagattggcagggagtatgagcgtcagaaagccgcgtggaagaaggtggagcagtgcaggtctgatggcggttcggattgcatgaggtattccgccaccgcgaccgcggacgagactgaaggcaagtctgatggcaagtctgacggcaggaccgtgctgccgggtaccggtgacgggaaggatggcgtgaagtcgtccggtgtgccggtgtgggtgtggctggccgccggtggcgtgggtatcgccgtggtggctggtggcatcgtgttggcggtggtgttgtcgaagcgcggaaagcagggtcgtcgtccgttgccggatgccgctgccgctggcccgtcgccgtatgcgggtccgcgtcagcctgtgccgggtatggcgtatccgaaccgaccgtattcgccgcagtatggcggtcccgggtcccggcctgtgccgcagtaccaggctccgggcccggctcaggtgccatcgcagtaccggcggaatgtcggtccggtatctcctcggtatgctcagcctcagcagcaggcgaatccggttccgcagaatccggttcagccggcccaaccctatcctcagcctcccgccagtcaggttcccaatgtcgcaggcggctatggtcaggaacagggttattccccacaacagtatccgccacaatccgatggtcggaataagcccggccagggccggcatgcacggtaaaccatagagagtattaggaagggaaaggggacatcgatgtctgacaaggataaagacaagaatgttgtcgagcaattgcttgattcagtgataacaagttctgattccaatataggtcccattgagcagcgtctcaatgagattgccaagagcccgaactgggagttacagggaaatattctgtctgttgataatgctgaacaagcagaacaagcagtgaaatatgtggttgaacgtgtatccgatactgatgttttctctggtcaaactgcgcttagtgcaaaacagcatggagaagatttgcttgccgtaaattatgcggatggcctatccagtcaaattgaagcgatgcagcgcatcattgatcacgccaatgatgctcttgagtatgtgaggaagcaaagggagtcattgccggggaaccagcttgatgctgtttcatctgctgcgatacgtatagcagatgtgggtgcgactgttctcttgccttttccgcttgctgctggtaaagcaactattcagattcttactggttggactgacccggtagggaaaatcaatgagcagttatgctcgaatagagagaataaggcgcaagaactacttcttgatttttataagagattgcgtaatgcgggaaattatgatccggtaaaaccagtagtctccacaccagggaagcatcaggatattggctcgacggatgttgatatttgggatcagtctggtgttggtggtcgtgttcctggtcctggtacgtatttgggtgatggtgcgtatgatctcaatggtgatggtttgccggattattacgattacaacatggatggcgtgccggacgtgtgggtggattccgatggggacggcattccggatgtctatgatacgtatgatccgaatgacgtggcccagaaccggaagtatgccgaggctgttgaccagataggccggaaccgccggaccagtccgtacgacaacgatcggggtggcaatggctctggtggccaggacgtcgatgatcgtccggggtatgtggttcctgatgattctcgtcgtcccgcgcctccgagcccggacccgtacaatccgtatggtccgtacgatcccaacgacccttatgatcccaatggtccgtacgatcccaacgacccttatgatcccaatgatccgtacgatccgtcgattccgattccgtcgcgcaagcccaccgataacgacgtcgttgacgtcgattccgatttggatctgtcgccggttccggttgtgccgaggccgacggtgtccgcttccggtttgggtggttcctccgcggggctgggtgctggtgcgtcccttggtggcgttggcggtgccggcgtcggcatcggcgcgggtgtgtcgggtggctcgttcttcacgaacgcgccggtccatgcgcaggtggtgccgggtggcatctcgggcgccaccggcatggcggccggtctgaagtccgctggtgccgcttccggggcggcggcttccgctggccgtccgggcatgatgggtgctccgggtgccgccggttcgaaccagtcgaagaacaagcgtcagggtttggggtacatggctcccaagctcgaggatgatgacatcgcgatcaggtccgtgggtgccatggctggccatcgtgccaggccggccggcgactgacgcccggatcggctaggggaaaggagcgctcatgagtgatcagattcaggtgagcaaaagcgcgcttgccaatttggccaagggctacaatgacgcggcctcggggttcaccaaaatggggttcggcttgcaaagcaaacaactggaccccagctttggtttggtgctgcagctggtgaaaggcgattacgacagtgccaaggagaacacgctggattatctgtccagtctgggttcgctgatgagcaccatgtcccaggacatcaccgatgccattgccgcctataccgagggcgaccagaagaactccgattccattcaggacctgctcaacaagatcgagaaccttgaacagcagaacaggcagttgagcgacaaggtcggtgaactggaggaaaaggtcggtgaactggagcagggccagacatccggcggcaccggaggctattccggtggcggttccggcggtggctccggatattcggccggtggctccggtggtgcggcgagcgctccctcgatgccgaactatcagatgccgagtcagccgacctatcagcaggatgcttctgggaattaccggaatgatgctcccgttgatgtggattccgatatggcgggtgacattggcggcagtctcgacccggatacgaatgccaccgatattccggatattcccactccgcccagccatgacggcaccacgattcccaagccggaacgggtggacaccacggaaagcgtggatatcgatatggatggcgatggcgtggtcgattattcggtgaacgccgacctggattccaccggtgtgcgtttcaacgatgacggaaccgtgacgctgaacaagaacggtggttcgttcggtactgattccgcgcagaccagtggcatctccttcgacaccgacaacgatggcgccaatgatgttcatctggagctcaaggacggtcaggatgccagcgtgcgtgtcgttcccggcgccgagggcagcagcacacgatacgttcaggtggatacggatggcgacggtatctatgagagtagctatgccgtgcgcgacggtgccgcagcatcgggtgatgcgggctcgggggtatcggacggtgcttccgccgcgactgggacgacggccgaggacagttaccggaccgaggtgagcaagggcgaggaacaggcttggcggacactggccgagaccgacccgttgcaccgatccgttgacgagctcaaggaactgttcaacagacgcgaagagatcgagctgccggaaacgaattcgctttcggatggcgtctggggcggtgcctcggcgaatggctcgatcacgattacgtttggtggtaacaagggggtgacggcatgaacgaatggctgaggcatgcttcggctcgtgtggtgttcattgtcgcggcggcgaatggtggcggcgatgtcgagcacggtaacctgtacgagaaccaggattacaatccggacgtcatcgatattggagacaatgacaacactggtaccggcatacaggccaacgagggggacttaatatcttctggatacaaattggctgaggccggtgagaagttccagtccggcaatattgccgatattcgtgacggggttagcgatcttctgggggccacaaatattcagagtatgaatagctctcttgatcgatggtgggacaacagcacatctcccctgagtatcgcggctggtagaacgcaggatcttcgagatggcatgagccatggtttggtgagtgctagaaatgtcactcgatatttttctagtggtttgtcttgggctcgtatgggtattggtgtgatcgacacggtgtgcaatgtcttgcatatcacgaaccccgtcgatgagattctgcgcaagccgttcggtggcgattgggatgaattgtcccagtccgctcaggattggcgtggcatcgccaccaatctggaaacgatgcatacgggattgcagcaggcccagcggcagatccggacatcgtggaagggcgaggcgttcgaccggtattcgttgtgcaacgaccagatcggtcagatgttcgagggcggtcccgatatctgccgtgagatcgcggatggtcttgatgcgttggtggatgtggccaagaagtgcttcgactatgcgctggatgtcattgaggagctcatcgacctgtgcatggacattgttgaatgggcgtggaccggtgtcggtctagccgtcgtggcggccaagcatgcaggatctgtcatttccctcattcagaatggttacgatattgttcagggcttgtatgatgccgcgcagtcgttcaaggcggttacggcggcggcttccccattggcccagcaggcgaaatcatttgctaccagtcttgaacgcacctgagccacggagcagaggaggatatacacatggcttcacaaggatttgaacaattcatggcgcaggtccggcagctgagcacgttggtggataccaagcagaaggagctggatgagctgcgcaagaagaatgccgaggaacgtgaggagcgtcggaagcagtacgccgaggaccgccgtgcgggcaagcagggccgtgcttggcaggtgctgcagcagcgcatcgatatggggcagacctgcgagcgcgacatcatcatgggcttggatacttctgccgaggcacgtgaggtgcgtgcccaggcggccaaggcattggatgccatgcgcaccgcggtcagcgagcttccggaggacgatcccgcggcgcagcagctccggcagcttcgcgagcgtcagcaatcacgctgattccattgtcgtcgataaaggtgagggtatggatgttgttgaggtttgggatcggtccatgcgggcttgtgggtgggtgccgattccgtcttggccgtggacgttcgataaggtcctgttgcatgatgccatcggcatgcgtgcgccgaagatgccgcgtactgcgaatacgcagtggttttacgccaaggggccttgggtcacgttccagttgaatgtgatggacaatctcagttggtggacgatgtactccgcttggtcgttgcagacagtggtgttgccggtgcgttctcggatgtcggggtatgcgtggtgcaccactacggatttgaagggcaagccgaggcctcagacggtgggtggcttgtctcctgaggtgttccgtatcctgtcgtcgtctcctgcccgtctcaatttgttggtggcggatgggctggcgtatttgtggacgccgattagcgttcatcgtcttttggaatggcaatatatgaccccggaactggagtcgcagatgctgccggtggcgcaggagttgtgccggtacgtgtgatggcgggctgtccgtgctgctgaccgtatgattccctcacgaaacggtatggcgtattcttaggaggagcagccgtttcgaggggtttcggagatgaggagaacggggagaggggcatggctatggcagcgcaggatgcctatgagcgccaacgggtgaatgttgccgtggcatgggctgtggccgcctcgttatgcgtcgcattcgcggtattcggtttcgatggtgtaatgcgtggtcgtgccgcatccaccgattctgccgtgttccagggtttagtcagtggactcatcggtgtggatgcctccgctaaagatgccgtgaccgtaagcgccgttgtatttaatgcgttcaccgccacagtgttggcattactgtcctactacgccgcacatgtgacggtgaggaccgactggcatcgaagcgtcgattatgccggctccttggccacggtcgttgccgccgcgatagctgcgggcccagcgcttgcccgtattgcgcagattatgtcggttactcgttctgcggcactggcggtcttcctctctgcgacccttgtggccgttatggcggcatatatccaatacgcggcttcgggccgcattacagtagcccttgcccgactgctcatcaccgcagccgttattatcgcgctattcattatcgcagtagtaatattcgccattcccgcaccggtaatcgcagcggcctgctccgtgggcggtgcatggtatgtgcatgcccaagcgaatgtgattttgcgggtgccggaccggtacctcatcgaatggcgtcgatacatgtcccagcgttggacggttcgaggcgcggttccggaaaattcacgtccgctctatacccatgacatcagcgaagacatgactattttttctgccgaatacaccgtgggtcttgtggttgggcatctatatattgctgccggatatgttgtgctatgcctcactgtgcctgccgaaccggatctcttcaccactatcggcttcggcgcatattcggtgttattgccctgctatctgttgctccggccgcgcaccgcgggcagtgcgctggaacgtatgcttatgcgttcatgcgcggtattattgcctgcagcagccctgatcacgctgaccaatcatgacgattggcgttggctcgtgacatggttggtattcgggctgatagccgtgggcatagtgatagccgccgccacattggcagtgtcgggcggcttcaagtcgctgatgttgtctcgtgtcggcgactgggtcaccaccggtagtcttgcattgatgggaccagcggcgttcctcgcctcaaacgccatggagatgattcgggggtttatgtcatgactgcagcgcccatgcccattgcttcccaagctcctgcaccacgtcccggtccgtccgtgacccatcccatggtgggggagggataccgttatgctacggtcgggcgacgtatgctcgcgctgctgattgacgtagcatttgtaacagtggtgggcggcgtcactttggcgctcagccgcaacgccatattggccgtcttgtgcgcaatacaggctgtcgccctgaactgggggtgggaggcttgccgcggtcgtaccatcggcaaggcaatactgggcttatgtgtggtgcgcaacactgcggatatggggcagccgggcgctggtctgctacctgccggtccgtggcgtgcgttggcgcgtgtattgatcacatcattgggctgtttggtggcgattgtcgccgcatttatgctggaatggacctcttcactagaccaggtacgtcatcgcggattgcaggatcggctgtccggcactgccgtaattgatacgcgtgtgcagtatgtgacggcaatgtctgatacgggtaatgccatcaccgataataccggtaccagtaccagcaccagatttgactctacttttgatgatgaggatgaagatttggaggcgatggtcggcggtattcttccgccagccactgcgcccacaccctccggccgttcggattcattcagggctttgcgcgcggtacctgctgccatagagccgtcgtccgtacggcctgcccaggtgcatgccgggacattgcaatcatcgtctaccgccatacaggtgcagtctgtgcaaaccgaatccgttcaaccggtgcctgcggcccccaccatctctccagcagtgcccagccctgtaccgtctgttacttccaatacagcaaaacctgtaattcctgcagtgtcccagactgccatgccgcggcacagcagtggtgctgcaacgattgccatccccacgccggcgggcacgacttcagcgcgagtgcatgctgtgccgcctgcattgccaaccgtcggaacaagcccggtcgtgccatcatcttcggcggcaccaatacccactggaccactgcctgttcccaaggccgttcctcaggctgtgccccagcgtcccgtgccggcaaaaccggcagctgccaaacaggtggcggtattgtatttcgaaaacggcaatggtgtgcatctggatattcccagccgtgctctgctgggtcgccgccccaccagtagcgacccaaacgacgtgctggtcagagtaccagacaccaccggcaccatatcccgtacacacgcattgttggagattgcgtccggccggatgtgggtcactgacttggaaagcaccaacggcacggaaattctgaccgaagacggtgccgtgaaacatcttgaggcgggcgcgcgtaccgaaatagcgtttggcacacgtatattcctaggaagcaccgccataagtgtgagcctgctgagaaacagggagaaaaaataatgagtgagataacgccacaggtatcctcccgcatagaccagcccaaagtgcctcacggcaaggtggtgttgcaggccccgcctgaattggagccgagcgacggtgtcaacagtctgttgaccatgctggtaccgctgttgggcagtgtctccgccattgtgatgatggtcatgtccaattccggtctgaccggttttctgaccggcggcatgttcatgctctcctccgtgggcttcgtactggttaacggcgtgcgtcaacgttcgcagcgcaaagcgaatctcacttcgtcccggcgtgaatacttggcatatttggctgaactgagaaaaaccgttcgtaccgcggccaaaaaacaacggcgtgcggaactgtggaattctcccacaccggattccttggtggccatcgcgcaggaacatgtacgccgctgggagcgcatcccatcggatgatgattttcttaatgtgcgcatcggttctaaagacgagccattgtgcattaccttggaggcgccggagctgcctccgctggccgaactggacccggtctccgcttcagcggcgcaccggttcatgatggcccatcaaaatctgcatgatatgccttgcaccatcgacctgcccaagtacaagcgtatcgaaatcctcggtgacgctgatcaggcgcaatctttagcccgcaccttgatatgtcaggcggcggtctggcatgggcctgaatatctgaagatcatcgtgctggcggcccccgaacagcagcacgcgtggcgctggatcggcgagatgccccacgcatggagcgacgagtccaaagatccggcgcttggccatggcgaagtgatgctcgctggcagcgtggaagaagcgaaccgactgattggcgaagacattttgcatcgcagccggtttaccggcaccgggcaatcgaccctgccgtacattctggtggtacgtgatggttcagtgccccagggtgacgcgaacaacagcgatgatgatggcttggtgcgccgcgacggatttgacggcgtcacccttatcgatcttcctgaagagtggggcgatcttgaagaagagcacgtgttgcgcgtcatcttctcccaatcctccatcgaaatgggtctgaacgtggtacgcacttccacggtgaaccagattgagatcatcacatcatcggagcgcgtggacacctgtgccccggacagcctgagtattcaggaagccaaggccgtggcctccagactggaacagttgcccagcgaagaggagaacggcgacaacaaggaacaagcctcccacgccaagaagtcctccgaattggccgatctgctgggcatcgcggatatccatcacatcgacttgaaccgcctgtgggcatacaaaaccggcaaggaacgactgcgtgtgcccatcggcctcaacgcggacacctccatcacgtacctcgacatcaaggaatccgcccagtatggcatgggcccgcacggtgtgcttgtcggcgccaccggttccggtaagtcggaggtgttgcgcacgctggtgttgtcgttggcgttgacgcacagccctgatcagctgaactttgtgctcatcgatttcaagggtggtgccaccttcgccggtatggaaggcatgccgcatatctcctctatcatcaccaaccttggtgaggaagcctcgttggtcgatcgtatgcaagacgctttgaccggtgaaatgacacgcaggcaggaactgctgcgcaaggccggcaacttcgccaacgtatccgattatgagaaggcccgtctcaacgggcgtaccgatttggaaccgttgcctgcactgttcgtggtatgcgacgagttctctgaactgttggccgccaaaccggacattgtcgattccttcgtgaacatcggccgactgggccgttctctggaagtccacctgctcatcgcctcccagcggcttgaggagggcaagctgcgtggcttggattcgcatttgtcataccgtatcggcctgcgcacgttctccgcttcggaatcacgtgtggtgctcggtgtaccggacgcctacaccctgcccagcatccctggtgtcggttacctcaagccagacccaagcaccatgattcgcttccgtgcatcctatgtgtccggagctccgaaaggcgagccggacaccaatccctcgaacttcgacgtggctgtggatcagatgcgtcgtgctggcggtaagcctgcacatcaggtatggttgccgccgctgaatgtgccgaacacgctcgacgagttcttccccgacttgaccgccaccgcgcagtatgggctgatttccccctcccgacgcaaggcggggtacttatccgtgccagtggcgttggaagacaagcccaaggaacagaaacgcgaggtattgagcctcgacctgtctggagcgggcggccatgtggctatcgccggtggcccgttgaccggtaagagcacgttcatgcgcaccatggtggcttcgcttgcgttggcgcatagtcccactgaagtccagtgctatgcgctggatctgggcggtggcacgttcgccggtatggaagacctgcagcatgtggctggtgttgctcttcgtggtgacgatgagcgcgtcaaccgtatgctcgctgaagtggtgagcatcatcaacgcccgtgaacgttacttcaagaaccataagatcgattcgattggcacttaccgccagatgcgagccaagggccaagcggatgacggctatggtgaggtattcctgttcatcgatggatggcagaacttccgcacggaatatgaagacctacaggccaaggtattggatatcgtctctcgcggtctgacgttcggcgtgcatgtggtcatctccacgagccgttggatggatctacgagccaacatcaaggatcttatgggcactcgtctggaactgagactaggtgatccggctgattccgaaatcgaccgcagagtggccatcaccgtgcctaagggcatgcctggccgtggtctggcttccagcaagcggcatattctggtggcattgccgcgcatcgacggcgatcataaagccgactccatggcggacggcatcaaggatctcatcgccaaggtcaatgccgcttggaagggccccaagccaccaaagctgcgtcttctgcccaccatgctgtctcgcaacgccttcctgaccaccgtgccggaacagacgcgtaacagtcgtttcgtactcggcgtggacgaagccgacttgaagcctgtgttgttcaaccccgtgcgagcgccgcatatgtatgcgttcggcgactctcgctccggcaagtcctcgttcctgcgtctgattgctcaggaaatcgagcgcttttacgacgtgaccggcggcaaggccaagatcttcctggtcgactatcgccgcgctctgcttgatgaggtgaatgacaagtaccttggccagtatctgaccaatcatgaggaaaccagtcaggcgatgaacgatcttgccgccttcctggccacacgtattccgggctcggacgtcaccgcggaacagttgcgtcgacgctcgtggtggaccggctccgacgcttacgtgctgattgacgactacgatctggtctccacttcacgaggcaatccgattcaaccaatcgtgcctttgcttgcgcaggcttccgatatcggcctgcatgtattcctgacgcgccgcactggtggtgccagtcgatccctgtatgatccggtgctgcaatccttccaggatctggccgtcaccggtttgctgttctcgggcgatccgaatgagggacagcttattggcaaaaccaagccgaagccattggtgcccggtcgtgtgcaggtggtcagtcgagatagcggcacattcctggcacagctcgcctacgcgccctccagcctgccgcccatggcaccaatgaactgattggcctgaatgtttgattaccgtctagggattgtcattcatctgcgctgtgcttcgcgtctttggcgatgcgcaaagcaatcagcgtgatgatcaccagaatcgcggccgcacctactacggccaagacagcacttaccgtgccatccgaatgcatggtggcctcgaccttaagatgttgtgcctgctgggtgcgaggaggcgtgtacggctcatattgtgtgctgcctggaccgcgcatgccgttggccagcgtgatggtgatggctccatacgggttgatttgcccccacccgcgattatcgtcgcgtgcgtcggggtccgggcggttgccggaagcttcgattcgctgcagccattgcaaggcgttttcatcgggatgacgctgcgccaccaaagccgctacaccactggcatatgcggtggcgtagctggaagatgctgattcggcggaaaagacgcaatccacgcctctcggaatcgtggatagcacggattccccgggggcaagaatgtctacctgctcgccactgatggaatcggatgacgcatggaaggacgtgtccgcagccgccacgcccaacacgtccttccatgcggcagggtagcgaagcccatcctgcgtggacgacgaggtgttgcggttgcctgcgctggaaaccacgagggaacctttggcttgtgcgtattgcacggcaagttgcaaggtgccactgggagccacggtgctttgcgagatattgatgatctgcgcaccatgatcggcggcataccgtatgccatcagccagcacgtccgggctgggaccgccttgcgaatgactggaggaattatcgatggagttatacacgcgcaccggcaggattgtggccttgggggcaatgcccatcagagaagagccttctatttttctggcggcgatgatgcccgccacaaccgtgccatgcccgtaattatcagtgcggccatcctgaacgttgtctcccgccagattgactccaggcagcactgcgtcgccagccagatgcgggttgttggtgtccacgccggaatcgaccacggccacaatgatgccttcgccatccgccagagaccgcaccgtggtcatgccgagcgcatcctcggtccatggtgtgctggtgatgtagttggttttaccgatttcacagctgttctgatcggcccatgccggtgtaggcgagagtgccccggctgcaagcgtgccacatgccagagcagtgcatgcggcagctgcgatgccggtgcgaatacggtgggttcgtgaggtgcgtgttgccatcgtcatcattgctttcgactggatgccgaagagtcggatgagctgttcgcgtcgggtgtgccctcggtgcctgcgctagtagcagaggattgtcctgacgacgatgttgccgctgcctgatcctgcgctgaaatctgtagtccggcgctattgctgctcaaagccactccggcggagaatacgttgatccaggagcggggtattgcggtgacatcatttttggtaaagcccagtcgcttcaatgtttcttcggtatcgtccggaaccgggtaggccacaccggtgccatcgaccacatacaatgcgccggtggtaccgccggcactgtctaccgtgcgcagcagcgcaccgctgccattgatgatggtggtaccggaatcagtacgttgcgggcggttcttgtcgtcactgatggtcgccaaggtgatgccggcagcggcattatgcgtggtatcggtttggaatttggacggttccaacgcagcgcaagtgccattgccggaattcatcggcgttaactggccatcgggccaatcatcgggaacgatggaatcggtggcattacggaacccggcctgctgctgttcctgtgcggtcatggtaatggtttgcgcaccggcaccgaggctcagctgatacatttccaaggccatgccattcaatggcgagagtgtgccatcggcaagcaccacatatttggtgttgtcgttggaggggtcggcaatcagcgaaccgacggtgtatgatgtaccgcccaccgcgacttccgtgcctttgcccctgacatccaacactccgagatcggaaccgccggcaaacaagtccagccattgcaccggagccttgggagcgttatccaacgtgagttggccgacgccgagaatacgaagcaccgcatcgcgaatcaggccttcctgcggcagacgatgtcgcagaccgttgacaatgaggtatccaatgccatctacgttgaccagcattgcctcattacgactggccggggtggtcacggcatcattggtgatgagattgttggttgaggcgcgctcggtgtcaagacaactcaccaggaatttcgatacgagcctcgaccggttgggcagaatatccggtgcgcccacaatgcctacgctggagccgatgggaataccttcaagttcgttgtcgtctacggtgataactcggtattcgtctgaggggatgagcagacgtgcgctggtggtgttgattaccggatgcagcacaccgttgacgctgatgaatcgagatgcggtgtttttgcccacaatgagtttgttattgctccagtctgaaggcaggccagggctgatgatgccatagaacacactgatcagaaccatgatggcggtcaggccgatactgaccatcaccggcgtcaggcctttcttaggagtcagctccttgccatccggcataccggaagtgaaggcagtaatgagcctggcccgcgaatagttttgtgcgtcctgcaggtccttcttattcgccatggcccctcctcacaatcccaatgccacgtaggcgagcggcagggtggccaccacacagattacgttcgaggcgtcagccagacgggtcatggcgatggaatcgtgcttggacagctgtgtgccgatgacgcacagcaacgctcccagtgagaacaagcccaccaccaccgaagcccacgtggggtgaaacaccgtgcatgcggcacaagacaggcagatgccggcacctgcggtgataacggtgaccagcatttccgattgtgcatagatgcgcctggaatcaagcagcatggctgcgaacagaaccaaggtaagtgccacgcctgctgggcttgcactggaaacagccagaggcgtgccgaacacgatcagtgcgctggtggcagcgcgcaggtcgaacagcagcgtggagccgatacggtacttattacgcacttcgctgatatcgatgttcttgggcagcgcgaaaatctccgattcgctggtggggctgtccacagacaatcgtgcggaagacaggctgagccacggcagcgcattggcagccagaccgagcagagccactgccgcgatccatacgcgagtggaccagtgcggcatcgttacacacacaatgccgagaatcaccagtgctgcgccgataatgacaggaatcaacgcgtacagtctgttcactgtaagcagcaaacatgaaatgccgccggccagcagtaaaccagcaccgataccaacggccgggaacccgtagaacgagggattgaacagtgaacccatgagatgatatccggtcacgccggccaaaagcgaggcgactagcgacagtgccagtgcctgccgatgcatatggcgcgaagccagtaccgtggcaatcgccagtaaagcggctgcggtaatgcccgctacgccagcattgatgatggatagtggggccaatgccagacaaatcgctccgacacccagtagcacacaactgaccaccattgtggtcactgtggtattggcactggtccacggtcgatgagaacgctctaccgaatcggccaccgcctcaaccacatcgtcgtagacgatatcctgatcgcccaaggcgttgacctcgagtttgagacgttcaccgtctcggatggcctgatcggccagcgaagcgggattattgatggcggtttcgtcgtcacgggtcagtcggtagccggcatacaccagagtcggatcgaacacacctagtttcttggcgatatcaggcagcagttcagctaccggaagtgtcgacggaacattgagtttcgcggagcgtttgccatacaccacagtgatggccacgcgcggggatgatgcggaaggcgagggctgattggctggcactcccatcgcaatcgaaggtacgggcgttggcgccggaacgtgtggtgctatgcgcggcggtgccggcatcatggacggtccggcgggcgtgtggcgatgcgacgatgccatagggtgcttcctcttctcaataaactcccaaaggtctactgtattcttgtattctctcacacattgcgggtatcgggaatgccattgtctggtcctagagcagattccgtggcgttttttgccgagtcgggtcctagggtggagcacaacgactacgatggtgcgggtaacgcgatacaaggagtggaacttcatatgccgaagatgtttggaaccgatggtgttcgaggactggccaatagggatttgaccgcacgtctggcgttggatttgggcgatgccgccgtgcgtgtgctcggcgacgccggcacccaagacgatcagcctgagggacgccgccgcgcgctcgtgggccgtgacacccgtgtgtccggtgattttctggcttccgccctgtccgcgggcatggccgccggcggcttcgacgtgatcgatgccggcatcatccccactcctggcgtggcctacctgacctccgtgctcaacgtcgaaatgggtgccgtgatctccgcctcccacaacccgatgcccgacaacggcatcaagttcttcgcacgcggcggcttcaagctgcccgaccagaaggaagacgacatcgaggccgtgctcggccaggactgggaccgcccgaccggtgccggcgtgggccgcgtgagccacgaccagaccaccgccaccaacctgtacatcgatcatctggtggccaccatcgctccgctgaacgatgacaaaacccagcccaagccgctcaagggcctgaagatcgtggccgactgcgccaacggcgccacttccgtggtggctcccgaagccctgcgccgtgccggtgcggatgtaatcgtgatcaacgcctcgccggacggctacaacatcaacaagaacgccggttccacccaccccgagcagctgcaggccatggtcaaggccaccgatgccgtgatgggcgtggccttcgacggcgacgccgaccgttgcctcgccgtggacgaagacggcaacatgatcaacggcgaccagatcatgggcattctggcccgtgccaagcagcgcgaaggcaagctcaaccacgacaccctcgtggtcaccgtgatgagcaacctcggtctgaagctcgccctgaaagacatgggcatcaagaccgtggaaaccgccgtgggcgatcgttacgtgcttgaggaaatgctcaagggcgattactcgcttggcggcgagcagtccggccacgtgatcaaccgcgaattcgccaccaccggcgacggcaccctgaccgcactgaccctgtgcaacgaggtcgtcaagtccggcaagagcctgaaggagctcgccgccgacttcccgcagctgccgcagaccctcatcaacgtgccgaacgtggacaagaaagccgccgccaccaacaagcgcatccaggatgccgtggcccgcgaggaggaactgctgggagacaccggccgtgtgctgctgcgcccctccggcaccgaaccgctcgtacgcgtgatgaccgaagccgccacccaggcctacgccgacgaagtctgcacccgcctcgccaagatcgtcgccgaagaactcgcgctgtagcacccttccctaaggaaaagcaatgtttggaaagaacgccaaagtcgacctcgaactcaaccgtgatgtcgaacaactcatcaaaaccggcggcaaggagaagctcctgcccatcgtgcaggccggcgaaccggtgttgcgccaacggacggtggcctaccatggccagctttccaagcgtacgctcgccaaactcatcgatacgatgcacaccaccatgctggaggcgcccggcgtggggctcgccgccacccagatcggcttggggctcgcgctcgccgtggtcgaagaccacgtgcgcgacgacgaggatgatccgcgcgaaatcgcggaattccccttccacgtgatcatcaatccgagctacaaacccaccagcgacaaaaccgcctcgttctacgaaggctgcctgagcttcgacggataccaggccgtgcgcaagcgttggctcgacatcaccgccgaatgggatgatgaagacggcaagcaccacagcgagccgttgcacggctggcccgcacgcatcttccagcacgagaccgatcatttgagcggcgaactgtatatcgatcgcgccgaaatccgttcgctgaccaccaccgaaaacctcgaggattattggtgcgacgacccggtacccaccgaggccgccgaagaactcggcttcgcactatgatcgaccgcacatggctggacgccgccaagggagacattccccaatgggcggcgtccatgcccaaagacgccgacggcaccaccattgactgggactgggtgcgttcgctggacctgatgcatggcatcagcgtattgctggcgcttgctgcagatggtgagcaatatggcgaaaccgcagcacagcctcagctcgggttggaccaaccggaactgacgccacaagctatccacgacgcattgaagatcgattacgccacacgcgagcatctggaatcaatcatcgcccaatgcaacagcacattcatgaccgattacgatcgattcatcggctcctatcgtctgcctcgcgcgctcgcctacgccaatcgtcggctcaacgacaacatcaacacgctgttgcatctgggcgaacagcaacacctatgggtggtcagtcgcgaacggcgggggaggactaccgttgccgtgctcaggccgtactccggcagccgcccatcgaacgatgaccaaggcatgctgaatctgagcggtgaaaccggtgacgcatctgccggaaacactgctgccgaaaacagcgatgtcaagttccccacaacagtcgccttggacgatatccaagaccgtacggcggcgattcttgacgcacgcgccgaacgacgtaaggcccagcgcttccagaagcgtgcgggcgatgcggcgatggcccgcgccaatctctccggcgcgacttcgccgggtggtgccgcctcgtctggcaacgctaccggccaccatcccaagcccgactggcgcgacgcctatctgcccggccgcgacgtggacgcggtgatgggcatcgacatcgaaaccaccggcatcgatccggcgcgtgactacatcatcgacgtcggcttcgagttcatgaacatggccagtccgcgcccggccggcgaacctgagacatacgcctatgagcagggctattacgccgccggcgacgcctacggccagtcccgtctcgcttttggcgtgccgccggaaaacgcggcgctcggcaacgccctcatcgccaaactcaccggcatcgatgtacgcggccgcagcagcgaggccgggtaccgactcttcgacgaatggccccaagcccaggccggcctgctcgcgcggcttacccagcagccgtacgtggcgcataacgccaccttcgaacatagctggttcatgctgaacgtcgccggatacgcggaaagctaccgtgccgggcgcatcaccatcatcgataccctgccgatgagccggcagtgggaccccggcgcggtacccaccaacgagcatccttacggagacaacacgctcgacgcctacgccaaacgtcagggcgcgcttgattccgcccacaacgaacgccacttgggccttgaggattcgcacatcatgctggtggccatgaaacaccatctggcggcgctgaaagcgcaaaggaaagggccgtgggggcccgccggcagggctggcgtcggcggcaagtcctgcggtcgtaagcggtgagtacactattggtctcgtgagtaactatcaggacggccgacagcagcgtgagaaccgccgccgcaccatcgtgcgtgtggtgtgtgtcgtcatagctgtggccatgctcggctccctgatcatcccggcgatttacgcggggctttgacgttgccttcgcatattcgtgcccgcagttgaacacgtctgatgcgagggatttgtgaggtcgcccggccggctatcggcaaggcaggcccggaaccttctggcagcatggattgcaggcggatgcgtgtgtggcgcggcaatgcccgccaacgccagaggaatgtgcgaaggctgtcaacaaggacgtgacttcccaaagaatctcaaagaatcaacagtaaggtaaaccacgatggcagaatttgactttacccaggcgatcggcgaagcccgcgccaaatacgaatccatcgccaaggcgctggacgtcgaccggctcaaggccgatatcaaggatctcgaaacgcaggccgcggccccgggcctgtgggatgatccggaaaacgcccagaagatcaccagccggctgtccgccgcggaatcgcagctgaagcgtctgaactccgcctcccagcgcatcgacgatgtggaaacgctcgttgaactcggccacgaggagggcgaccaggactctctggacgaggcgcaaagcgaaatcggcgagattcagaaggatctcgaccagatggagattcagaccctgctcgatggcgaatacgacgaacgttccgccgtggtgaccatccgctccggtgccggcggcgtcgacgcggccgacttcgcgcagatgctgttgcgcatgtacctgcgctactgcgagcgtaacggcttcaaggccaaggtcatggacacctcctacgccgaagaggccggcatcaagtccgccaccttccaggtggacgccccctacgcttacggccgtctgtccgtggagggcggcacccaccgtctggtacgtatctccccgttcgacaaccagggccgccgccagaccagcttcgccgccgtggaagtggtgccgctggtcgaggccaccgaccatatcgacattccggatacggacatccgcgtggacacctactgttcctccggccccggcggccagggcgtgaacaccacgtactcggccgtgcgcatcacccaccttcccaccggcatcgtggtgaccatgcaggatgagcgttcgcagattcagaaccgtgcctccgccatggccgtgctccagtcccgactgctcgtgctgcgccacgaggaggaggccaagaagaagaaggagctcgccggcgacatcaaggccagctggggcgatcagatgcgctcctacgtgctgcacccctaccagatggtcaaggacctgcgcaccggctacgaaaccagccagactcaggccgtgttcgacggcgacatcaacgcgttcatcgaggccggcatccgctggcgccatgaacagcgccgcgccgccgaaaccgaggagtaaacagcattatggcactgatctcactggacaatgtgtccaagatctatcccaaaggcacccgaccggcgcttgacgacatcaacctcgatatcgaacgcggtgatttcgtgttccttgtgggtgcgtccggctccggcaagaccacgctcttgagcctgctgttgcgcgaggaggaggccaccagcggcgagattcgcgtggccggcaacgatctgcggcgcatcaccaaccgtcaagtgccgcagtaccgccgttcgctgggcttcgtgttccaggattacaagctgctcaataacaaaaccgtatgggagaacgtggcgttcgcccttgaggtgatcggcacgcggcggtccaccatcaaatcgttggtgcccaaggtgctgaataccgtgggactcaccggcaaggaaaagaactatccgcatgagctctccggtggcgagcagcagcgtgtggccatcgcccgcgcctacgtgaatcacccgcagattctgctggccgacgagcccaccggcaacctcgacccgaccacttcgctgggcatcatggaagtgctggacgccatcaaccgcaccggcaccaccatcgtcatggccacgcataacgaagagatcgtcaactcgatgcgcaagcgcgtggtcgaactgcacaacggcaagatcgtgcgtgacgaggctcatggctcctacgattccgccctgttcttcccggatgccgaagtcgaagccaagtccgacaccgcccatcatgtgctggcggcggcgaccaaggccatcgagggcagtgacgagccgtctgaaggcatcgcccgtttggccaattccgtgcattccggccgcaccggccgctatggcgagacgtttgcgccgctggaagacacgctgacctggggcaagggcatttcgttggatgagcaggccgccgccctggaaagcacccaggcgttcgacccgttcaaggacgagtccgccgcgaccgccgcggttgccgatacgtccgtgtcatccgccgccgagccgccggccccgccggagccgcccgcaccgccggaaccgcccgcaccgccggccaacgagcaggccgccgccgagcagcctgctgacgagcagtccgccgcagaccaaacatccgacgatcaacccgctgagggcgcgaaggagtaagggggatcatcatgcgagcacgattcattctgtccgaaacgtgggccaacctcacccgtaacctgtcgatgctgctgtcgctgacgctggtcaccttcatctcattcctgttcatcggcgcttcggtgcttactcaggcgcagatcaccaaagccaagggcgactggtacgacaaggtcgaggtcgtggtgtggctatgtcccgacggcaccagccagtccgcgaactgtgcttccggcaaatcgccctcagccaatgagatcacggcactgcagaaaaccattcgcgatgaactcaacgacgtggtctccaacatcgactatgtcagcaagcaggatttctacgacaacaccttcaccaagcagtacccgaacggtgaattccaaggccgtacgctgaccgcggacgatatgcaggactccctctggctcaagctcaaggaccccaccaaatatcaggtggtctccgaagtgctctctggcaaggagggtgtggaagacgttaccgatcagcgccagatcttcgacccggtgttcgccgtgctcaaccgagccacggcggttacggccgtgctcgccggcgtgatggtggtggtcgccatcctgctgaccggaaccaccattcgtatgtccgccgcatccagacgaaccgaaaccgaaatcatgaggtacgtgggtgcctcgaactggacgattcgtctgccgttcattctggagggcaccatcgcctcgctgatcggctcggtgctctcgtgcctgatgctttcggctatcgtcaacgtgttcgtcaccggctggctggcgaaatccgttacatggattccttatgtgaatcagctcacggtactggtgatatcgccgttcctggttgtgggcgcgatactgctgtccatcatcgcttcaaccatctcgttgcggcgttatttgagggcgtaacgcgaccggcttacccgcgagaaatgtgatgacatcgtgtgcaagcctctcaggttcgcatgttatggtattggcttaagtgagcgaaaggactattcacatatgacgaacgtacgtgtgatcaagcccgcactggcggcactggtggccgccgcagcctgtgtgggaggtctggcgttcagctcggcacagcctgcccaggcagacacctattccgacctgatcaatgcgcagaaccagcacgccgcgtcggtacagcgcgaggccgaactcaagcagcagctggccggtgccagccaggacctggcgaataaggtacttgagctggacgatctgaccaacaacaagattgtcgccgcgcaggccaaggtcacgcaggccaacgaggatgccgccaccgctcaggacgaggccgacgccgcatccaaacgtctttccgccgcgcagaaagacaaggagacgctcgaggagcggatcaagcagaccggcaaggactacgatgacgcgcacgccgccgtggcccagctggcccgtgacgagatgcacggctcgaatgcttccgacgtgatgagcgtggtgacgggtgccaccagcacacaggacttcgtcaactccatgcagtcccgggacgcgttgtcccgcaacgaggcgaatgcggcttcctccgccgcgacctcactgagcacgtcgaagaaccgtggcgaacgtctggcggccatcgaaaagcagatcgctgtgctcaagacccagtccgatgagaaggccgcttccgcacagaccgccgccgaaaccgcgcaaagcgaacgtgacgctttggacaagctacgccaggagggcgaaacaaggcgtgacgaactgtcttccatgatcgacagtctggattcccaatccgccaagcaggcggcccagaccgtactgatcgcttcccaggtcgattcctacaatcgtcagtaccagaaggaacagcaggacgccgccaaccgggtggataccggtaaccagggcggtacgccgtctactccggtgacccccgctccggcgcccgctccggctccggctccggcgccggcccccgcccccgcccccagcgtcggcggccaaggcacgtcgaacggtgattacggcaacgcctatgccgccggccagtgcacgtattgggcgtatgaacgccgtaagcagatgggcattggcacgccgtcctatctcggcaatggcggcgactggtggcgcaacgccccctcgtacggcttgcgcgtggaccacaaccctcaggtcggtgcggcgctctccttcctgcctggtcaggatggtgccgacggtacctatggccatgttgccgtagtcgaagccgtgtatggcgacggcacattccagatctccgaaatgaactggggtggtccgtggaacatgcacgaccgcaccttgaccaatttgggtcagtactggttcgtccactgaccggttggttcggccgatatatgcggttgaagggttcctcttgaagaggaacccttttcgtattcgaggccggtccgtgatatcgtcggatgttgcgttgctacccacgagttgctactcacgagttattgcccacgaaaggaggagacatgcccaaggaaaccggtgagaaactcatcgtccagaacaagaaggcccggcatgactatgccatcgaagacaagtacgaggcagggctggccctgaccggcaccgaggtcaagtcgttgcgcgaaggccgcgcatcgctgtccgaggcgttcatctccatcgaccgccgtggcgagatgtggctggagggcgcgaacatccccgaatacctgaacggcacatggaacaaccatgcgcccaagcgcaagcgcaagctgctgctgcaccgactgcagatcaccaagctcgcccgcggcatcgaggccaagggatacacgattgtgccgctgagcctgtacttcaaggacggtcgcgtcaaggcggagatcgcactggcccgaggcaagaaggaattcgacaagcgccaggccctgcgcgaagagcaggacaagcgcgaagccctacgcgccatgcgctacgccaacatgcgccactagtcccgtcccttggctcccctccggaggggagccaagggtaggatgtccgcgttgtgggtcatttcgcccacgattaacgcttccgtagcattgcactcctacgctctggaaccatctgggaaacatacccgcccagctgactatccggagagaggaaatccaatgtctctaagcaagggaatacaatccgctgcggccgccgccctgagcgcggccatgctgatcgccgtggcggcctgtggcacgactgacggcaccgacaccgcatccaagagcggcgattcatccaaggactcgtccagcacttcgattcaaggcttcgacaccagcagcatccagaaggacgacgagattgccgcactgctgcccgattccgtggccggcgacggcacgctgaccgtcggcgccgatacttcctatgccccggccgagttcctggccgaggacggcaagaccccggtcggctttgatgtcgacctgtccaaggcgctggccgcagtgttcggactgaaggaaaacaccgtctcctccacgttcgattcgattatcccgtccgtcggctccaagtacgacatcggcatctcctccttcaccgtgaccaaggaacgcatggaggctgtggacttcgtgacctacttcaaggccggttccacgttcgtggtgcagaagggcaacccgaacaaggtcgactcctcgaacctgtgcggcgtgaaggtggctgtgcagaccggtaccacccaggaagaggaagtcaacaaggataacgagcagtgcaaggcggacggtaaggatgccatcgacatccagtcctccaagctgcagaccgatgtgactaccgccgtggcttccggtaaggctgatatcttctacgccgatacgccggttgccggctacgccatcaagcagaccggtgatacgctcgaggccctcggcgaggacgttggtgtgacccctgaggccgtggccgtcaagaagggcgattccaagaccgccgaggccgtacagaaggccatccagaagctgatggatgatggcacgtacaagaagatcctcgacacgtggggcgtctcttccggcgccgtcgacaaggccgagatcaacccgtccgtcgagtagtttcggttactatgaagactcccgttgccctgcggcgggagtctttttgtatatgtatgcactgtagtgtataaatatgcttaaccgttgatcgttgccgttgaagcggcgtaagagagaagaagaaacgattatgcagtccaccaaactgaagtccattatggccattgcactgagctcggccatgctgttcgccaccgccgcttgcggcacctccgacaaggccgatgccggtacggattccgccaagggctccgatgtcgccaccatcaccagctacgatgtcagctccgtggagaaggatgacaccatcgccgcactgctgcctgaatccgtgaccaaggacggcaagctcaccatcggcaccaacccctcctacgccccggccgaattcctcgacgccgacggcaagacccagatcggctacgacatggatctcgcccgcgccatgggcaacatcttcggtctcgagaccgaaatcgtctcctccaacttcgatacgatcattccggccatcggctccaagtacgatctgggcatcgccgccttcaccatcaccaaggagcgcatggaatccgtagacttcgtctcctacttcaccgcaggcatgggctatgcagtggccacaggcaaccccaagaacgtcgatgagaacgacctgtgcggtctgaacgttgccgtcgagaccggcaccgtcgaggaagaggccatcaacaagaccgccaagcagtgcaaggcggacggcaagaaagacatcaccatccagtcctccaagcagcagaccgacgccaccaccgctgtggtgaccggcaaggccgacgtcttcttcgccgattccccggttgtcggctacgccatcgcccagaccgatggtcagctggaacagctcggcaaggacttcgatgaagtgccgaacgccatcgccatcaagaagggcgattcccagaccaccgaagccgtgcagaaggccatgcaaaagctcatggacgacggcacctacactaagattctccagcactggggcgtcgaatccggtgcactggacaaggccgaaatcaacccggccgtcgaatagtcgacaagctgtcgcgaaaattcgaatggggcgcactgtttgtaacacagtcgccccattcgtgcactaaggttcaacgctagttgcaacttgcagttcaggctgcctaacacatccaaggaaccagattatggcgaagaaagaagtcgacggtgaggggctgaacatccccaaccgcatcaaggcgttgccggtcaagcgccccgaaccgattgtggccgcagtgatcgtggtactgctcgccgcgatgctcattcaaggcttgattaccaatccgcgactggattggcccaccgtctggaagtacctgttcaacgagaacgtgcttgaaggcattcgctataccttggagcttaccgtgatctccatggtcgtggcgatcatcctgtcggtgattcttgccatcatgcgcaaatccatcaatccggtgctgcgcggcgtcagctggttcttcatctggttcttccgcggcacgcctgtgtacacgcagctcattttctggggtctgttcgccgtgctgattcctaagatcagcctcggcattccgttcacctcggtggagttctggagcatcgactccaacgtggtggtcaccgcattcaacgccgcatggattggtctggccctgaacgaggccgcctacctgtccgaaatcgtgcgtgccggccttgaagccgtggaccccggccagaccgaggcggccaaggcgctgggcatgaaccgcacgctcatcatgcgccgcatcgtgctgccgcaggccatgcgcatcatcatcccgcccaccggcaacgagaccatcggcatgctgaagaccacctcgctggtcaccgccgtgccgttcaccctcgagttgcagtttgccaccaacgccatcgccaaccgtatctacaagccgattccgctgcttctcgtggcctgcttctggtacctgctgatcacctccattctgatggttgtgcagtcccgccttgaggcgcacttcggcaagggcttcgatgcccgaccggtgggcaccaagggcaaacagacgccattgccgggtaagaccgacggtgaaccgaaggatgacgtggacaagctcaaccagaccacatttgtcggattgaatgcataaggcgggagcgcgattatgactacgaatgacatcaccagtgttgccccggtcgtgcgcaaggcggctgacggttccgtgattcctgctgtcaaggccgtgcaggtgcacaaggcgtttgggccgctgcatgtgctcaagggcatcgatctaaccgttatgcccggtactgtgaccgtgattctggggccctccggttccggcaagtccacgttcctgcgtctgatcaaccagctggaaaccctgaccggcggttccatcgaggtgtacggcgaactcatcggctacaagcacgtgaccaaaaacggccaggacatgctgcagaccttggacgataaggagatcgccgcacagcgctctcgcctcggcatggtgttccagcgcttcaacctgttcccacacatgaccgcgctggagaacgtgatggaagccccgatccacgtgcagcaccagtccaagaaagccgcctgtgacctggccgtggccgagcttcagcgcgtcggtctgggcgatcgcatggactattacccctcccagctgtcgggtggtcagcagcagcgcgtggccattgcccgtgctctggccatgaagccggagatcatgctcttcgatgagccgacctccgcccttgaccccgaactggtgggcgaagtgctcaacgtcatgcgttccttggccaaggaaggcatgaccatggtgtgcgtgacccacgaaatcggcttcgcccgcgaagtcgccgaccagatcgtgttcatggacggcggcgtagtcgtagaaaagggcggccccgacatcatcgaccaccccaccgagcctaggtttaaggacttcctacagcatgtgctgtaggaaggctgttatattacctcagcactgtcgtgcttcggcgtcgcctacggggagcccactgggctccccgctttacggctccgcctacagcacgtgctgtaggaaggctcgttgttgcagctccaaaagcgtacgctgatgaactcagcgtacgcttttcacgaaggggcatgttccaatcctgcaaaggcggcgggttggattcgctttgcgcaataatcgtccgctaggctggtgagccatgtgtggaatcgttggatacgcgggaaatattgaaacggcatgcggcaagcctttggaggtctgcctgcaaggcctggaacgtctggaataccgaggctatgactcggccggtgtggcgctgaccgcgcccggcatggataaggtggtcgtgcgcaagaaggccggccgtttgaagaacctggtcgaagacatcgagcgcaagccgatgccgctcgccacggtgggcatcggccacacgcgctgggccaccaatggcgagccgagtgacgtgaatgcccacccgcacaccagcatggacggcaaggtggccatcatccataacggcatcatcgaaaacgcctctcagctgcgtttcgacctgcaagccgaaggctaccgattcgcctccgccaccgacactgaggtggccgctaagctgctcggtaagatcgtggacaagattatcgcggacgaaggcaagccagacttgttcaaggctgtgcgccgtatggcccgcatgcttgaaggcgcgttcaccattctggccaccgactgccgccagccggacatcgtggtcggagcccgccatgattcgccactggtcgtgggccttggcgagggggagaacttcctcggttccgacgtcgccgcattcgtggcctacaccaagcgcgccatggaagtcgaccaggatcaggccgtatgcgtgtccgccgacaaggtcatcgtcgccgatttcaacggcaacgtggtcgaaaacccgaagacctacaccgtggattgggatgcttcggccgccgaaaagggcggctgggattcctttatggacaaggagattcacgaagaccctgccgcagtgcagcgcaccctgcttggccgcttcgacacgaatggcgacatcacccttgatgaagtgcgtatcgacgaacacgacttcaaggccatcgacaaaatcatcgtcgtggcctgtggcaccgccagctacgccggccaggtagccaaatacgccatcgaacactgggtgcgtatccccgtggaaatcgaactcgcgcacgaattccgttaccgtgacccgattctgaccccgcgtacgctcgtggtggccatttctcagtccggcgaaaccatggatacgctgatggccctgcgccacgcgcgcgaacaggggtccaaggtgctggccatctgcaacacgcagggtgcctccattccgcgcgaatccgacgccgtgctctacacacacgccggcccggaagttgccgtggcatccaccaaggcgttcgtggcgcagattaccgccgcctacctgctgggcctgtatctggcgcaggtcaagggcgcgatgttccgcgatgagattcatcagatgctcgactccctgaaagacatgccgcgcaagattcagtgggtgctcgacacccagcccaagaccatccaggcggccgccgagcgcatggtgaacgccaactccttcttgttcctcggccgccacgtgggctacccggtggcgcttgagggcgcgttgaagctcaaggaaatcgcctacacgttcaccgagggcttcgcggccggcgagctcaagcatggaccgatcgcgctggtggacgagggtgagcccgtggtgttcatcgtgccgccgcagcgcggccgcaatgtgttgcacgccaaggtgatctctggtatcgaggaggtcaaggctcgtggcgcgtacatcatcgccgtggccgagcagggcgacccggatgtggaacggtacgctgacgtggtgttctggcgccccgcctgcccaacgctgatgagcccgctggttgacgtggtaccgctgcagctgttcgccatggacatggcaaagctcaagggctacgacgtggacaagccccgcaacctcgccaagtccgtgaccgttgagtaagccacatcggtatgtgattgacgagcctcatattccgtttgagatggacgtgctgtatgaggacgagcggatcatcgtggtggacaagccgcattttctggccaccatgccacgcggcatgtggtatcggcagaccgcgctgatccgattgcgtgagcggctgggggagccggacatcacgccagcgcaccgattggaccgcatgaccgccggcgtattggtgttcgtgcgggattcggcctgccgcggcgcgtatcagatgctgttccagaaccggcaggccgtcaagatctatgaatgcctggcaccctgccggccgatcagcggcccgcgattcggcacgatcatgcaggtcgaaccgccacgcccgttcccattgctgcgccgatcgcacatcaccaaggaacacggcacgatggccgcattcgaggaaccgggtttggccaacgccgaaaccctcatcgagcgcggcgacctctgtttccctcccgctggcgggaggtggcgcgaagcgccggagggtggtccccatccgggaaatcaccccatctgccgctacacactccacccgcgcaccggcaaaacccaccaattgcgcgtccacatgaattcgctcggcctgcccatcgtgggcgacgacttctacccgcgcatccagacacgcccctacgacgatttcagccagccgctgcaattagtggcgcgtgtgctacgattcaccgatccaataacaggcgagaagcgcgaattcgtttcccgtgtgccgcttaagatctgatttcttagggggatggcgagaccaatccccgcccgtccgaatcactgtccctttcgactggccatccagctcattgcatcgtcgtacaccatcatgatgcgcttgcgatagctatcgatgaattcctgcgcaccaatgctcgcgataacgtcgtgagcgggttgcacggtgctgtcgaatgcctccggcagcctatccaccaaggtgtggaatcgtaaaatcacggattcctcatctaatcccatccgctgtgcgaatcgttccagatgtttgcggcgtaattgaagaagatctcggcgtccgccgatgttcatcgccaaagtggcatttatgatctgcttgccatgccccaaataagggaacaccgaagcaaggtcatagagcggggcaagccgcacggacgcgccatcgagcaatagcgagtagttcttggcgtggctgtctgttgccccgacgagataactggcgaggatgccgtcggtgaaggctcggatattgctttcggcctgaccgggcagaccgtgcttgcgcaacatttccgcatatgcattggacgttgggccgttgtgttcctcgtatttcagcgatgagggaatgcccagcgcttgggtaaagtcttcttggtgcagggccgtcaccgtaccatcggcggacactatacggtcataccgctcgctgatgatggctgggaccccatcaaagatgtgaaaagaggtgtgggccacgggtattcccatcgcctccacaatgcgcatggtgatgtgttcgttgaatgcttggtgtggaagggtcggtatgccgggcttgatgatatgagtcgtccgcgcgattccagtggtggagaaccatgatccattgcggttcctcagtgcgatcttgccctgctgtcccgcgaccgaccaatgctcgtctacgcttgcggactggatgcctgtgggggcggctgcgcgtagtcgattcgcgatctgcgaatcgctgattggaataagcgaatcgtcatctatgggcaagtgcgggtcggcggacagccgtaatgcgccggtggcatcgaatccgatggcttgcaacagatcaaatgcgcttgtcgatcgggcatgatgcaatcgcatggcttcatctcgggcctgaggggattccgggaccagggcctcaaggaaattacgcgggatgtcgcctgaatattcggctgcggtaatgggcatggaaagcgatattggtgtgggtgattgcgaccaacgataggaatcgtgatattggaaaataatgctgccatcgtttgttcttcgaaactggccgatgggtgtttcgccgagaaatgcattgagagtgttttcgctcatggtgtcaccattcatagagttcggcgggctgcggggttttgcggacatccagcgacaagccaagctcagtcagagcgctgagaatggtggagaatccgggattggggactcgggcgtgttcaaattcgatcagccagcgacgtgacacgcccagccgttgggccatgtcggtctgactgatgccctggcgttgcctttcatccttgataagccgcgcgtattcggcgatatccatgacaatcatgtgcaaaatatatcacagtatagtaaagtgtgcaatattctgcacatagttggaaatgtgcagaatattgcacaaccgagtcgattggtcggtgcggaattgcctatggatcactggcaggtggatcactggcaggtgaatcactgacaggtaccagtggatgccagcacatgccgctcgtcagctgatgtcgcgcacggaaccgcgttcgatcagttccggcgggattacggttttgacgccgaccggtatcttctcgccttcgcattgacggcggaccatggagaaggcggtggcgccaatgtcgtcaaagcgcagcttcatggtcgtcaggttcaagcgcggaaccatatctgccagcgaatcatcgacgcccacgatgctgacatcctcgggcacgcgcttgcccgctgactgcaacccgagcattgcgccgtatgccatttggtcgttggcggcgtagatggccgtgcagtcggggtcgtgggccaacgccacgccggcctggtagcctgaatccgcgcaccaatcgccgatgtacatgctcggtacgcgtgctcccatttgttccagcgcttctcgccaaccgcgggcgcggctttcggcggcgcgcgaggtggacggtccggcaatgtggtagacggtcttgtgccccttgctcatcaggtaatcgacgatagcggtcgagcagccatactggtcggcgtcaacggtggggcagtggtcggcggcggattcgcagatgagcacgactggaagttctcgcggaggcttgtatccgacgaaatcggagatgcgttcctccagcactacgatgacaccatccaccggctgacgctgcatgcgatcgatggcggcggaaagcgtgcgttccgcaccgtggcgcatggtctggatggtgactgaataatcgtcatcggccgcgttggccacaatagaatcaaggatgcgggcgttgccgaacgcggtggtgttgaacatcaccacgccgatatcctggaagcggccgtgctttagggctcgggccgcataattcggacgatacccaaggcgtttcattgcatcttcgacacgctggcgtgtttcgggtttcaccgcatcgctgccattcgccacgcgggacactgtctgtggcgaaacgccggcggctttcgctatgtcttgcatggacacctgtgttggcctcgacatttcaccctcgcttgactcattaatgtcggtgtttcgtttacaacgcttatcttagggacgcttacggtaacgataacatcgttgtcttcgtgaccattgtagcagagtgactgagaaacccttaattcaacacggtactcaacacgattggacaatgttacaaatggtgttatgatgataacgcaaacattttggtcaaccttcgaaggagaggggttgggaatggcttcagccgatatcgcagctgcgcccgtgcattcgggcaaggctcgtgtgaataagcacaaggccgattggcgtggatggaaattcatgtggccttttgcggtggtgttcgtgttcgtgttcatcgtgccgatcgtgtacgccgtttatatttcgttcttcaagaagcagatgatcggcggcaccaagttcgtcggcttcgagaactacgcgcgcctgttgggtgatggccagttctggagcagtgttggtcgtgtggccctgttcacgtgcgtgcaggtgccgatcatgctgtgcctgtcggctttgatggccctggcgttggattcgatgaagctgcatggcacgaggttcttccgtatctcgacgttcctgccctacgcggtgccggcggtggtgtcgacgttgatctggggtttcgtgtatggcgcgaagtacggcctggtgggttcgttgaacgatttcctgggcacggacatcgacgtgctcgcccccagcgtgttgttggccagtatcgggaacatcgtgacgtgggagttcacgggctacaacatgctcatcttctacagctcgctgtcgaccatcccgcattccctgtacgaggcggccagcatcgacggcgcgtcggagtggcagatcgtgaagagcatcaagcttcccgaattgcgcggcagcctggcgatcacggtgatcttcagcatcatcggctcgttccagctgttcaacgagccgagcattttgcagaacatggttcctggtaatgcgatcacgacgtattacacgccgaacatgtacgcgtacaacctgagcttctccggcaaccagtcgaactacgcggccgcgttggcgatcgtgatggccgtgatcaccatggccatcgcctacatcgtccagctcaacagcctcaaggagcagatgaagtgacgacgactactgctgttcgtgttgaggaatcgatgatgatcgtgaaggagcgtatgtgatgagtgcagcaacgacttcggccgccggtcgcctgaccgacggcgagctcaaggcccgggagaaggccgccaggaaggcggagaaggcccgccagaagaggatcgccgccgacgaggccgccgaacgcaggcgcagcgcgaaggcggggttcgcgaacgtgaacaacccgaggcgttccacgttgttgaccgtcctgtgcgcggtcttcgccgtgtactgcctgttcccgttcgtctaccttttgatcaacgcgacgaagacgcaggccgacttcaccagtacgttcggcctgggcttcggcaagacgttcgccctgttcgacaacatcgcgacggtgttctcctatcaggacggtatcttcgcgcgctggctgttcaacacgatcctgtacgtggtggtcggcgccggcggcgcgaccctgttggcgatcatgggcggctacgctctggccaagttccgcttcccggggcgcaaagcggtgttcgtggtcatcatcggcgcgatcagcgtgccgggcatcgctttggcggttccccagttcctcctgttcgccaaattgggcctgacgaacaccccgtgggccatgatcatcccgtcgctgatcagcccgttcggtttgtacctgatgtggatcttcagcgagcaggccgtgccccaggagctgctggaggcggcgcgcgtggacggcgcgtccgagttccgcacgttctggcagatttccttgcccctgttggctccgggcatcgtgacgacggcgttgttcacgatcgtggcgacgtggaacaactacttcctgccgttgatcatgctcaaggacgcggactggtacccgctgaccatcggcctgaaccagtggaaggaccaggcctcgaccgcgggcggccaggcgatccagaacctggtgatcacgggctccctgatcacgatcatccccctggtgatcgcgttcctgtgcctgcagaagtactggcagtccggactcgccgcaggcgccgtcaaggagtgatggagtcggctccgccgacgcggtgtcttcaccgcctcgcggcggggtctctccctccgtcccggctccgccgagacaaccttcctcatcagagggaggtaatagtgccaagccccccctctgacgagctgagccgttaggcaaacagccctgtgggctgtttattcccgcggacgcagattatcgataaaattcaataaaggagctgaatcatcatggaacgtaaagagttcaagtggccgcagccgcttgcgggcaacaagccccgcatctggtacggcggcgattacaaccccgaccaatggcctgaggaagtgtgggacgaagatgtagccctcatgcagcaggccggcgtcaacctcgtctccgtagccatcttctcctgggccaagcttgagcccgaagaaggcgtgtacgacttcgattggctcgaccgcgtcatcgacaagcttggtaaggccggcatcgccgtcgatctcgcctccggcaccgcatccccgccgatgtggatgacccaggcccacccggagatcctctgggtcgactaccgcggcgacgtctgccagcccggtgcccgccagcactggcgcgccaccagcccggtcttccttgactacgcgctcagcttgtgccgcaagatggccgagcactacaaggacaacccctatgtggtctcttggcatgtgagcaacgagtacggctgccacaaccgcttcgactattccgaagacgccgagcgcgccttccagaagtggtgcgagaagaagtacggcaccatcgacgccgtcaacgacgcttggggcaccgcattctgggcgcagcgcatgaacaatttttccgagatcatcccgccgcgcttcatcggcgacggcaacttcatgaacccgggcaagctgcttgactggaagcgcttcagctccgacgccctgctcgacttttacaaggccgagcgcgacgccctgctcgagatcgcccccaagccgcagaccaccaacttcatggtctccgccggcggtgccggcatcgattacgacaagtggggttacgacgtggacttcgtgtccaacgatcactacttcacgcctggcgaagctcacttcgacgagctggcttactcggcctccctatgtgacggcatcgcccgcaagaatccgtggttcctcatggagcactccagctccgccgtcaattggcgcccgatcaactatcgcgtcgagcccggcgaattggtgcgcgactccctggcccacttggccatgggctccgacgccatctgctacttccagtggcgccagtccaaggccggtgccgagaagtggcactcttcgatggttcctcacgcgggccccgactcccagatcttccgcgatgtgtgcgagctgggtgccgacctcaacaagcttgctgacgagggcctgctgagcaccaagctggtcaagtccaaggtcgccgtcgtcttcgattacgagtcccagtgggctacggaacacaccgccacgcctactcaggaggtacgccattggaccgagccgctcgcgtggttccgcgcgctggcggacaacggtctgaccgcagacgtggtgccggttcgcggcccttgggacgagtacgaagccgtcgtgctgccgagcctgaccatcctgtccgaagagaccacgcgccgcgtgcgcgagtatgtggcgaacggcggcaagctgttcgtgacctactacaccggtctggtggacgacaaggatcacgtctggctgggtggctaccccggttccatccgtgacgtggtgggtgtgcgcgttgaggaattcgccccgatgggcaacgacttccccggtgccatggaccaccttgacttggacaacggaaccgtggcgcacgatttcgccgacgtgatcacctccgtggccgataccgctcacgtggtcgcctccttcaaggcggataagtggaccggtttcgacggcgctcccgccatcaccgtcaacgacttcggcgacggcaaggccgcatacgtcggtgcccgtctcggccgtgagggtttggccaagagcctgcccgtgctgctggaggaactcggcatcgagacttcggctgaggacgatcgcggtgaagtgctgcgcgtcgagcgtgcggacgaaactggcgagaaccacttcgtgttcctgttcaaccgcacccacgatgttgcggtcgtggacgtggaaggcgaaccgctggtcgcctcgctggcccaggtcaacgagtccgagcacacggccgccatccagcccaacggcgtactcgtcgtcaagctgtaaaaccgcgcatagcgcctaattacccaacggctcccttgctgctcatcgtagcaggggagtcgttttcgtatctccagcaaagtcgggtagggtggtcaccgtgcgaggcaaaaacagagtgacgatggcggacgtggcccatgaggccggtgtttcggtagcctcggtgtctaattttctgaacaaacagccatatatgagcgaggcgatggccgcgcgtattgcggaagccatcgacaggctcggatacaaagtcaactcgtcggccagaaacctgcgttccgggcgtacccggttgctcaagctggttattcccgatctgcggcaggtgtacttctccgaactcgccgaggatattctggccgaggcccggcaacatggctacggcgtcatcgtggaatccaccactaacaatcgtgcccgcgagctggaaagcatcgcatcgatgggcacgcacagcgcggacgggctcatcttaagccctctgatgatgacggttgacgatatcgcggctttggatggcgattacccgctcgtactgttgggtgaacgtttgttcggcgtcaacgcgccgcacgtagtgattcgcaatcgcgaaggggccgccgccgcgacttatcacctgcttgatgccggttgccgccgcatcgccgtagtcggtgccgtgccccaccccgagcacgatttctcgtcgggctccatccgcacccacggatatcgtgaggcgctggccgcgcgcggcatcccctgtgatgacagtctgcttatcgaaacccaaggctgggggagcgccgacggtttggtcgcggtggacaccatgctggagagtggcctgcaattcgatgccgtgttcgctttgaatgacttgctggcgtggggcgtgctgcgtgaactgcgcgaacgcggcgttgccgtgccggatgatgttcgcgttatcggcttcgatgacgtggaggaatcggcctacatggtgccgtctctctccaccgttaaccccggcagggaagccatcgcccgactggccgtcgaatccatcatccaacaggtcgaatccggcagccgtgcccccgcccaaaccatcgaggccccctatagcctctccctgcgcgagtcctcaccggcgttggcgcgcgcctgatgaatccgtggttcgaaatatccgaagtgaatgacaaggcccgtcaatcgtatggtgattgacgggccctggtcgtattggacttgactgtacttggtacgggcgtgactctccgtcttttagccgtggaattccacgctgatccaggagatggcgggaagcgttgccgtgcaggtgccggtggcgttcattgcaatgtcgagcggttgcggcgtgacggcttcgggcgcttcggcggtgttggtgcggtacggatcgtcctcatgcaacagttgcgccttgctgagcgcgagcgtgccgagaccgggcaggccgggcagcccggaaaggtcgatggtgagcgtgtgcggggtgttggcgtcgcggttgacggcaagcagcagaccggtgcgggcctgttcatcccacgtgactaccgcgtcgatggccggcacgtcgccatatgcctcggtatggatggtgggggagctgatggccggagcgtaggcctggccgcgcgcgtgaagggcggcttcggcgaacgggtagaacgtggtctgccgccatgccgggccgtgttcctcggccatgatgggggcgatgacgttgaccagctgggcgcgcgaggcggaacgcacgcgatcgcagtgcttgagcagggtgatcatcagggaaccttcgaccaccgcgtcggccgcggtgtagatgtcttccagcaaatgcggagacttaggccatggctcgtggtgcaaaccctgcgcggcctccgccttccactggtcttcctgctcgttccacttgtccgaataccatacgccccattcgtcgaaggacagggcgatgtctttggtgccgttgttggcttctcgcgcctgatcggccgcgtccgagacggtggcgatgaacttggtcatgtcttcggaagaggccaggaagtcctgcatggaggcggcggtccgggttttatggccgcggtcgaagtagtaggcatggcaggagacgaagtcgagattctcgtaagccttggtgagcacggtcttctcccacgtgccgaaggtcggcatataggcacccgaggaaccgcaggccacgagttcgagaccggactcggcgagcttcatggcgtgggccaccttatccaccgcgccggcatattcttccgggctcatgtggcccacctgccacgggccgtccatttcgttgccgatgcaccacatcttgatatccatcggctcctcgatgccgttggccacgcgctgatccgcccaagcggtgccgggcgcgccgttgacatactcgagctcgtcgagcgcggctttcagcccccgggtgcccatgttgacggcaagcatgatttcggtgccggctttctggctccagcggtagaagtcgtcgatgcccatctcgttggtttcggtgcaatgccaggccaggtcgcggcgcacggggcgattctcgcgtggaccgatgccgtcttcccagttgtagttggatacgaaattgccgccggggtagcgcacgcaggtgacgcccagctccttgaccaggtcaagcacgtcttggcggaagccgttttcgtcggcggtgggatggctgggctcgtagatgccgccgtagacgcagcggcccagatgttctacgaatgagccgaacagacgcgggggaacgtcggctaccggagtggcgtcggcgttgagggcgatgctggcgtccggcgtggcgttgccagttgtggagacgttactggccgtggtgccggcggcggtcggcgccgggctgctttcctgcttgtcgggatgggtggtttcggcggaatactggctgttgtgagtggtcatgagcgggatgcatctccttcggtttgcggttagtcaccatggtgcgacatgtcgtgtttgcgtaaacataaaacatgtggtaccgtttcttaaaacgatacaagacttggaacaaaacgccaagtcccgtcgtttcccataacaaggaaggaaagaacgatgaagttcggcaagaagacaattgccctgattggtgctgtggccatgctctcctctgtagctgcctgcggttccacctctgccggggatagcggaagcaccggctcctctgataagaagatcgagctgaccgtgtggtcctgggattccacactgcctcgtacggtcaagggattcgaggccaagaacccgaacattaaggtgaaggtgaccaatgccggcaccaacaaggacgagtacaacgcactgtccaacgccatcgaggccggctccggtgctccggacatcgcccagatcgaatactacgcactgcccgaatacgtgattcgcggccacctcgagaacctctccgatctcggcgcctccgatttcaaggacttctacaccccgggcacgtggtcctcggtgagcatcaatgacggcgtctacgccctgccgatggattccggcccgatggcctggttctacaacaaggacgtcttcgacaaggccggcgtcgatccgacccaggtgcgcacgtgggacgacttctacgaggctgccaagaagattcgcgccgtggactcctacatcacctccgattccggtgacgccggtttcttcgactccatgacctggctggccggcgcgaccccgttcgagacctccaaggacggcgagaccgtgaccatcaacctgaccggtgacaagaacgtcaagaccttcaccgacttctggcagaagatgatcgacgaagacctcatcgacaccaagaccgtcggctggaccgacgattggaacaagggtctggatgacggctccatcgcatccctgctgaccggcgcttggatgccgtacaacctgctttccggcgctccgaacggtgacggcaagtggcgcatcgcccagatgccgaccgcagacggctccgagaccaactccgagaacggtggttcctcgctggccatcgtgaagtccgacgacaaggccaaggtcgccgccgcctacaagttcatggaatacgcctgccacgacgccgagggcattaagacccgtgttgacggcggtgccttcccggccgacaacgacaccctcaagtccaacgacttcctcaacatgacctccctgaccgactccgacggcaaggcccacgagtacttcggcggtcagaagttcaacgaggagctggccaaggccgcagccaatgtgtccaccggctacaagttcctgcccttcgaggtctacgctcgcggcaagttcggcgactacgccggcgatgcctacaccggcaagaccacgctctccgatgccgtggcttcctggcagaaggacctgcaggattacgccaagcagcagggctaccaggtgaagtaacggcaatcacagcagacttcctcctgtggtttctgtagcgggaggttgcgataacaggatcgggcactcttcggagcgcccgattttcttatgccatgggagcagtggcgcgcggattgcgataccaagatggcgtgttgccgaagaatgtgtataataaaagatgttatcgcaaccatagctacaaagtggcgaaacaaagccgttttgtgactactgaaccatagagtgatggttcacgatagcatgacgacgaggagagttgccatgctgttgtggtgacaatcactgcagaccgccgaaaggcgatccaaggaaggagaacagaacgatgaagttcaccgttgctaagaaggccattgcacttaccggtgcggttgccatgctgggttccgttgccgcctgcggttccgacaccgccagtggcaagccggctcaagataaggacgttaccgaaatcaccgtgtgggcttgggagcccacgctgacccaggttgccaaggacttcaccaagaagaccggcatcaaggtcgatctcaagaacgtcggcaccaacaccaaggaatacacccagcttgataacgccatcgaggctggctccggtgctccggacgtcgctcaggttgagtactacgccatcccgcagtacgccatcaagggcaacctgctggacatcaccgacaagacctccggctactccgacttctacaccccgggcccgtgggcttccgtgcagttcgccggcaaggtctacggcctgccgatggattccggcccaatggccttcttctacaacaaggaggtcttcgacaaggccggtgttgacgccgagcagatcaagacctgggatcagtactacgacgccgccaagaagattcacgctctgggcgacaactactacatcacctccgacaccggtgacgccggcttcttcgactccatgacctggctggccggtgcaaagccgttccagacctcttccgatggttccgaagtcaccgtcaacctgaccgaggacaagggcgtcaagaccttcaccgacttctggcagaagctgctggacgagggcctgctcgacaccaagaccgctggctggtctgaggactggttcaagggcatggtcgacggcaccatcgcctccctgttcactggcgcttggatgcctgccaacctggccaactccgctgctgacggcgctggcaagtggcgtgtgacccagatgccgaccgctgacggctccaccaccaactccgagaacggtggttcttcgctggctgtgctcgcctccaccaagaaggctgacgctgcttaccagttcatcgagtacgccaaccacggcgacggcgtggccacccgtgtggccggcggtgcattcccggctgacaaggcctccatggagtccgactccttcaagaacaccaccactgtgaagaacgccgatggcgaggacgttgactacttcggtggtcagaagtacaacgaggttctggctcaggctgctgagaacgtgtcctccgactaccagttcctgccctacgaggtcaaggcccgcaccatcttcggcgactaccttggcaagtcctacaccggcgaccagaagctgactgacggtatcgccgcttggcagaaggcactgcaggattacggcaaggatcagggcttcaccgtgaagtaagccttgaaccctcgctgagactgcctagctaatctcacctgatacacaaagccccgtgacgaatcccgtcacggggcttttaccgttttaagtcccgcctagtacactcgtcaccatgcgagtgatcggacagcgaatcaaaagaatggcaaccatagcagtgactgccatcctttccgtatccctggcctcgtgcgggcaggccacggacgacaaccgtacggagatcagcgtatggagctgggaaccgagcatgggggaggtcatccgccgtttcgaaaaagccaatccggacatccgcgtgaaatggaccaatatctccggctacggcaatcttaataccgccattcaagacggttacggcacgccggacgtggctcaaatcgaatactatgcactgttgcagtacgcggtctccggccaattgcttgatctgaccgacaaaatcggctcggattattccaacttctttaccctcggcacatggtcgtccgtgcagctcgccggccgtacctatggactgcccatggattcgggcccgatgggcttcttctacaacgaagacgtgttccgccaagccggcgtggacgccaccaagatcaagacttgggatgactattacgaggccgccgaaaagctcaaggagatcggcgcgtatatcgccgccgactcgggcgacggcagtttctatgacgcgatggtctggctcgccggtggtcagccgttccacacgtcggccgacggcaaaaccgtgaccatcgatttggatgaggatgccggcacccaacggttcaccgaattctggcagaaaatgatcgatgaggggcttgttgacactacctccgccacatggtcggatcggtggaaaagcagagtgggcaccggcaccatcgcctccgtgttctctggggcttggatgccgtcgttgctgctgtccaatgtgccgggcgcggccggtctgtggcgcgtggctcccatgcccacctatggtgggcagcctgccaacgccgaaaatggcggctcggcgctgaccgtgttgcaactgacccgtaagccggatgcggcctatcgtttcgtggactttgtggcgcatgacgcccaaggcattagcgcgcgtgtagacggcggtgccttcccggccgattacgccaccctgaattccgctgattttctggataaaaccacgattaccaatgaccgtggcattgaaatcccgtatttcggcgggcagaagttcaaccgggtactgtcggaggccgccgaggatgtgtcggtcggataccagtatctgccattcgaagtgtatgcgcgcagtgacttcaaatcgacggtgggccaggcatacgagtggtccggcagtttccacgcctatcagcagcgacaggaagccattgagatgggcatgaaggacgaggaaggcaacccgctcgaaccattggagaagcccggcaagaaagtcagtctctccgacggcctggcccgatggcagaaagacctccgagaatacggcctcaatcagggctttacgattaagtagggttttgagtaggtttttcggggagggacggaatcgactgcgctatgcgcggccgatgcctgcacaccgcgttacttcacattgcgcgagtagatgtatgccatgcctttgaagatcaggtctgaatcgtagacgtcgatcatgtcggtgtcgttcttgaaaatgcggctgagccctcccgtggctaccacttggaacggctcatcgatttccttgcggaactgctgaatcgtgcgctcaatgccaccgaggaacgtgtaatacagtccggcctgcatagcagtgcgcgtattggtggccagaatcgactgcggttgcgtgatctccacttccggcagctgggcggtctgcccccacaacgcctcggccccggtgcggatgcccgtggtgatgaagccggagcgaatcgtgccggaaccgtccacatagttgaacgtggtggcggtgccgaagtcggccaccagcaccgggccgccataggtgtggtaggcgccggcgcagtcggcgatgcagtcagagcccaaggttttggggtcgtcgagacgaatgttcatgccggtcttgacgccagggcccaccaccatcggttccaatccgaggaatttgatcagcgaggcgcggaaggaatacatcaccttcggcaccaccgagcagacgatcacatcgtccacatcgtcggccgtgtaatcgctcaaagccaggaactgcgtgatcatcagaccgtattcgtctgaggtgtgcgtcgccttggtggtgatgcggtaggagccgacgatgcggtcgccctccagaaaaccgatcacgatattcgtattgccgatatcgaccgccatcagcatgggtcaggcctccttgttctcgtcatcgacattgctcgcgccgccggaacgcaacgctgcgagccgcagcaacagtcgttgcgcaagcacggttttgtccatcttgtcccaatgctcgatcttcggggtgccggcatcctccgctccggacgtgagcacggtgacaacgttggtgtcggtgccgaacccggcaccggcgtcgcgcagattgttggccaccagcatgtcgcaatgcttggacgtcagcttcttctccgcattacgaatcagatgctcggtctccatcgcgaatccgcacaggatctgcgagccgtcgtcgcgcttgcgttcgccggcccacgccagaatatccgggttggaaaccagctccacggtgatgctgctgcggccggccttcttgattttctccggcgcaatctcggccacgcggaaatcgcccacggcggcggccataatcgtgatatccgccgccgggaaggcgtcggccaccgcatcgaacatatcctgcgcggtcgtgacgcgcaccacatccaccgcatcgggcgcggtcaaggcgactggaccggagaccagcgttacgtcggcaccaaattcggctgcggccgaggcaatcgcataccccatcttgccggtggaatggttcgtcagatagcggaccgggtctagcggctcctgcgttggcccggcagtgaccagcacgcgcagccccttgagcggggaagatgagggagcctggtcatcctgcgcatccgccagcagccgagcggccacttcctcgatgcgcgccggctcttccatacggcctcgtcccacgtcgccgcaagccagattgccttcctccggctccacaatctgccagcccaattcggcgcaggttttcagattgcgctgcgtggccggattgttgtacatatgcacgttcatcgccgggcataggatcttcggcccctcataggccagaatggtggacgtcagcgtatcgttcgccaatccacaggcgatgcgggcgatgacgtcggcgctcgccggggccaccaccagcagattggcccaggccgcatcggccacatgattgatggtcgttggcacggtcggattggccgtcacgtcgccgtgcgcggccggataagcggggaacatcgtggtacgggtgggttgatgggtcagtgaggtgaatgtcaggggagtgacgaagccttcggccgctgtggtttcgataacccgcacctcgtggccggccttggtccaatcggatgccagatgacaggccttgaacgcggcgatgctgccggtgacgcccagaagaatatgtgccatagctgcctcccggccttatgccaaggccgcacgtgtgcccacgccagcgcttcccgcgtcgttgcccgacgatgcgccgcgtgttgtggtcgccgcggaccctccgtcggcgccgcaatccagtatagccattgcctccggcgtgtccggggatatagtagaacgtggtgatcgacccgaatgggcggtcaaccacgcaagataacaacgaaaccatattcgggcgtaagcatgcccgaatgcatcagggagtatccatgtcccagaacaatggtgtgcacggcgagtccggcgcaaccgaagacaggaacatcgacggcgcgaatcaagctgccagcaccgacgcgagcctgaacgcgcgcgcgaaatcatcaaacaggaacaacggcggcccgaaatggtggctgtggacgctgatcgcggtcgtcgtggccgcggcgctcatcgtgggcgtcaccgtcttcggcgggaaaggcaagggcaaggacgcgaacgcctccgtctcggccagccgatccgacaccgtggccgtcggcctcaaactcgccccggtcaatcttgacatccgccaccagtcaggttcggcccttgagcagatcctcatcggcaacgtgtacgagggtctcgtctcgcgcggctcggacaacaaggtccaccccggtctggccaagagctgggagatctccaaggatggcctgacctacacgttccacctcaacgagaagatgaacttctccaacggcgacaagctcgacgccgaggatgtggcgtggtccatcaacgagctcaaggcccagaagtactacgactgcgagcaggtcaagagcctggacaaggccgaggccgtggacgccaacacggtcaggctcaccctctccgcgcccaactcgaacatgctgtggtacctcaccagccgtcccggcctggtctacgacaaggacgccacctgggatcagaagaacggcgcgttgggctcgggtccgtacaccgtggtctccttcgacccgaacgacaagatcgtgctcaaggcgaaccccaagtattggggcaccgagcacaaggcgaggaccgagaacgtgatcgtccggttcctgccggacgagaacgccagcatcaacgccctcaagagcggcgacgtgcaggtgctttcgtccatcattcctgcgacccttgccgagccgttccgcaaggatccgaactatgtggtcaaagttggtggcggttccgacaagttcgtgctcgccttcaacatggccaacgacaagctctccgacaagcgcgtccgccaggccatccgatacgccatcgaccataagcagatcatcgcctcgcgcggcggcgtggacgcccccctcggcggtccgatccccgagatggatcccggttacgaggatctgagcggcctgtacccgcatgacgtggccaaggccaagaagctcatggaacaggccggatactccgagtcgaagccgctggacctgaccctcacctacgccaacgtgtatggcaccgagctcggcgaccagctcaagagccagctcaagcccatcggcatcgacctgaagatcaactacgtggagttctccacttggctgcaggacgtgcacgccaacggcaactacgatctttcgctcgtggaccatgccgaaagccacgacttctacggatggaccacgccgagctactacttccactacgacaacaaggacgtgcaggccctgtacgccaaggcgctggaggccacctccgacgacgaggcctcgaagtatctggccaaggccgcgaagatcgtctccgaggacgcgccggccgactggctgttcagtttgaaggtcaccatcgcctacgccaagggcgtgaatggtgtaccgcaggacttcatccagaccgtgctgcccctctggcggatcacctacaccaagtagtcccggaacccatcggtcgggcgcggcgcgggagtgattccgtggcacgcccgaccgtggacggcccatccggccggtgacgccacgggcggtggcgagggaatcgataagggaggcgttatgcggttcttgatgcaacgcttgctgctgttcgcggcggcgctgttcggcatttcggtgctggtgttcgcgatgctgcgcatcctgccgggcgacgtggcggtcgtgatggccggcatgaacgcatcgccggcgcgtgtggcggccctgcgcgccgaattcggccttgaccggccgtatgtcgtgcagtatctcgactgggccggagggctgctgcacggcgaccttggcgtgtcggcgctgaccggtcgggcggtgacctcccaggtcggccaacgtgcgacgatcacgttcccgctgatcgtgatgagtctggtcatcgcgctcaccctcggcttgtccatgggcgccgccgccgtgatctcccggtcgccggccgtgcgcggtttcctgcgcgtgctgtccatcgtgggcggcgccgtgccggccctgtggagcggcctgctgctcatcctcctgttcgcacggggcgtgggccttgtcggtctgctgccctcgcaggggttccccgccgctgggtggggcgctcccgggcgggcggtctcgtccctgatactgccggcgctggccaccggattcgtgtccggtgcgggcatcatgcgttacacgcgctccattctggaaggcatcgccgatgagggagggccgatcgatatggccatgtcctgcggcatgacccgcacccaggcgttggtgcgcgtgggattgcgattggcggctccgcagctcgtctcggtggtgggactggcgttcgcctcgatgatcaccggcgtgatggtggtggagaacctgttcgccctgcccggtctgggcgccctgttggtgggcgatgtcggcaaccgcgatctggtggccgtgcaaagcgagctgttcctgctcgccgcgttcttcctgctgatcggcctggcggtggatctgctgcacgcgctgcttgacccgcgtctggccgccggaaaggaggaatgatggttgatcgcaatggtcgatggcgtcgttcgggcgtggttctgggcaccatctggtcccgtggcaccggccgctactcgctgatcgtgctgggatcgtggatggtcgtcgccctggtgtcgttgttctggaccccgcagtcgttgctggccaccgacggctaccacgtgtgggataagccgtcgtccgcgcattggctgggcaccgacggcaccggcgcggatgtgctgagctggctgatggccggatcgcgtacgaaccttgccgtcgccctgctcaccgttgtctgctcggctgccatcggcatcctactggtcgggctgatggtcgcccgttcttcggcgctcgcttcggcgtcggtcgccgtggtcgacgcgctgatctccatccccaccgtgctcatcgccctgctgctcgccgtgccgttcggcgcatccgcggccgtggtgatcggcgcgtgctccatcggctacgggctgcatctggcgcgcgtcgcccgcccggccgccctgctcgccgcccgctcgggatacgtgcagtcggcccgggcgaacggtgccagcgggttcggcgtactggtcagacacatcgtgccgaacatcacgccggtgctgatggtgcaatcgtcgatgtcggcgggcacctcggtgctggccgaggcgggcctgacctatctgggcgtgggcgtcggcgcgggggtgccgagctggggccattcgctggccacctcggtcaaactcatcaacgtgtttccgttgacggtggtgtggcccggtctgatcgtcaccctggtggtggtcgcgctgaacctgttcggcgacgcgttgcgcgacgccaccgacccggtggctaatcccgcgttgcggcagatgactgtgcccggtgcggttgtgccggtggctaggggagccggtgacactgcggcgcagtccgcagtggcagcgccgaaggagacggatgatgagcgttgaaattcacgggctgaatattgctatcggcggcaaaccgattgtcacggatgtcgatctgtccatcgcggacggcgaacgggtcggcctgatcggttcctccggctccggcaaatcgatgatcgccaagtcattgctcggcctgttgccgcgcgaggccgtgctgtccggcaccatcacgatgggagaaaccgccatcctgtccggagaaaccgccgagtcgcggcatgggcaggaagatgactcaggatctgacgaagaacgcggcgcggcagataggcaccatgttgccggtgaacgcagggttgccacctcgggccacgattccgctgcgtacgccgacgagcatacgcttgccgatctgcgcggccggtatgtgggtacggtattccagaatccggcccatgcgctgaacccggtgatgaccgtggcgcagcagattgcgttgccgttgagactgcactacgatctgaccaaggccgaacgtgctgagcgagtgaataccatgctggacaaggtcggactggaccgtgacgtggccggcacatacccgcacgaactgtccggcggccaacagcagcgcgtgggcatcgccacggcgctgatcacctcaccgcgattcatcattgcggacgaacccaccaccgcgctcgactccatcacgcaacgtcagatcgtggacctgctgacctcgttggtggacgacgccggcgcatccatgctgttcatcacccatgatttctccgtactcgcgcgtgccaccacccgctgctacgtgctggacgccggccgcatcgtcgaatccggacccaccgccgacctgcttgctgcaccgaccacgccgcaagcccaacgcttggtcgccgccgcccaaaccctcaccctccacacccccaaggaggattcgcatgagtaacagcagtgtgccactcctctccgcccactccatcaccaaatccttcggaccgcgcaccgcacgccaccaagtcctcttcgacgtctccgccgacgtccacgccggcgaatgtctggccgtgatcggcggctccggatccggcaaatccacgctgacccgcattatgctgggcttggaatccgcggactccggcagcgtggaatacgagagccaatccattgtcggcggccgaaaatcgccgggattcgcgaccctgcgccgcgaatcgggactggtgttccaggacccgttctcatcactcgacccgcgttggcaagtcgccaaatcggtggctgaaccgctgagtctgcagcgacgtgatctgaacaacaccgatatcgacgagcgggtggtcgcggctctgaccatggcgggtcttgaaccggcggacttcctgaaccggtacccaatcgacctgtctggtggccaggcgcagcgcgtggtcatcgcccgcgccatcatcaacgagcccaaggtaatcctcgccgacgaaccaatgagcgccatcgacgtggccgcgcgcatccagatcctcgacgccttcgccgctatccgtgaggcccggccgagcaccgccatcatcatggtctcccacgatctcggcgtggtgcagcacatcgccaaccgcatcctcgtgcttcacgacgggcgcgtcgaagagacgggtcccaccgccgaagtgctcggcaacccccaatccgattacacccgtcagctcatcgaggcagcctcgttatagacctttttggctcccctccctgaggggagccggccgccggcgacacgcgcttgtcgcgggttgtgctatggtgtgaggcatgcagattatctcatgttgttgtcgctaaccgacgcccctgggcgagcggtcagtgacgcataacttgagatggagcattcgaatcgcggcgaatctgccgcatacttttcatgtatccgatggcacaagcgtaatcgtgtaatgcgcgagccgtggttaacatgaaaaaccggttcacttttcggattcaccgtacagtgagcgggaatactcgattttcaaaccaaagccacagtccattcgtctgggaacgtcggttcacgaacgcaacgcagcaaaacccccacaaccccagcaacgaaggacttcacatgaccatccacaacagcctcgcagaactcatcggcaacaccccgctcgtcaagctcaaccacatcccgcaggcggccggcgtcaaagccaccatcgccgtcaaagtcgaatacttcaaccccggcggctcctccaaggaccgcatcgccgagcgcatcatcgacgccgccgaacagtccggccagctgaagcccggcggcgtgatcgtcgagcccacctcgggcaacaccggcgtcggcctggccctggtcgcccagcagcgcggctaccgcacgattttcaccctgccggacaaggtttccgaatccaagcgcgcggtgctgcgcgcctacggtgccgaagtcatcgtcacaccgaccgacgccggcccggacgacccgcgctcctactaccaggtcgccgaacgactggccaacacgattcccggcggcttccgcccgaaccagtacgacaacccgaacggcccgctgagccactactacaccaccggccccgagatctgggaggctacggaccacaaggtcacgcacttcgtggccggcattggcaccggcggcaccatctccggcaccggcaagtacctcaaggaagcctccaacggcgcggtcaaggtcatcggctccgacccggaaggctccatctactccgcttcctcacgcgacgaagtccaccagtacgacatcgagggcgtgggggaggacttctaccccaaggctttcgaccggaacatcaccgacgacatcgtgcgcgtatccgacgccgaagcctttgaaatgacccgccgtctggccggcgaggaggcgttgctggtcggcggctcgtccggcatggccgtggccagcgccatcaagtacgcgcttgccaatgatttggacgagaaccagattgtggtggtgctcgcccctgattccggccgcagttatctggagaagatcttcaatgacgactggatgcgtgccaacggctacggcgacatcgtggaacgcaccagcaagccctccctcgccgagcagtaccttaacggaactccctctgatgagggagctgcggatggactccataactagctatcaaaagaatcaatactaactaaccgcacctgttttaccttcgaatacggaacaatcccgaaaggaacccaatatcatgtccgctgaatacaacgccaagttcgccaacaccgacatcgccactcgcgccatccacgccggccaggagcccgacccgaccaccggtgcggtcgtcacgccgatcttcgccacctccactttcaagcaggatggcatgttgggcctcaggggaggccacgactactctcgctccatcaaccccactcgcaccagcttcgacgagcagctcgccgccgtggaaggcggcaagtacgcgctgagcttctcctcgggcttggccgccatcgacgtgctgctgcgctccaccatcaagcccggcgacaacatcctgctcggcaacgatgtgtacggtggcacctaccgcctgctctccaaggtgttcgtgccgtggggtgtgggcctcgacgtggtggacatcaccgatctgaaagccgtggaaaccgcattggcctccaagcactaccagtatgtgtgggtcgagaccccgtccaacccgctgctcaacatcaccgacatcgcggccaccgccgaagttgcccacaagtacggcaccaaggtcgcggtcgacaacaccttcgcctcgcccgcccttcagcacccgctggccgatggcgccgatgtggtggtctactccaccaccaagtacatcggcggccactccgacgtggtcggcggtgccgtggtggtcaacgacgaggagacccgtgagaaggtcgccttcctgcagaacgccgccggcgcagtgccctccccgttcgactcctggctggacatccgcggcctgaagaccctggatctgcgcgtcaagcgccacagtgccaacgccctgaaggtggccgaatggctcgaatcccagccctctgatgtgattgagcgcgtctggtacccgggcctcgagtcccacccgggtcatgaaatcgccgcccgccagatgcacggcggcttcggcggcatcgtctctgtgcagctcgcggccggtgccgaggcggccaagcacttcgtggaccacacgcagatcttcacactggccgaatcgctcggcggtgtggaaagcctcatcgaggtgcccgccgccatgacccacgcctccgtggccggcaccaccctgcaggtgcccgccaatctggtgcgtatttcggtcggtatcgagaacgccgacgaccttatcgccgatctcaagcaggcattggatcgtatctgaccgtactgacggtactggtggcaccgtattgacggtgccaccacgcttatcggcggactcgctatcgattggtacctacaaaaaatccccggcccacaagggtcggggattttccgttatcgattaaacatggatcgaatcagctggcgttgccgccctgccatccggtggcatccgcaccagccgggcgcaacgcctgaccggaagtcggtgtggtgccatcaacgaccacacgagtgccgatggtggcaaagtcgtacatccacttggcgtcggccacctgcatgttgatgcagccgtgcgagcctgggataccctgctgcacatagatggggtgctcgccccacatgtatgcaggaacaccgtgcagagcctcgccgccgttatagtaggaaacccacggcgtgcctggctggttgtagccttcgccaaccatggtctgcgattcgtacttgagatacacgtagaacgtgccggtatcggacagcatggaaccatcggcggtgggcttgccagaagcgatgttgaacttcttgaccaccgtggtgccctgatatgcagtggcagtctggttcgtcagatcaacatgaacccacttatcgccatttgccgtatcgaagttatgaggcacctcgacctgcttgacatcatatgggctgtctttcacagccacagtggaatcagtggactggttctgctcgatggcggtagccagacgttcgggggcgtccccggcaccagtcacttcaataccatccacaccgagtgtcttatcggcaccaatttccacgccgccttcgtctttcggcgtgatgtagacctcgcgtgtcaccttgggaacagtcagttccttggttacgctgtcactggtgacgtacttggtgatggcatcgcggtcgactaccagactcatggtgccacccgccttattcaccgtgggcttgaggaatgaggcaatggtatcggccgggatggtgacgctcttgttcacgccgttgtccacggtcagtttgaggccaagcttggcattggcgtcaaactgtgtttgctgtgcgctcgcgtcatcaatcggattctttgcagtctgtagcttgaccggcaccgtcgcattttcgcccggggtcgcgacggcctccttgactgcagcattgacaacattgatatccgggcccttgccatcctgacccgcggtgtaatcgaactgcttggtgctcttgttgtagacaacggtggcaatctgcgctcggtcggcctcatcgaccaggccggcggtgacgaattgttcggcagtctctttgtctctggtggcggtcagagcgatatgcggctgatcgaaaatattgagcttggccacgtcgccggtcttcgcgttcaacagcgcatctacggttttatccgtgtcgacggtgacgccaaggtccttcagcgaggctttgacgctgttgccttcggcggtgaacgtcactgtggtgttattcagctgctgcttcacagtattcgcaagttcttcgcgggtctggcccatgacagagacattgcccaaatgaacaccgggcgcagccttgtcttggaagtaccaacgtccgacgaagaaataggctattaatgcggcaagcaacactgcaaatatggttatgatggcaatccgtgcggccttgccatgtgatttagcggtggtagatgccataacatgttcacccacataggctgtattgtcggcatggttattggtgccattgtcgctttgctgtggcgtggcggtacctgtggccgcggctgcgaacagcccatcggcggccacaggctgcagcaccgccgtctcctgatcgtcaggcgaggagaaggaaaatgtatcgttggccataaaatgccccgtcttagttctctcaaagcggcatatcgtgtgatatgccgggaataacgtttcttgacgcataataatacggaagggctacgtacatcgttacgaggtattccgttatacgatgaaatccatccgcggtcggcctacactggtcgtttatgacagcacatcaggcggcgctggaggcgctcacacgatacttcggctatgactcgtttaggcccggacagcaaggaattgtcgaggctttgcttgccggacacgatgtcttgggcgtgatgcccaccggcgcaggcaagtccgtgtgctaccagattcccgccgcgctcagcccgggtgtgactctggtcgtatctcccttgatttccctgatgcgcgaccaggtcgatgcgctgaacgacctcggtctgccggccgcgttcatcaacaccactcaaactcccgacgagcaggcgatggtgttcgcccaagccgccgccgggcagatcaaactgctgtacgtggccccggaacgcttggaaaccgggcgattccgcgactttgccgcccgtacgccgatctcgctgatcgccgtggacgaagcccactgcgtctcccagtggggtcaggacttccgctcgtcgtacttaggtatcggcgatttcatcgccgggctgccgcagcgtccaccggtgggtgcgttcaccgccaccgccaccgaacgggtgcgtcgggacatcgtgggactgctgggattgcggaatccggccgtcaccgtcaccggattcgaccggccgaacttgtattttgatgtggtcaaactggagaccaaatacaaggccgcatgggtggcgcggtatgtggccgaccatccggacgaatccggcatcgtctactgcgccacccgcaagaccaccgaagcgctcgccgacacgctgaaccagatggggcatccggccgtcgcctaccatggcggcatgtcgccggacgcgcgtgaggtggcccagcgcgacttcatcaccgacaaggtgccggtggtcgtagccaccaacgccttcggcatgggcatcgataagtccaacgtgcgttacgtcatccaccacaatctacccgaatccattgaagcctactatcaggaggccggccgcgcgggccgtgacggcgagcccagccgatgcacgctgctgtggaatgagtcagacatcgtcacccggcgtcggttgctggataacgattatgagaacgagcgattgactcccgaagagcaggagatcgttcgccagtccaagcgccggctgctggacggtatggtcggctactgccgcaccaccgactgcctgcaccggtatatgacccggtatttcggtcaggaattgtcgccgaatgctggttccgcggcgggtgaagacattgcggcggactcttcgcagtccggcagatgcggtgcctgctcgaactgcgaaagcacgttcgagaccatcgacgtgacccgcgtggcgcaggcgatcagccgttgcgtgcatgacgtggggcagcgcgtcggttccggcaagatcgtcaagatcctgcgcggttcgcgggcacaggatctggcatggctgaacccggagcggatgcccaccttcggcatgctcaaggacgtgaacgaggctcgcgtgcgcgacgtgttgagccagatggccacggacgggtacctgtcaatcgccgaagggcgtatgccaatcgtcatgttcggtgcgcgggcggccgaaaccgccgctcccgacttccactatgagatcaaacaggtggaacgcaagtcggcggcggccggttccggtcggagcgggggagtggctgatactgccgattccgccaatgttcccggcgatgcgctgggctcgtatatcccggacgatgacgaggaatcgctgttccagaagctacgcgaactgcgacgcaccatcgcccaggaaatcggcaagccgccgtacatcgtgttctccgacaagaccttgcgcgacatggcccgcatcaagccggttaccaacgcgcaatttctggcggtcaacggcgtcggtcaacacaagctcgacctctacggccagcgcttcatgcaaaccatcgcctcgttcaatgccgggagtgcgtcataacaatctcctatagcgaaccgcggagtatttgcgggcgttcttgggctggcgcgactacgatgactgttcgatacttcatgaccgaacactcagcaagtagaaaggcaacagcatggcagaagacaaggccgaaaagcccgtcgtcgaatcattccagcttgatcacaccaaggtcaaggcgccgtacgtgcgttacatcgacaccgaaacgggccctcacggcgacgtgatctccaattacgatctgcgcctgacccagccgaacgagcaggccatccccaccggcggcctgcacaccatcgaacacaccatcgccgtgctgctgcgtgaacgcattcccggctacatcgactgctcgccgttcggctgccgcaccggcttccacctgctgacctggggcacccactccaccgaggatgtggccaaggcgttgaaggaatcgttggagttcatcgcatacaaggccacatgggatgacgtgcccgccaccaccgagaagagctgcggcaactatcgcgaccacagcctgttcgccgccaaggaatgggccaagcagatccttgaggaaggcatcagctccgacccgttcgagcgcaaggtcgtctgattcgtctgattcgattcaattctgattcggctcccgctggcgggagccgggggcgaagccgactgagggtggctgtcctcaactcggctggactgtccggctcctgcggacggaagccattgtttattagtgtccgtcatgcaacgcggacgggatttcttgtgcctacggcatggtaggttggccgtcagttagtcgccggtcaccgtgccggcaacccggcatgtcggagaggtgagaagtgactcagtcgaacgctgcaaacaaggcgacaggccgccgtttccgccacgccaccatgcgcgatctgccgcagatgcagaaaatctacgcacgcgcacgcgcgttgatggccgccaacggcaaccccacccagtggggcaacgaatttccgcgtgaatcggtgattgaagacgacatcgccaaccagcgtacgatgctgctggtcgacacctgcaatggccacgaacgcattctggcccagttcgccctgtgcccgggcaaggatccgacctacgccaaaatcgacggcgcctggctggacaacgacacctatgtgaccatccaccgcatcgccgcatccggtctggtgcgccacgcggcccgcgactgcatcaggtgggccctgaagcactacggcaacgtgcgcgccgacacccaccccaataacaaggccatgcagcacgtgctcgaaagctccggcttcgcccgttgcggcctgatccagctgctcgaccggccggtcgacaccaccagaatcgcctatcagcgccacgagtggtgagtgtggctgccggctgatgtgctcgtttctgcaccgtcatcggtttctgacggtagaatcagtgtgtgagaagaacacgttgggtcgggggcgtcgtggcggtgcttgcggctgtcatgctgtcgtcgtgcggcggcgtccagtcgaatcccggggtaacacaccgttgccaatccattcaccgcgcaggtgaatggagaagacatggcgatgcctgtcggccgatggagccccatcggccgacaggcatcgaggaagtcaccgtggccggcggaacgcgcggtcgccgattggggcgaatggcttgtgtggttcgctttggtaccagtaggcgaccgtggccacgtcgtcctgtcgttcgaagttgccggcttcctcggtgccgatctgctgccattcgacgcgcaggtctcgctcgaagtagatcgggtcggggatgtgccaacggtataggccgcgggtcacgggggtggcagtgtcccagtaggcgctttcgcgtccggcgaggttctgcgagtagaacgggaagccgaggtatgggccggtgaaggtgcgctcgtacatgcggccgtgttcgtcgaattcggcgaagctccaggcgccgccgaagtagtcctcggcgccggtgctgcaccaggtggggtatttgccgtcgccgtcgatgtagaacttgaattcgccttcgccccaccagcggctttcgagcgcggtgagcgccaggtaggtgccgacgtaggtgccgtgtccttcgacgccatcgagcaccacgtagtcgtgggcgagttcggtgacgcgttggcggcgccactgcgcgtggaagcgcatcgtgtcggccggcagccggtcgtattcggtgtagtcgatttggtagaagaacgcgggcacgtcctcgttgtggtcgttgcgcagcacgatgcgcgcgtgttcgaacggcatggcgaagtagcagttgaagccccggttcgggttgaccatgacgggaattgagttgatggtgcaggactgggcgtgtccgcagcagaagaagtcgccgatcgggcattgcaccgagggggagtcctcgccgtcccagtagaattccaggatcaggttgcgtagcacgtcggggccggtgggggaggtgcggtcggttaccgtcatccagatgtgacgaatcacgccggggccctcgacgtccatcaatgtcaccgattccccggacctcaccgtgctgatgcaggggcttcccttgcgggaggggcccaacgcgctggccgccatggccgcgcggcccttgccgccgtccgggttttcggcgttgatgcagcgggtgcggccgggggtcctcatggccacggcatccaaggcgccttgtccgagccccggcgcggggttcgctgtggtgaatgcgtcgagcatgatgcttacttcctttcctgtcgcaggcccgtcccgccacggcgttttgtctggggtgagccgggctgctgggggggggtatttcacggcaccggcggtgatgccctgggagagcttgcgctggggtagtgcccgatatcttgcgcactttggtcttcgcccgtccctgtggcgatgatcggttcgcttcccatacggtctcaccgagtcttgacatgtcgaggtagcggcgcgtcgaccactcgttcgacgtgacatagcgcacgcgtgcgcagacgagcatcaacgcgctgcgttcgtcggggaagctgccgaccatgcgcgtgcgccgtctgatttcgcggttgcgggggttgaccctggcgaggacgttgcgctcgaagcggaccatgcaccgctggtagcgggcatcgcgttcaaggcctcctcgacgctttttctgaccatacggtccagggtggtctccgacatggcctcatatcgcaaaaaccgtacgctgaaagtaactcagcgtacggttttcacgaaagcagctatcggctatcggtcagccgatagacctcagtcctcagtcgcagcgaccttggtgtcagccccggccttctgctcaaggccgagcttggagcgcttgcggctgtagccgaagtacacgatcaggcccagaccgaaccagatggcgaaacgcacccaggtctcccagttgagaccggcgatgagcacgaagcagaatacgatggccagaatcggggtgaccggcacgcccggcgcgcggaagccgcggggcgcattcggctgggtcttgcgcatccatagaataccggccgacacgatgatgaacgcggacagcgtaccgatgttcaccagctcgaacagcacgttgatgttgatgaagccgccggcgaacgcggtcagcagaccgaagaaccaggtgcccttgaacggggtgcggtacttctcgtgcacgtggccgaagaacttcgggaacaggccgtcacggctcatggcgtagcagatacgggactggccgtacagctgtacgagcatcaccgtggtcatgccgatgagggcgcctaggttcacgatcaccgcgagccagttcatgccggtctccagaatcacgccggccactggggcgtcgatgtacttggcgaactccttgtagggcaccacgccggtcatgatcatggtcatgacgatgtagagcacggtggaaacggccagggacagcaggatgccgcgcggcagtgtcttgttcgggttgatggtctcctcggcggaagaggacacggcgtcgaatccgatgaagctgaagaacacgatggatgcggccggcacaatgccgtacggctgggtggagccgggctggaaagtgtagatgccgtacggggagaacggctgccagttggacggcttgacataccacacggcgcacacgatgaacagcacgatgatggcgagcttgatgagcaccatcacgtcattggtgcgcttggtctggttgatgccgatcgagagcacccacgtgatgatcagcacgatgacgaaaccgggcaggttgaagtaggtggtgacgtccgggttggtgccgtaggcggcggtcagctcgaccggcagatgcagtccgaagccttccaacaacttgttgaagtatcccgaccagccggcggacacggtggccgcctgcagagcatactccagaatcagatcccagccgattacgaaggcgatgagctcgccgaacgccagataggcataggagtaggccgagccggacaccggtgccatggcggcgaactcggcgtagcacaggccggcgaaaccgcagcagacggcggccagcaggaacgatacggacagggccgggccggcggtgagcgcgcccttgccggtgagcacgaagataccggtgccgatgatcgcgccgataccgagcatcgtcagatcgaaggtgcgcatcgtgcgcttcaggggagtggattcggcgacaagctgatccacgcttttcttacgaaacagatccatgttcttctctcatgaaacttaagatatggggctagaccggacggatttccgggatcccggcacgcctcaacgccgggaatcaaaggcggcttccgagaaaccgcatatcggtcattagtgtacgactgccgggcgaaaacaaacgattatgaccacacgtcacattcctgcgcaacaataggtgcctatgagcatgaacgcagcacccgaaatcgcattctcgtccgagcagggcaaggccaactatgcggccgcccgccgccaataccccgcacaggccatcgtgaacctcaaaaccatgcgcgacaacatggcccacctggtctccgtggtcggcggcccgaactccggcacggcggtgatgggcgtggtcaaggccgacgcatacggccacggactgctgcccgccgcactggccgcgctcgccggcggcgcgacatggctcggcaccgcgcaatcgcatgaagcactgctgctgcgcaaactcggcatcggccccgaccgttgccgcattctgacttgggtctacaacggcaccgaagtgccattcgatgagctgatcgctgccgatatcgacgtatcggtcggctccctgcccggcatcgatgccgtggccgccgccgcacgcaagctcggcaagcccgcccgcgtacacgtcaaggtcgattccggcttcggtcgcaacggtttcacgccggctggattcgacgccgcgctcgccaaactcgtgccgctcgccaaagagggcgtgttgcatattgtgggtcagtggagccatctcgccgtggccgattcgcccgatgtgcccgaattcgtcgcctccaccgaccagcagatcgcaacgttcaaggacttcacgcgccgcatggaacaggccggcattccgccggagatccgtcacctggccaacacggcggccactttggaccgcccggagattcacttcgaacttacccgccccggcatcggcctgtacggctacgagcccgatcccgcgatgggcaccccgcgcgactggcatctgaccccggccatgcgcctgcaggcgcagctcggcacggtcaaggatgtggaggccggccatggcatctcttatggccgcacctacctgaccccggacaacacctcgaccgctattgtgccgctgggctacgccgatggcatccaccgctccgcttccggtttcgatatggaaggtgccaagcacgtggagaagccgggcggcccggtgcgcatcatgaccactgaaggtccgaagctctaccgcgtgtgcggccgcgtgtgcatggaccagttcatcgtggacctgcacggatccgccgccgaactcggcgttcacgagggcgacacggtcgaactgttcggcccgggccgcggcgaggattacgttgagcctaccgccgacgattgggcccgcgccgccgacaccatcagctacgagatcttcacctgcctgcgcaaccgcatcccgcgcctttacgagcatgccgccgaagtactgcccgccgccgacctcgccaagctcgaccccgccacgctgctataaggtgcattaccgccatacggtggcaccccgtaatcccttcttcccgaatatgtgccgttgacatgtgctgagcgtcacatattcgggaaatcggccccaatctcccgaatatgtgccgttgagttgacgtcagtggcacatattcgggaagtcgggattactgcggccgatatgtgtgcctatgcttggaatatggaaacgactttggatggggaacaggtgctgagcgatgagggctacagcgccttcgacgaggagcggtgggcacccgagccgcccaaatccaagtcgcgcacggctttcgaacgcgatcgcgcgcgactgattcattcgtccgctttgcggcgtttgggcgcgaaaagccagattctgattgccggtaccgacgatttcgcccgcacccgactgacgcatacgctggaagtcgcccagatcggtcgccaaatcggcgcattgctcggctgtgatccggacgtggtcgactgcgcctgtctggcccacgaccttggtcacccgccgttcgggcacaacggggagcgtgcgctcgccgacatcgccagcaatatcggcggcttcgagggcaacgcacagaccatgcgtatcctgacccggctcgaacccaagatctttcacccggacgggcgttcggccggtgtgaacctgacccgtgcggccttggatgcggccgtcaaatacccgtggaccttggccgaagccgaccaacaccccaagggggagcggtcgaagaagttctgcgtctacccggatgacgaaccggtgttccgctggctcaaaatcggcgctccccaggccaccaagcccatggaatgccagatcatggacctttcggatgatgtcgcctactccgtgcatgatgtcgaggattccatcgccaccggcgcgttcgatccgattgtgctcgccgatccgaagatgctggaccacatcatcgagcagacgcgcgcatggtatggggcgaagtgggatgccgacaagctgctggccgcgttcatgcgattgcgccgagagcatttgttccctgcacatttcaatggttcgcgcgaatcgttggcacagctcaagaacatcacgtccgatttgatcggtcgcttctgctggtcggtggaaaccgccacgcgcgacacgtatgggcccgggccgttgacccggtattccgcgaacatcgtgattcccgaggacacgaattacgagatcgtggcgttgaagggcatcgccgtgtacttcgtcatggcgcctcgcgagcgcgagccattccatcaggaggagctcaagatcgtatcggatttggtcgatgtgcttatggccgattcgccgctcccatccgacgctttggaaagccagttcctggccgattggaatgaatccaccaatgacgacgagcgcctgcgcgtcgccatcgatcaggtcgcaagcctgaccgacaactccgctctggccctgcactccatcttgtgctgagggcgtgttggacgggtgcttccctcagtctcgctgcgcgagccagctcccctcgggtgaggggagctgtcgctgtaggcgactgaagggagtttcgcggaagaaatgataaccgacggtaaaaatttaccgtgtctcaggtgaagcggtactctagagacttatggtcggaatgattaagaaagaggatgtcgagaaggtgcgcgccgccgcggacctgtatgacattgtatctgcgaccgtaacgcttaagccctccggcaccggcaccttcgtgggcctgtgcccgttccacgacgagaaaaccggcagcttcaacgtgcgcccctcactcggcgtgtggcactgcttcggctgcggcttgggtggcgacgtattcaaatacgtcgaacaatccgaaaacatcgacttccgcgaagccgtggaactgctcgccgacaagtaccatatcgagctgcactacgagaacagcggcaacggcccgaaccgcgagaacaccggctccaagcgcacccgactgctggaagcctgcgaggaagcccaacgcttcttcgtctcccagatcctgaccaaggaagcactgcccgcccgcaagctgctcggaggccgcaacttctcccaagccgactgcgaacgtttcggttgcggctacgcgccccaaggttgggataatcttgtgcgccacttggcctccaaggggtttacgcagaaggaaatcctcgacgcgggcttggcccgccaaggccagcgcggcatctatgactatttccgcggccgcgtgacgtggcctatccgcgattcgaccggccgcacgctcggcttcggcgcgcgcaaactatacgaagacgatcagatcgccgccaaatacatcaacacgccggacacgcagctctaccgcaaaacccaggtgctttacggcatcgatttggcgaaatccgccatcgtcaagaagcgacaggtggtgatcgtcgaaggctatacggacgtgatggccatgcacttggccggcattgacaccgccatcgccacgtgcggtacggcgttcggcgccgagcacgccaagattgtgcgccgcctgatcgccgacgattcgctgggcgcggtccagctggtcgggccgttgaaggtcaaggaccagccgttgagctcgcgcatcgtgttcacgttcgatggtgacgccgccggccagaaagccgcgctgcatgccttcggccttgattcggccttcctctcccaaaccttcgtggccgtggccgacgacaatctcgacccgtgcgacctgcgcatcgaacggggcaacgaggcggtgcgctcgctgatcgcccgcgccaaaccgttgtatgacttcgtgatcgacgccgccatcggccggttcgacctgacctacacgcccggccaagtgggtgcgatgaaagccgtggccccgctggtggcgcagattcgcgaccgctccctatgggacgcttacgcgcgcaagtccgcgggccgtatcggcgtggatcttgaggtgatgcgccgcgaggtgatgaacgcgcgccggcagatgcatgtacgcgatgaggacgcctacgcgcccaaacgtcgattcgagcgtgacgagccgcgtgtggaacccggcaccaacccatacgccaatccggccacgcgcaaggcgttggagcgccgtgacgccgccgaacaggcatatttcaagatcgacgacgccgtattcatcgccgaacagcagttcatggccgtgctgattcaggtgccgcgcgccatcgaccgcaccatgttcgggcagctgaccatcgaccatttcatgacttcggtgttccgcaccctgttccaggcgatcgcggccgccggcggaccgccatccgacgataccccgcaggggctgtggatgcacaacctcaccaaggccggcgggccgatgctgaatcaggtgatcaacgagctggccgtcatgccgttgccactgcctggcgacgacaccggtagcggtgcgcagccggtgcaggccaacgtgtcgggaggaggtgttggcgtgaatggcggtgccgccgcagtacagctgcgtcctgccacgccggaggagcagcgctacgccactgagcttctcacccgattgttggacatgggcttcatgcgccagatcggtttggccaaacgccgcatggcccagctgcccgacggcgaagagaagataaccctcctcggccagatcacccgcatggaaaccgcccgtaaagacctccaagcccaaatctacggcaacaccgtcggctaatacctcccactgattgcgcgcatcttcgaatacgtgccggatgcataaggccatacaaccggttgccggattggatgggtgcagaagttgcggattggccccatccaaattggactggtttgggtggggccaatccaatccgttcaataatgaagcgcgataccaagcagcgtcgaacgaagggaaactcatgacgcagaatcgtgcggaactcaaccgtaatctggcccagatgctcaagggtggcgtgatcatggacgtcaccacgcccgaacaggcgaaaatcgcgcaggatgccggcgcgtgcgcggtgatggcgctggagcgcatccccgctgacattcgtgccgccggcggcgtctcccgtatgagcgatccggccatgatcaagggcattcaggaagctgtctcgattccggtcatggccaaggtgcgcatcggccacatcgccgaagcccgcattctgcaggccatcgacatcgactacatcgacgaatccgaagtgctttccccggccgacgacgtgtaccacatcgacaagaaccagttcgacgtgccgttcgtgtgcggcgcgaagaacctgggcgaggcgctgcgccgcatcgccgagggtgctgccatgattcgtaccaagggcgagcccggcaccggcgacgtgattcaggccgtgcgccacatgcgcaccatgaacaagcagatccgcgagctcgtggccttgcgcgacgacgaggtctacgaggccgccaagcagctggccgtgccctacgacctggccaagtacgtgcacgacaacggccgtctgcccgtcgtgaacttcgccgccggtggcgtggccaccccggccgacgccgccctgatgatggagctcggtgccgaaggcgtgttcgtgggctccggcatcttcaagtccggcgacccggccaagcgcgccgccgccatcgtcaaggccaccgccaactggcaggacgccgatctgctcgccaagctgtccgaaaacctcggcgaagccatggtcggcatcaacgaggacgagattcagaccatcatggccgctcgcggcgagtgagtgcattaccttggctcccctctttgaggggagccaagaaagggtgacgctcccgccagcgggagtcaaggcccaaggagacaacatggttgtagctgttgaatatatttccaaagaagagtccgcggacgtcgaaaacgtcaagcacggcgtgaccggcatcctggccgtacaaggcgcattcgccgaacatgcggcggtgctggacaagctcggtgcgccgtggaaactgctgcgcgcggccgaggatttcgatgaatccatcgaccgcgtgattctgcctggcggcgaatccactacacagggcaagctcctgcattcgaccggactgttcgagccgatcgccgcccacatcaaggcaggcaaaccggtattcggcacttgcgccggcatgattctgctggctaaaaagctcgacaatgacgacaatgtctactttggcgcgctcgacgccgtcgtacgccgcaacgcctatggtcgtcagctcggtagtttccaggccaccgccgattttggtgcagcggatgatccgcagcgtatcacggacttcccactggtattcatccgcggaccgtacgtggtgtcggtcggccctgaggccacggtcgaaaccgaagtcgatggccacgtggtgggcttgcgtcaaggcaatatcctggccaccgccttccacccggaactcacggacgatacccgcatccacgagctcttcctgtcgctgtagtcgattcgtctgccgctagactggtatccgactgacgaatcaaggagacgatctgccatgcagcttgagctgaatcgacgcagcaaggtgccgatgtaccggcagctggctgccgagctgcgtgaacagatcgtctccggcgcgatggccgagggctaccgcctgcctcccgaacgcgagctgtcctcgcgtctcgaagtcaatcgcaccacggtgttgcaggcgtatcagcagctcaaggacgaaggtcttatctcctccaaagtcggcaaaggcacgttcgtgctgccggctgcctccgcaagccgaacaccgcacacgtcaaacagtgacttcgggaatgcgataacgcgaacaacacgatcgtcggcagaaatgggaacatcgcaagcctcctcttccggcgacgtagaacgtgctacctccactggtttcttgacgacggaccggggcagcagctctgcggcggtccatacgattcgtgaaagccgctcggttcagggcccggagccaaccgtcgtgcgtccgccatggtcggtgttgttctctgattattccaaccggtttacctaccatgacatcgcctcggccgagcgggcgcagcgcggcgacaccattattgatttcgccaccggttcgccgaacccggcggatatcccggacgatctgctgcgcaaggtgagcatcgaggcgttcgaatcgcgggaattcgacggccaaccggaatcacctatcgagggattcgaagagttgcgtgcgctgcttgccgaacatatgcgcgcacgaggcgtacaatgcggcgtccgcaacgtgatggtgctctccggctccgagcagggcatcgacctcatcgtgcgcgcgttcatcaaccccggcgactgcgtgctggtcgaacaatccacgttcttcccggcattgcagaccttccgctcggcggatgcgcgcatcatcggcgttccagtggacgagcacggtatgcgtacagacctgttggatgggtattgcgcgcgattccggcccaagctcatctacaccgtcccgacattccaaaaccccaccggtaccacgctgccgcccgaacgacgcagcgaactcatcgacgtggcgcggcgctatcagtgtctgatcgtggaagacgatgcttacggcgatttgtggtacggcggggaatcgtccgacgcacatcgccccataccgcttaagggcatggagaatgcgggatacgtgatgtatttgtcgacgttctcgaaaaccgtcacttcgggcctgcgcacgggatgggttgtggccgacccgcatgtgatcaaccggctggcggctctgcggcgcatggtcgaccagcatacgagcacgtcatcgcagcgcatctgcctggaactgcttaaagaaggccgcatcgccgaacatttgcgcggtttgatcaagacttaccgcattcgacgagatgcagcaatcgcagcattggagcggtatgcgccggatgaagtgtattggaccgtgcctgcaggcggctactatatttgggtttccttaccggacggcgtgcgctctctggatgtattggaatcctgccgttcccaaggcgtcacgttcatgccgggcagcgtgttcgacgttgacgaaatggatgattcccatattcgtctcaactttgtgcgcccggatgctgctgacattgataccggcattcgaatcattggcgagacgatagcacagatgtagccaagtgactggctcattgcggttgtcgagttttttgatggctgcatacccacatcgatgggtgcattcgacgaatgaataagcgaggaagccatcatcagttcgctgtggcatgcgcatagcgttgtcgggcgagcggggcagaccacgtggtcgttgcgtgatctggccgatcgagccggcatcgcattgcccctggcgtagtggcgaggtggcgcagtaacgagtcatgccatcgcgagccgatgatgcgaaatacggaaccggtcgcggccatcaacgggtatcatacatgcgggagcaacgatacgttggcgtcagcacatccatctgactccagaaagggacacgatatgaccacatcctccgtttcgccggtgaccactgaactggcgggcagcgaaaccggcatcacgtttatcattcacgccggagcgggcagtcgtggcaagcacagcacgcctgaacgcatcgcccaggtcgaacttgatctgcagcgcgccctcgatgccggataccagttgttggaatccggagcaccggcgcatgaggctgtggtcgccgccatccacgtcatggaagacgctcccgaattcaacgccggccgtggtgccgccctgaccagcgatggcatcgcccagatggacgcctgcctgatgaccggcgatggcgaggtcggtgcggtcaccggcgtaagcaccgtgaagaacccgatcgatgcggcgcgtgccgtcaaagagcagaccaagcatgtgctgttcgcggacccgaccgatgccgagatcgccgattggggcgtcgcgaccgaagacaacgaatacttcatcaccgaacagcgtcgtcagtccttggccgaggctcagtccggcggcgatgagtgggagaagcatggcaccatcggcgccgtggcgcgcgatgccgaaggcaatatcgccgccggcacgtccactggcggcatcaccaaccagatgcacggtcgtgtgggcgattcgccgctgcccggttgcggcacgttcgccaaccagtccacggtggcggtgtcctgcaccggcatcggcgaggcgttcatcaaggtggtcgccgcccatcaggtgtcggatcgtgtgcgtttcgccggcgagaacgtcgaggatgccgcgacggccactttggacgaagtcgccgcgcatcatggcgatggtggcatgatcgttctgccggcggtcggccgtggcgtggtcgcctacaacagcgagatgatgaacttcggataccgtagcgcgcaaggaggtaaggtgcagggctgattgccccctgtattgcggcatatatcataatggccggtgtgctgcggattcttggtaaggaatccgcagcacaccggccattcatgtatgcggcaagtgccgccgatcagtgcggcggtgcgcgctacttggtgatcgtgttgtacgtgggcatgttcgtgtaatcgaactgcacgttcttcacgttctgtgcagacacggcggcgaaacgtttgaccgggaatactggggtaatacgcaacttcatcgctcctcttcctcgaatgaaactatgttccattggtttgagccagccacgtacggtattcgtgtctggcctgccacacaatgatgcagccgtatatacgggcacagcattgcgcggcagttcattgtatggaagacatgcaaactcaatgttttcttgtccaaataaaaaaacgagcgcggctgatgtgcggcaccggtccaaaaactcatgtccgccagcgcaacgcgactacgtaccttatgccggtctgcgcgtagaatagaacggctgcgatattgggttattcacggaggaatggatgcgacgctggctgatcaatgtagccaaaaatgagacgattctcatcgtcgccgcaatactcgccctgatttcgtgtttcattgtgccgccggacgccgattacaaaagctacattcacgccagcaccatcagccagctcatctgcctgatgattgtggtgtgcggattccagcgtatcggcgtgttccgcatcatcggttcgcgattgctggagaaggtcagcaccatgcgcggactggtcattacgcttgtcgctttgacgttcttttccgcgatgttcatcaccaatgacgttgcgctggtcacgtttgtgccgttcgcggtggccgtgctcatcatggctgggcaagaggataagaccatcctcgtggtcacgctgatgaccattggcgcgaacgtgggcagtatgctcaccccgatcggcaacgcgcacaacctgtatctcaaagccctgaccggcatgccgaccatggaattcctcggcatcatggcaccgtattccggcacggcggccgtgttgctggtcatcgtgatttccgtggtgtttggcggcaaaccggtcggcgacctgggcgacctcgaaaccggcgtgctggctcccgagcgcaacaaacaccagcccgacgagattcgtatcaccggctacggcgccggttatggcggctggcgcaccatcgtctactcgctgctgttcatcgtctgcctactggccgtctccgacgtgattcccctgtgggcgatgtgcgtgatcgtggtcgtcgtgttcctgttcaccgatcggcgcgtattcaaatacgtggattggggactgccgctcaccttctgcatgttcttcatcttcatcggcaacatgaagcgcgtgcccgaattctacgaactggcgcgctcgctggtcggcggccatccgctggaggtggcggtcggctccagccaggtcatcagcaatgtgcccaccacgattctgctttccggcttctgcgaccaatggcgcgatctgatcattggcaccaatttgggcggcatgggtacgctcatcgcctcgatggcctcgcttatttcttacaagaacgtcgtgcgccaatacccgcacaagaaaggccggtatctggccgtctactccgccgtcaacgttctgtttttggccgtattgctgaccttgagctggatcatcgagccgagtctctgagccgccgttgtgggttgggccggtctaccgcgcgtatacggtgggggagccggtcagtcggctcatggccgactgcgggatgtcatgaatgcggccgatggtggcatccagcgtggatacgccggatacgccgtctgtgttggctgtggtggatgcagaggtgatgctggatacgccgactgcggacgatgatacggccgcaaccatcggctgacgataggcgttggagttgcgggccagccgggcgagcgcagggcgctgcctgcggaacagattgataaacataccgcatactccttcatcgttggccggcggtcttctggccgccgtggtttccatcctgccctcccgtgcttgtattcgctatgggggatagcccctattattccctgaatctgcacgattccccctcatccttgagggtgattctaacggcaaaggaatcggcctaatggccgatgccaatcagcgcgaagccaccagcgtgacgctgtacggcttgatcttcatcgccagcaatgaagacggcgacggcaatgtgtaagcccgacgttccggcacaatcgcccccgaagcctcgccgcggtatccgatagtggttttcgccgtcggactggcgcttaacgtcgtcacctccaaacgcaccggtcgcgatggcgaggcgcccagcccggccagtccgcgcgcgatttccaacgtcacatccaccggggaatcggaggtattgacgattttgatgtaacggcaggcgtcatccccgtcatgcccggtggcactgacatacagatgtttggcggggcgtgacgcggtctgctcgatggacacggcatatgtcgtgtcgcccagatgcgtggaaaacagccgctccacctcataattcaccgtggggttcacatgcgccggattgagttcgataagattctgcgcccaccccttagccgggatatgcgcgagcagcggtgcataggaggtcatgcgcaccacgtcggaattgcgctcgcaaccggtcaggaacgcggcctcgccgagtgccgacttccacgtgttcgcgccctgttcagtctgtggttggccggcaaaatagccgttggctgaatattcgccgaaatagacgccggcgccgcaacgcgggtaagcgtcgaatcgtgacgcttggtatgcaaaccattcgggggagtggtaagaatgttcgtcgacgataatcgcgtcaccggtggcggaatcatgtgccccggaatcggttgcggccaacgctcgcgcatggtcccagctgcgtttcatcgtcggctggaaggggaacagtccggcgctcatcacacacagcatatccgggtatcgttcgtgaatggcctcgctgatcatgtcaaacttggccacgtagtcagccccgaagttttcgttgcccacgccgatcatgtccaggccgaacggttctggatggcccatatcgcgccggaccgcggcccacgagctggactccggatcgccattcgcgaattcgatgaggtccaggtagtcctgaatcacattgttgcggaaagtggccgaattgatatccatgtggcgcggatcgcggccgggcgactggcatgcgatgccggcgaacagagtgggcagcggcttggccttgaggtcctcgcacaggcagaaatactcgtagaagccgatctgatagctctgcgaatagctggaaccatccggcatcttgaacgaccacatcgaatactgttggcgtcgcgcggccagggagccgacggtatccttccagcgatattcattgccgggcgtcacaccttcgacgatgcagccgccggggaatcgcagaaacgctggatgcaacgcctgaatggtttccaccagatcgcggcgcagcttgccgtaacgccatttcgggtcgcccgcgccccaatagtccgcatccatgaactgcaccagatccagatcgaacgtggtgcgttcgccggcgtcaatggtgatacgcagcttgccgtaatcggtgttcaggccggttacgtcggcgttgaaccggtaccagccgtcacggccgatggcgatggcaccatccgacgaatccggactgatcgaaacgccggaatcctgcgcattggcaccatcgtcctgcctcagaccggtctcttccgtatcgtcaagcggatctgcgtccacgatatacgacaatcgagtggtgctggtgagcggcagaccgtacctatcgaccacgccgacggacagcttcgcccgcccatgaaccggacgtaccgcgagactgacggaataggtgtggtcggcgacgatggagaacgcgggctcgcccccgttgtcgccgcctccgttatagccgaggttttccagatatgcagggccggtttcggaaggaacatcggacgtgatgcgagcgtatcggctatgtgcgtgaattggcggggcggggcagtcggtggtcacccgctggccgtgaatcccgcgtatctcactgccgaggctggcggcggaacagttgatgaaatcccagaaacgcagggaatcggcctgtgtacgccatcgttcggcgccggccatacgccacgtgtgatggtcgagatagacgccgtcaaaactgtagttgttcaccatgttggcgttcagcccgccatccgcaccatggttgatgtcctcgaagaacacgccgtacagccgcccgcttgtgtgatgggtggggcttcccacgctaatccgcaccatggttttgattgtagagggaatggagcggaaaggtaaacggaagagttcgctcaccgttcatgttgcggtcaatccaagtcgactgttcgccggtatacagccggtaccctcgaaacaggaatggaaaatacggacgactaggagcgcggctgtgcaatcctcggtgggaatacgtgagcgcatcgaccacgtgtatccgtcgctgcgtccggcggagcgcgccgtggcccagtatattcgggatcatatcgaggaggcggccgacctgaccgtcggccagatggccgacatcgcccacgtcagccagccgacggtgattcgtttcgcccgcaagctcggtttcggcggttaccgtgaactgcggtacgtgttgcgccatccggccgccgagcacaaagtgaccttcaatccgttggctggattcgatctgaatccgtgggatggcgaagatgagattcccggcaaagcggcctatggcgcgaaggcgctgatcgatgagctgcacagtgcgttggaccccaaggcctatcgcaaggcggtcgccctactcgccgaatcggagttcatcgatattttcggcgtggagaactcgttgacaccggcgatggatctgttcaccaagctcggctacctgggactgacatgccgtctcaataccgacgcttacctgcagcagatcggtgccgggcacttgacccgcggcgctgtggccgtcgccttctctcattcgggcagttcggcggatacggtcaaagcgttgcgattggcgaaatcgcatggtgcgaaaaccatcgccattaccaatgccatcggcgcgccgctggccagctgggccgacgtgacgttgctgacgggtcgtgactcgcatacgatttatggcaatgcgattttttcgtgcgtggccgataccgcgctcgtggacatgctgtacatgggcgtgattctgtccgactacggccggttctccaccgcgctcgacgaatccggtcgcatgattcgcgatcgcgtattcgagaactgagctgctgctttatcgcgccttgggctgtattgctctggtcgttgctgcttgggttgttgacgatttggtcgttgtcgccctggtcgctaccgtcctgaggcatgtgccagcgaatacgtagtggacttggcgtgtgtatgacgttcgatcttgccgctcaactccagctggtccaagagctgcgtcatctgatccttgttcaggccaagcgctttctgcatggttttacggctgagcttcacgccgcggaacgcgaggaaattgagcgtgaactgctccaacgtttgaggcgacggttccagcgtcgccgtatcgagcgggcgggtactgacctggtcgtcaccgtccgggcgctcgccgaatccgctgccgagaatcagcgtctgcaatggcgcgcagccgatgatgcgtgcgccggccaaagcatctgcggcgttatccgtcatgcgctgaatcgtggggaatgaatacattttggcgcgctgcgcttcgtcagtggtgctgggcgcggcggaagcatcggtatcggtccgatgcaaggatgcggcctcggccgagaccgggatgggcagcaccatcgccaccgaagtggggcccacgcgcagttgcggactgaccgcgctctgcgcgtaggcgtccataatgcgttgaataccggtaccgcagttctcgcagaggcccaaatcggcgaacaattcagccaaacgcggggtgcgtggctggcatacgccgttgagcagatcgttgatttccaaaccatcggtcaggccgccgagcgagacgatttccaggcgggaatcgaagatattgatcagtgtggggccggagtacgtgtaatcgcgatgttccagtgcgttgaccaatgcttcgcgcagggctatggccgggtattggccggattcgttgataccgttcagcagggcgctggcttggtcgagctggcgcagcaccgagccggtgaatgtgtgacgttcgcgaatggcgtttttgccattgccctcgaaaatggtggccttgataacgaacgggcattggttggacagcagggtggcaagcgacgattcggtggcgctggtgaaggtgttgttggcgccggtgttggtgatgctgccggcgggggcattgccggcatcggcagagacggatgcagccatgttggtcacaaccgggctttcccaatccctgccttcactggcaaaacgaccctgtgcgtatgtgaaagtgagctcaccactatcgcctgcgacggtctggcccgatgcggcgtgatctacgttgctctccgttgtccccatatcgccgatggtaccggtgcaagccgacgttacgccgaggtgttttacacccctacggctagacttacacgagtttggccccgtagctcagctggatagagcatgtgacttctaatctcaaggtcgacggttcgagcccgtccggggtcacgatgcaataaacccttggtccctcatcgtctgtgggggccaggggcttttgagtattatgccggtctgggtccgtctggagcctgaactgtcgaccttgagattagaagtcacatgctcatcatcaccatccgggaacacccttaaggggtgcggctcctgcataacggctatactctgacttgagatgtgctggataataaccagctatcgcgcgtccgccaatggcgacgaacgaaggaagaagggcccgtgccgcgagcaatcatcgaggtaagaaacctacgcaaggaataccccgtcgaggatgagacggtggtggcgcttgaccgtgtcaatctcagtatcccgcaaggccagatctgctgcattttcggcgaatccggctccggcaaatccacgctgctcaaccagttggccggcatggaaaaaccgacgcgcggcggcgtgcgcatcggcggcgtacccgtcagcaaactcgacgagcgtgagctggcggccttccgccagaagcatctcggcttcgtattccagtcgtacaacctgctacccaatctgaccgcgctcgaaaacgtggcaatgccgctgatgttccgcggagtgcccaaggaacagcgcgagcgcgcggcgcgtggcgtactcaaacgagtcgggctcggccatcgtctcagccattacccgcgccagatgtcgggcggccaacagcagcgcgtcggcatcgcccgggcgtttgtgaccaagcccgaggtggtgttcgccgatgagccgaccggcaaccttgactccaaaaccaaaaccgaggtcatgacgatgatctgcgcattcgcccatgacttcaaccagaccatcgtgctggtcacacacgatccgcagatggcctcatacgccgaccgcattgtcaccttgctcgatggccgcatcaccagcgatcggctcaacaccgacctttcccacccaactgttccgtccacgccgtccgccccaactacaccgtccacgccgtccgcccatagaacccaaggaactgaccgatgaagcacctctcccaccacaccatcgccatcatcgtcgcgttgctctccacgctgtcactggcacttgccgtcatctcccttccgcatcaggcgtacgcggtcgacggcacagacggcacaagcggcacgaacagtacgtctcagggaagcgacggcgattccgcgccgatcgccggaccggtgcccaacatcatcatcaccaacttcgcgtatggaggtgattccgtggccgccggatccaaattcaatctcgacttcaccttccagaacaaggggcaggtggcggtgacgaacatggtcgtcaccgtggacggcggcgagagcttcgccatcgcgggaggcacgaacacgttctacgtcgacgcgctgtgggccggttacgccatgacgcaaagcgtgccgatgcaggcgctcgcctccgcgaaaagcggtgcccagtccgtgaccgtgaacttccgatacgagtatgtggacgccagcgcccgctcctcaagccagtctgacgtcaagatttccgtgccgatcagtcagcctgaccggttcgaaatcagtgatcccgtagtgcccgaccaggtgatcgccggccaggaaaacacggtcacgatggaatatgtgaacaagggcaaaggcgatatcgccaacgtcgaggccacgatggagggcgaaggtttcgatgccacgatgaaaacccagtacgtgggcaatgtggcttccggcgccaccggcacgattggttacgccttcacaccgcacgcgtcaggcgagctgaagaccacgctcaaagtcacgtacgaggattccgacggacagaccaagaccaaggaattcccgctcaccatacccgtaaccgatatgcagccgatggatgattccggcatggccgatccgaacatggaccagaacgccaatcagggattgccggtgctggtgtatgtggtcatcgtcgtgatcgccgtggtcattatcgtggtgattgtgctgctcgtgcgtcgcaggcgcaagcagaaggccaagaagaacgatattgatgaggactgggatgattggtccgaaggcaaggatgataagaccgataccggcgtgacggatggtgctgcggcagacaccgctcctatcacaccagtcaccccagcctcatcagtcgcaccagccggctcatcccacaaggcctgaaaggcccgaccatgcgattcggcgacatactgcggctctgcagacaaaacctatggcggcgtaaatcccgtacgattctgaccgtgctgggcgttatcgtcggctgctgctcgattgtgctcatggtctctttgggccaaggcattaacgagcagaacgagaagatgctcaaatcgatgggcgatctgtccatcgtcaccgtgtacaccaacggttatgccggtccgatggacgatggcggctcgtccaagatgggcgataccaagctcgacgacaaggccgtggaatccttccgcgcgatgagcggcgtatccggcgtgacgccgatgatgaacttcccttataacgtgacggccagagcaggcgcgggcggccgttacatctatgattacgtgcagatcatgggcatcgacatgacccagctcgaccagatgggctacaagctcgtcggtggcgagaaaccggtcaaaaaagaccaggtgcttgccggcgaatggttcgcctatggtttcatggacaccctgaagaacggcgaacaacgcaccagcacacgtggcggtcagtattcctcatgcacgtttaaccaggccaccggccagtgcgaggaagatcaggacgaagatccgttcttcgacccgctcgccacgcaaatcagtctgaccaccggcaccaattatcagggcgaccagtacagcatgaacatgtacggcggcggtggcggcggcacaggcggcgcgggcggcggtggcggcgcgggcggcgcaagcggcagcgccgcgggtcagtcggaaaacgtcaccctcgatgtgcgggcttccggcattgtggcgggcgactacaacaagggctatgccacctccgacggtctggtcatggatttgcaggcgttgaaggaactggccgccaaagtcgatccagccgccgccaaaaaagccaccgcctatgatcaagtgctggtcaaggccgccgacctcaagtccgtgcccgaagtcgaatcacagatcaaagcgttgggctacgagacctcctcctatgaagacatgcgtaagtcgttggaagaacagtcgcgcgcgattcagctgattctgggcggtatcggtgcggtttcgctgttggttgcggccatcggcatcgccaacacaatggttatgtccgtaaccgagcgcacgcgcgagatcggcattatgaaggcgcttggctgctacgttcgtgacattcgcgtcatgtttcttgcggaggccggcgcgatcggattcttcggcggattgatcggctgtgtgctgagcggactgatatcgctgggcatcaacgttgtcggcgcgttgtatgcgggcggcatgagcggcggcatgtctggcggtatggtcagcggtgccggcgggggctccggcgacggtaccggtggcggaacatctatctggaccatactctggcaggcgatagttggtggcgagaatgtgacccgttattcggtgattccgtggtggctgttcctgttcgccgtgctgttttccacgctgatcggcttgctattcggcttcggcccggccaataaagccgttaaaatcccggccctagacgccatcaaaaacaacgagtgatcgcctctgtcacctgctccaccgttagtccataacgttcgttcagttcgcccagcgacacgcggtcggtaaattccttggctgcgccgaagttcagcacacgaggattacggctgccgtccgagacatgatgattcgcatagtatgcggtcactttctcgccccagccgccttcaagctgcccgtcttcaagggtgatgacctgctggtggccatcacgcaacgactccagtacgtctgaatccagcgacgtgcactggcgcgggtcgataaccgttgccgtgatgccataatcgtcagacaatgcggcggccgtctgctccgccaacggatacgcattgcccagtccgatgatcgcgacttgcgagcccgtctgattgacccgccaatccagcatgggacgcgcaccggcatgctgagccgttacgctaacggtcccgcggactgttgcggcagatatgcccccgctggcggagctggcggaggctggcagcgaagctgactgggggcggtcagcaatctgcccacccgtcaccggcagcagcgtcgcatcccgttccgccgccagaatcgcctcgcccggcacccgaatcaccgccggaccagcaggggcgtccgccgaaccggccggcgcggtagcccatgccaaatcagccagatagtcgcgagccgaagtcggcaccagcatcgtgacccctggaatattggagaacatcgtcacgtcatatgcgccggaatgcgtattgtccgaaccggacaagccgcccagaaaatcaagtaccgtgactcgcgaacggttcaggctcatctcctggaagaactggtcgtacgcgcgctggaagaaggacgccgtggtggccaccaccggcgtgccacccgcccgtgcgatgccggcggcgtacgccacggcatgcgattcggtgatgcccgtgtctacataatgtgcgcccgcgcgctctcggaactcatgggtgatgccgttcgagcccggcgtggcgggggagatgaccacgagtcctggctcggcggcgaaacgcggttcgagcgcggccatcgccattttgccgtaatgcttgcgcggatcgtccggcttgccgattgcggcatccggattctgccaatgcgaggcctcgcactggccttcatgtggttcgtgatcggacaggttgcagtgatccgaatgccacggctcgctgtggttcacgttatcggtggggtgcacgccggtgggggagtcgagtgagaccggtaaggtcgaggcgttttgttgattggcgtgagtctcctcactgtcatatcccgcgcccttcagcgtgtggatatggaccaccaccggatggtcgatatcgcgcacttcctcgaaagccgcgaccagcgcggaaacatcgttgccggccgccacataccgataatccaagccaaacgcgttgaacagattcggctgggcggtgccgccggacgcgcgcaggcgggcgagcggaccgtacatgccaccgaaatcgccggcaatcgacatctcattgtcgttgaacacaatgatgagattgccgccctgctcagccgcgttgttcagtccttcaaacgccacgcccgaactcagcgaaccgtcgccgatcacggcgatcacattgccgatgccgctgttcgggccttccatatcgcgggttttcgccaaaccgcaagccagtgaaatcgaggtaccggtgtggccgagcacgaactggtcgtgtttgctttcatccggattggtgaagccagtcacctcactgaaacggtccgggtccagataggcgtcggcgcggcccgtgagcatcttatgcacgtagctttggtgggacacgtcgaacacgatacggtcgcacggcgagtcgaatacgcgatgcagggccaccgtggcctccaccatgcccagattggagccgatatgaccgccgtgttggtggccatatgccagcagcgtggcgcgaatctcacggcagagttcggcgagctcgtcgggggcaagggccttgacatcggccgggctggcaatgcggctcagcagatgggagtcgtcgccatgggaaggggtaatgctcggggggatgtcgtgaaggcgcgcggtcccctcggcggcaccggagacggcgaaggaatcgcttgaatcaaatccgtttcctgacgcgttgcgcataccctcgaatctcccttcgctagtctttccgaagttgaatgctaacgcccggcattgtccgaggtccacatgacgaatcaatgcccccaacatctccgtaaatgggtgattcgttcgctgcgcgatgtgggacaatgaatgcggtaattccttttgataccaaggagcgcgcaatgaaggccgtatacgcatccaccgtcaaccatgacgatccgcttgccgcgttggcggtgggcgagcagcccgaaccccaggcccgcccgttctggtcgaccgtttcggtgcgtgcggtgaccgtaaaccatcacgacgtctggtcgctacagggtgtgggtctcgccgccgaacagacgccgatgatcctgggcaccgatgccgtgggcattctggacgaggacatccccggcaagcatgggctcaaggccggcagcgaagtggtgctgtacacgttcgtcggcaccgatagggcgggcgtggccccgggcgagcgccgtacgatcctctccgagaaataccccggcacgatggccgaaaagactgccgtgccgtccgccaacgtgttcgccaagcccgcaaacctcaccacggccgaggcggccgcactcggcaccagctggctgaccgcctactcgctgttgttcgatgccgccggcatcaagccgggcgactccgtgctcattcagggcgcgggcggcggcgtgtccactgcggccatccagctcgcctatgccgccggtctggaggtgttcgtcacctcacgcgacgcggacaagcgcgccaaagcgctgaaactcggcgcgcaggccgcgctggagaccggtgcgcggttgccgcgcaaggtcgatgcggtgatcgaatccgtgggtgcggctacctggagccattcaatgaaatccgtgcgccccggcggcaccatcgccatctgcggcgccaccaccggcgaccagcccggtgccgaactgacccggttgttcttccaggacatccgcgtgcagggctgcacgatgggttcgcgcgaggatttcgcacgattgctgcgcttcgtggagcacgccgacctgcatccggtgatcgattccgtggtcagcgggttggaccgcgcccccgaggcgttcgccagaatgatcgccggcgacatgttcggcaagatcgttattgagctgtaagcctcacagaattatgtattgagaacgattcgctgcgtggcttaactccgctatcaggagtacagtgggccttattctcaataactagggagtaaatgataatggcaaatgaatccaagcccgaagtcgcagtggtcatgggatcctccagcgactgggagaccatgaagcgcgcctgcgatattctcgaccagttcggcgtcgcctaccacaagcaggtcatctccgcgcaccgcacgcccgagctcatggccgagttcgcgcacaacgcccgcgccaatggcctgaaggtcattatcgccggtgccggcggtgccgcccacctgccgggcatgatcgccgcgcagaccacactgcccgtaatcggcgtgcccgtgcgctcccacgccctgtccggctgggattcgctgctgtccatcgtgcagatgcccggcggcattccggtggccaccaccgccgtcggcaactccggtgccaccaacgccggcctgctcgccgtgcagatgctctccgccttcgagcccgaactggccgacaagcttgaggattaccgtaacgaactgaaagaaaaggtggctgaatccaatgcccagcttgtctgaggaaacaggcggtcgtgtttcgatgctgatgccgggatcgaccatcggcatcatcggcggcggccagctcggccgcatgatggctttgtccgcccgctacatgggcttccgcgtcggcgtgcttgacccgacgccgaactgcccgaccggtcaggtggccgacttccagatcaccgccgaatacgatgacaaaaccgccatccatgatctggccgtgcagtccgacgtgctcacctacgagttcgagaacgtggacgccgatgccatcgacgaggtgcgcggcatcaccgccaccccgcagggcaccgacttgctgcgcgtgacccagcaccgcgtgcacgagaagcggttcatcaacgaccacggcaccgccaccgcaccgtggcgcgccgtcaacaacttcgatgagcttgacgccgccctcgacgagatccattatccggccgtgctgaagaccgtgtccggcggctacgacggccacggtcagctcgtgctgcgttccgacgccgacttggagaagatccgctcccgttccgaccgtggtggcggcttcccgccgagcatcctggaaggcttcgtcgacttcgcattcgaggcttcgatcctggtctccggcaacggcaaggacttcgtcaccttccccatcgtgcgtaacgagcaccgcaacaacatcctgcacatgaccatcgcccccgccgaagtgtccgaacatgtggctcgcgaagcgcatgaactggcgattcgcttggccaagggcttcgaactggctggcacgctggccatcgaactgttcatcaccaaggacgatcaggtcatcgtcaacgagctcgccccgcgcccgcacaactccggccactacaccatcgaggcctgctcgatggaccagttcgacgcccacatccgcggcatcgccggctggcccatgcccaagcccaagctgctctcgccggccgtgatggtcaacgtactcggccagcatgtggagccgacgcgcacgctgatcgccacccacccggagtggaatgtgcacgactacggcaaggccgaagtgcgccacgaccgcaagatgggccacatcaccgtgctcaccgacaaccctgatgccacggttgctgaccttgaggccaccggctgctgggacgacctgaaaaagaaggcgtgaccttatcgatggttgaacatatcgaacgccagaccaagcagaaggacgcgattcgcgccgccttggccgactgtgaggagttcatctccgctcaggacctgcaccgcaggctggaggacgaaggctcgaaaatcggcttggccaccgtgtaccgccagctcaacgccttggccgatgccggtgccgccgacacgatccgcctggacggccagcagctgttccgcctatgcggcgacgacggacatcaccaccacttggtgtgcaagcggtgcggcaaaaccgtggaaatcgacccgcccagcgaggcttggctgcgcaaagtggccgacggccacggcttcaccgtcgaatcccacaccctggaggtcttcggactatgccctgattgccaaaaggagcagaaagcgcagaaggctcagaaagcagtgagcgaataattgaatgggatcggcttcaaagccgatcccatttgctattccgctgctattccaccgacttcagggcgccgagcatgtcgaccgtcttcaaccgccggtagaccagcacgccgagtccgccgagcaccttgatggtcggcagttcgcggatacgttcggagacgttgagattcgtcagattgtaaagaatcaccacggccagcagcccggccacgagaatcggcacttccatgatctgatccggcgagtcgacgattgtggccacctgtttcttcgaggtcatgttctgcacaatgcccttcacgccgtccaacttcatgagtttggcgctacgcgactccacattggggtctcatggttcttgagcctcaccatataggcgttcgactggtactgttcgccgaacacgtgcttatagccacccgaagtcatgaacatgaaatgcccgatatgcatttcggtgatgccgtccacgcgcaccttgcgctcggtaccgctcgaatcggtgacggtaatcgtgtcgcctaccttggcgtccatcatccccgccatacgttcggagatgatcgcaccacggtcggtgagcacctgcggcttgtgcccggtgcgcgaacgcagggtgatgtagtcgccgaaattgtaggcgtcatcagtggcgatcagggtaatcgactgtttgtcgttctccttgccggccactttcgacatctcctcgtagtagatcggcgcggactcggagacggccccgcccctcatcgccttggccacttcggcgcgctgcgaataatgttttcgtcagctttggtcaggccataatcgctgatgacggttatgccagcgagattgttctgattaaagaagtcggtgccggttatttgcatgtccgggccggtgacgaacaggcctacgagcgcaaaggagccaagcgtcatcaggctcacgatggaggcgaatcgacccttggatttggccatggtgacgcgggtgtctttccatagcatgcgcttatggaatgacccgttgcgtcggcggttgcgcttggccttgtgcgcgtggggcgttctgccgggcgcggtataggagtcgtttgctgaatttgcggcggaatcggctgcggagtcggtcgcgggcgtaaggttggtcgtttcggtgaaatcattgagatcggtcatactgcttaccactccagatccttgatatccatcgggtgctcgttcacttcgatcgatttgacgcgcgcgtcatgcatgtggatcacgcggtcggcaatcggcgcgatggcggaattgtgcgtcacaatgaccacggtcgcacccttcttacggctctgatcctgcagaatctgcagcacctgcttgccggtgttgtagtccagagcgccagtcggctcgtcgcacagcagaatcttcgggttcgtggccaccgctcgggcgatggccgcgcgccgctgtccgccgcccgaaagctgcgcggggaagttgttgatacggtcctgaagccccacgtcgataagcgcttgggtcggttcctgcgcgtctttcatgattttggaggcgagctccacgttctccttggccgtgaggttggccaccagattgtaggactggaacacgaagccgaggcgttgcgctatgtcaagcgtgagtatgcgttcttcgacgcactgtcccgttcgggcaacgatatgcagatgtatgaccgggtcaaggatgtgttgaagcagatgctgcttgggcaggcggcccgtgtgggtgccgagctgagctacggcggcattccgcgcgcctatgcgctggaaattctggtctccgccgtctcatcgattatctggctatgggtccggcgcggctgcaaggaggcgcccgagcaaatctgcgccatcatcgagaaaaacaaaaccaccgcgcccgtagacatcatacggtaagcgcggtggttcgtgtcggaatctggctcccctccctgagaggagtcaatccgcaggagaaatcggaaacctaaaactcagacagccagctcggccttgagttccttgaggtcggccaggatctcatcgtggtacttctcgttggtgtcgaaggcaaggtggcagaaggcgcactcgtggccttcgcggttctcgtggcaagcgtgcaggcaagccttgcccccgcactcttcggtgtggttgtgctcgcagccggtgtcgtcgcagcagtcgccggtgaagcagcagccgcagcggccacaggcggccacgccgtgctcgtgcttggtggcgtcgaacttggccagcgtgtccttgcagacggcgaaggtgccctcttcggtaacgatctcgtaagcatgctcatcgatggtcttgatagtcattgttgttcctttcagcgtttgttcgtctgcgactgtagggcggcagacggcagcggcgaaagttggtgaaagtgattatcaggcccattgctgctattaagagcaatgagacctcatgcagttttgtgtcggtaacgggccgattgttggccgagtgtcgacgcctggtataggtggtggcggtaccaatccaaatattggtggaacgacgacgatgagcgtgtctggcgtcggtgctgcgccaagcgttggcaatctaacgatgcgagtggagcttatatcgtcgctattgcgccaaggattggaagggcaccgatgctgaaggccagtagcgtcgggactgcgccattatttgttcgagcgccgacggccagtatcgtctggcgtcgtcagtggtccatcctttggtgaggtgccgacgctgagaggcggttcgatggcatgcttcgccgcacacttggggcacaggtcgaaaatctccagttcgtgggcgatggtctggtacttcaactgcttggtggctttgtcgatccactgctcaagtccgggaatctcgatttcgatggtccgcccgcattcgtggcatacgatgtgatggtggtgatgctggtccgagcactcgcggtagagggcctcgctgttgacgtggattacgtcgagctcgccttgggaggccatcatctgcacattgcggtaggcggtggccgtgccgatgcgcgtgccgcgctcgcgcaggatgtcggtgatttcctgggccgtggcgaatcgggatagttccgccaggacctgggtgatgaggagtcggggtcgcgtcacgcgccgagtggtcgcggtttgctcgatgctcatgacgttctgcccctttctgttaacaaatgatattcattatcgttattaaagcaaatcagatgcccggcatgttgtcacatgatttgaatcaactggcagaaatcccgcgtttcaacgaggcctgcgcgggatttctgccagttttgagccctataaaggcagagcccccgcgtacctttcgttgtaacgcgggatttctgccgatatggggcgagtcatggcgcagcgcagtgctttccatttcgggagacgcgtcatttactgccagtagaagtagccggtcggggcggctgcggctttgctggccgaccggacctgcagtatcaggccttggcgctcgtggccggcggagccgtaggcgccctgcttgatgacggcgtcgacggtgacccagtcgtgattgtgcggggtgccggccttgccggagctggctatgaacccgaatggggtcatgtcgagaatgcagcaggacatgaactggcgggacagctcgaactcgtccgcgccgaacgtacgcgacttgctcacaaacccggtgacctgcacatggtaaccgacgtaacgctgtggattatggtcgatctgctcgaaccatgagccgaattcgtcgtcgctgatggtcagggtcttgttcgccgtgtcgagtccgtgcagctgcgaggcgccatcaggcttgtgcgagctgcggggaatggcgatagcgcggccgccggcgtactcgtcgaagccgccgctgccgctgctgggctggaacggcacggcgatcagcagcgccggaataatcaaggcgatcaggaaccgtaaaaccgaacgctccgtggcgtggaacagtccgagccatgctgcggtcgccagcacgaacagcagtaccgcaccgatgatgagatacggcagcgagcgcggcgtggtcagcgtggtgtatgatccgcccaccgccgcataggcgatggccgcgcccagcgccgcgaaacacagcgcctccacgcggtcggggagtgtgactttgcgcttcatggctacgctcccatcactagatgggcggcaatcgcggcgaggaagcaggccgccgccacggtcgcgatgaaccggatgatgaaccgtggccggcattccgtggccagcatcagcgtgttcttgaggtcgagcatcgggccgaagaccaggaaggcaagcatggcggagaccggcagcgcgccaatcatgctggcggcgatcaccgcatcggacgtagagcacagcgaacacaggaacgccagtcccatcgccgccagaatcagtacgatggcaccggcgtcatcgagcgtgcttgaaccgttggtcaacgacgacaatgcggtgcgcatgatggaggcgatgatcgtgccgaacagcagaatcggcatcatccgcataaagtcgtcatgcgtatgccgaatgaaatgcgtgaaccgctccaatccgcgccccgtgcccccgccggcgggggctgtcggcaaagccgactgggggtggctctcaggcgaatcacccgtcgcccctgcacaatcctcgcaaatcaacgaccgcccaatcgtcagcggcctctcacgcaccgcaggggagcggagcggccacaccgcgaacgacacccccgcgactatcgccactaccatgcccaaccccatgcgggccgccaccatccatggtttgtcggtgaatgcgaaccatgtggaccatatcgccatcgggttcatcaccggcaccgcgcacagaaacgtcaccgcacacggcagcggcaggcgtttgcgcatcagattcgcgaacgtaggcaccaccatgcaatcgcacaccggtaggcacagaccggccaccaatgccgcggccagtccgccggccaacgatttcggtatgtggcgggccagaaaatcggcgctgacgaacgtgctgaccgcggccgacatcatcgcgcccagcagcatgaacggaatcgcctgcaggataagccccgcggcaccggtgccgatacgcaccagcggaaccggaaacccacgcgactcgagcatcgcggaagccgcaatcaggaacgccaccagcggcgtgccgataatcagaaacagatagttcgccgaatggtcctgttgcgcggtgttcacctgttccgtgcgctgcgtgcgaggttctttcatgcgaatatcacctgccatatcgccgtcatattagcaccgtacgcatgatagtggtcgagataatatgcgagttccccgcataccgatggtacacatcgatatgcggggaactctgcacatggttgcctgggccgatggagaatcggtgggccagcatctcggtggccacttcctccttgctcatggatgccgggtaatacgtgggccagttgtccatttccttgagggtttcttcctgtcgttgaagtgacgttgcacggtggcggcggtggcagaaccggccccggccttgtccgcgtagacggcgttgatggcttcggcggccttcagcacggcttccgggctgaaccacaggtgcgggttcgtagcaccatggtggtgatggcggccttcttcgccctcggcgtggtcgtgggaatgctcgtgctcgtcggtggcggtgacgtccatgaggtcgcccacgttcacgatggtctggcgtttcttgtcaagctgcgccttttccgtccagccgtcgtagccggcgccgttgagcaccacgatgtctgccttggcgagcttggccagatcggatgcggtggcctcataaaacggcggttcgccccggcaggtgacggcatacggaaggaaatgggagaaagaacgtacgccgccggcctgtggagcggaccgtcgagttgttgttacgagacttgatggattgcggaatccacgatgttggttatggcttcatatacccctttcgtacggctgcggccagattctgcggaacctgaaccacttcgccttcaggcgttctgaccgtggccagctgaggcaccttggccttccagttggctcggcgcgaatgcgtgtttgctcgggacgccttgtacttgggcagtgccatcagccttgcctcgccttccagtgggggttcttcttgttgattacatacagatggccgcgccggcggacgacataggagccatccttgcgggccaatgagcggaccgatgccttgaccttcatgtccgttcctttcttcttgtcttacggtctttgcggaatgtgcggcgaatcacttgcgcccgtaacgagcgttgaacttctgcacctgaccggcggcgtcgatcaccacattcttgccggtgtagaacgggtggctgtagctggacacctccacattgacgagcgggtaggtgttgccgtcctcccagtcgatggtcggcaggtttacggccttggccaccagtgtggacttggtgaggaagtacttgtcggcggagcggtcatagaagaccacggggccgtattcggggtggatgccctcttgcatggttatggacctttggttgtgtggtgttgtgtggtgatatggatgagaatggcgtcggacgcacgggtggaatccggtgaattgagatggcctgagacggcctgacggccggttgtgccggcccgatcaccagctggatttcaccacgccgggcagtttgcccttgtgtgccttctcacgcagattgatacgtgacaggccgaacttgcggttgtaggcgcgcgggcggccgtcgatggaatcgcggttgcgcagacgggtggggctggcgtcgcgggggagggcctgcagcttgcgcatcgcctcggcgcgttcttcggcggtcagatgagggttgacgctgtcgcgcttgtattcggcgcggcgttcggcatacttggcgaccatgcgttcgcgctgcaattgtcggttgatcttactggttttggccatgtccggctccttgataaggctccggggcgcgggaatcgcgccggccggagctgggacgagtgcattcgttcattgggcgcatgccgcaaggttcggaagatgagttcatgaaatggtgatagaggaaaccgccggaatgccaacaaggaaacgatttcggcgggtgcttaagcctcttcctcgcctcgcgactggtgtccaatgaacgaacagatggattagcgggtctctcggaagagcacccgtttgcggactaccggatcgaacttggtgagctcaagacggtccggcgtattacgacgattcttggtggtggtgtaggtgaatccggtgccggccgtggacttcagggtgatgaccgggcggattgcggaggatttgcttgccatgagtggtgctttctatgtgtgggtgtcacgctgttatgtcacgtatgtcgcgtacgtcgcggtgccatgtgggtgatgcagctcgttagcgcggtttgttgcgcggttacgcgccggcacagtggcgggcctactgactgcccgagcatgggggtgatgccgtggccggttcagttgacgttctgatcgcggcggatgcgggcgatcgccgcctcgatgccgatgcggtcgatggtcttgatgcccttggcgctcacggtaagcgtgacgtgccgctgcaaggacggcacccagtaccgcttggactgcaggttcggggcgaaggttcggcgtgttttcctgtgcgagtgggagacgcggttgccgaccccggcgcgtgttcccagaatttgacatgttttggacatgcctgcaactatatcataatgataaccattatcaaataagaaaggctgtcatgattcatccggcattgcaatcacagggaaacgcggaggggcgcacgcccgtggtgctgctcaccggcgccgaccgcctgagcctggactccgtggcgttctcgttggtcgattccttcccgtccgtatgctcgattgcttatgacgtgcgcccgaacgaagccgtggaatccggtctcgatatcgtgcgcaacgtcgcgaagccccaggcaagcggggtggtgttcggcgagtccgattcgttcgggctcgaggggtgctgcatgagctgcacggtcaaacatgaccttgaacggacgctcggatcgctgcaagggcgggccggcgcgtttctggtctcgctgcctgtgggccttgaggccacgccggtcgcgcagtatctggccgattccttccgtctcaacgagtggggtgagtcgatgttcgtgggtgcggtggccaatgccgtaggccttgacgaattcgaagagcgattctttgacgacgaccgtttgtgcctgtacggcatgggcgaggagaacggcgtctatgacgagcgttcgaccggcgtagtggtctcccgcctgatccgtgaggcctcgtgcgtgctcgaattgccggtcattggtgccggttgcctggcacgccatttggatacagacggggagtgcgcctgccgcgacatcatccgtgcaatcgccttgcgtgatgcgctggtctgtgaggatgcccgcaccgtggggctcgtcgacctggtgcaggcgtcggtctgtgccgcgatgccgttgtgacatgtgcggcaaacggcagaacccccgcgtccgaacgaaggtggcgcgggatttctgtcgtttccgaggccttaaatggcagaacccccgcgcgggtatcgttcggacgcggggatactgccgtttcgtctgccgaaaacggcgggatcccgcgttgtcatcgtcggggcgcgggatttccgccggcagcgcgggtgtgcgcgtgcaacacaccgacgtaaatgcaaatgataataattctcaatacatgttattctgtcgtgttgggggccggacgatgatgcagcaacagcagcatcgcccggccaaacagccgaattagagaggaaaatccaatcatgtccatcatgtccaacgccaagcgcgcgctcgccatcgcggccgccgcggcgaccctgttctcgatggccgcctgcggttccagcaatgccgccggcaacaagtccgattccagcagcgccgcgtcttccggcaagatcgaggtcgtcgcctccatcaaccagtggggttccgtggccgaagacctcggcggcagcaacgtcgaagtcaccaacatcatgaccaagaccaacgttgaggcgcacgattacgagcccaccagccaggatgttgccaagttcggcactgccaaggtggccgtggtcaacggcgccgattacgacccgtgggccaccaaggccgcccagtcgaccaaggccacgctggtcaccgccgccgaaaccgccggcatcaaggaaggcgacaacccgcacgtctggttctccgccaaggtgcgttccagcgctgccgacgccatcaccgccgcctaccagaaggccgacccgagtcacaaggacgactacgccaagctcaacaaagaatggcacgccaaggaagaccagcttgagtccaagatcaaggagacttccgccaagaccgagaacctgccgtacgccgccaccgaatccgtggcctggcacttggccgacgacctcaagatgaccgacgccaccccgaagggctacgcccaggcttccgccaacgagagcgagccgaccccggccgacatcaaggacttccaggacaccctgaagggcggctccatcaagatgctcgtcttcaacagccaggaagccaactccaccaccgaccagatcaccggtgccgccaaggacgtcaacgtgccgatcgtggagctcaccgagcagatgccgaagcagtacaccaacctgctcgactggatgagcgcactggtcgaccagttcgccgccgccgtgaagtaatgcggcggtagccggcaatccgcaacagcaataaggggaataatcaagtcagatagcgaggcgttgcctaggggagaacagaacgcttcgctatcagggaaggctccttatatatcagggtgcttcggggatgtcccgaggcaccctttgcgttagggtgaatagttaggaaacggtaagaaaaatagtggaactatggattttccaaggttcagcggcaacaatatgcccttgaaaagtcccatacggaaacaggcgaatgagcgagaacactagtagtatcaccacagtgaaaccccatttcaagctttgggtcaaaaaggccgaagccaatgaagtcacgccccagcacccccacaagcccttccccggctgggcgtacggcgtgctcttcgttatcttcgacattattgttgtgacggcgctcgaagtgggcgtttcgtccagctccacccgtgtgcaactgtccagtccgaccgtcggattcggcttcgtgagcaagatgtggaccgacggcaatttcgtattcgtactcaacgtgatacttgtcgcgttgctgtacctcatgttgctgatgctgttcaacagattctggacggcaagcatcgtgattcttgcggtcggaatcatcgtggccgccatcgaacatttcaaggtcgagatccgttacgaggccattctgcccgccgacctcggcttccttggctcgaacaccggcaatatgctcaccttcattccggccggcgcgcacgtgaccatcctcgtggcacttggcgcgttcgccgcgctgctcgccctgattctggtgctgcgccacttcgacgggcgcaaaggtcgcatgatccgtacggacaacctgagcctgaacctcacctcccgtctgattctgctgctgctgccgattctggtgttcgcgttgtactgcattcatgtgagcaccaccgattcgctggccaacaagttctcccgcgccttgggggacacgccatccatgtgggattccgtgtatgacgcgcagcgcaacggtccgctcgtggcctttacccgtcagctcaacccgaagatcatggacaagccgagcaactactccgaggagaccatgaagaaggtcgccgctcgctaccagaaggaagcggagacaatcaacgcctcccgcaccaacaacctcactgattcgacagtggtgtacgtgctgtccgaatccttctccgacccgagccgcgtgccgggactgaagaccaataaggattcgatgcccaacatccgcaagatcaaggcgggcaccacctccggcctgatgctctcctccggctacggcggcggtacggccaacctcgaatacatgggactttccggtctgagcatggccaatttcgattcctccctgtccagcccgtaccagcagctggtcccgagccagcattggacccccaccatcaaccagatgtggggtgcgcccgccaactcgctcggctaccatccgtacgagtccagcatgtactcgcgcgctacgaactacaagaagttcgggttctcgcacttctacacgctgaccggtccggacgtgatcaagtatcaggacaagattgacgagtcgccgtacgtctctgataagtcttcctatgattctgcgctggaaggcatcaggtccggcaagacgaacaagttcattcagatcatcaccatgcagaaccacatgccctaccacgagtggtatgagaacaacgactacaccgctgaatccaccacgggtacgccgctgggtgatgatgaacagcagtcgattgagacctatcaaaagggtgtggagattaccgatcaggccactcaggagttcctgaacgaactggatgcgctggataagcccgtcaccgtagtgttctacggcgatcacttgccgggcatctactcgtccgccagcgaggatggcaacaactccttggccctgcacctgaccgattacttcatctggtcgaataaggcttccagctcccaaggcaataaggcaagcgatgcagcctactcttcgccgaacttcttcgtggcacaggccgccgatcacatgaacgccaaggtcagcccgtatctggcgttcctgaccgaaatgcattccaagattgccgctatggaaccgcctgtggtcaacaaggtccaaggctgggatcgtattcccgaaggccagaacatctatctcgaccaaaacggcaacccgatgtccaccgatgacttcgacaaggaaaccaagcagttgcttgccgactacaagctcatccaatacgacatcaccgccggcaaaaactacctcaaagacacagattttatgacgttgccgtaaagcagacagcccggccgaaccgtaaagcggatagctcagtgggctatccgtaggtgaggggagcggctgtgccgcgacggaaaatccggaggattttcggtctgtaggcaacgtgcgagccgacaggcgagccagcaaaacgcgggcgaagcccgtccaaaattgctgtaccgttgccatagtgctgtgagctccctctgatgagggagctgtcgaacgaagtgagactgagggagagatcccacagaccaatcactcccgccttacaataaagccatgaagcgcatcgatgtgaatcatggctggcggttccgttcaattggcaaggaccgcgatacggcagcgcggcagccagtcacgctcccgcacgatgcgatgattcacgagtcgcgcgaccctcgcgggccgcacctcgcgattcatcgaacgaggacatgacggcgtggccagctggtcatgggcgggctatgagggccgcgacgccatcgtgcatgtcaccgatgaccgccgcattgtggttgatgcaggcgggcatatcgccgtcggaccttctgccgaagctgtggatgtggaggtacaagtggactctgtggccgcacaacacgacctgcctgccaatgccgaactgctcggcgtggccagcgccaatcccatcaccgtcgatgaactcgccgacaatacctgcaccacctacttcggccgagcccaagctatttggcgaataccagccgaaacgtctggtattgcctgcagcacaaacgccctcatgccatcgtcatgacggtacgataggtacagtcgatgcccggaaaaccgacccgggcatcctgcgggaaggatgtgccatggtcaatgcggatttcgctcagttgcgtcacgcctacgaatccgggtgtacgcggccattggcttggcgacgggcgcaattggatgcgctatgccgtctggtagcggacaatcgtgatgctttcgtggctgcggccatggccgatttgggcaaacccgcggcggaaaccatactgatggagctgaatctggtggccggcgaggcgcagttcgtccgcaaccggctcggactgtgggccgcgcgccatcccaaggcgatgcattggatgctgcaacccgccgccggctggacgatcgccgagcccaagggcgtggtactcatcatctcgccatggaattacccggtgctgttggctctggagccaatggccgacgcgctcgccgcaggcaacgccatctgcctgaagccctccgagctttcgcccaacacctcgcgcctcatcgccgaactcgtgccgcaatatcttgaccccgagtccgtgtgcgtggtcggaggcgggcccaaggaaaccggcgaactgctgaaatgtccgttcaaccatatcttctacaccggcggtgggcacgtcggcaaaatcgtcatgcgtgcggcggccgagcacctgacaccggtcacgttggaactcggcggcaaatcaccgtgcttcgtggaccgtacggtggatatcaatgtggccgcacgacgtatcgcatggggcaagttcaccaatgccggacagacctgcgtggcacccgactatgtgctcgccacgccggatgtggccgaggctctggccgagcgcatcgccgtagccatcaccgaattctatggcgaagatccgaaggcctcgcctgattttggtcgtattatcaacgatcgtcattttgaacgactgtgcaagctattgccggtcggcaccgtgccgtctgaggagccgagctcgccgctggtacaggtggcatcggcggtaggcgcggccatggatatggtcgggcgacgcttcaatgtcgtggctgccggacgcggaagcgcgggggagacagccggtggtggcaccggtagcgcgaacaatgcggcgaagccggcggccggttcgaatacggcagccgctgatagtgatgcgactgcctcggccgctgttgagccgagcgagattcacaaggtgcccggcgtattcgatccggccgggcgaattgtttgcggaggcaaggtcgatcgcgccgcccgatatatcgcgcctaccgtgctatacggcacgtcaccggatgcgccggtaatgaaggaggagatcttcggcccgattctgccgatcctggtggttgaggatgccgagtccgcaatccgattcatcaacaagcggtcccggccgttggctgcatatgtgttctcgcgcgatcacgaggttcggctgactttcgaacgtcagaccagctccggagctttgggatattcgttgccgttgggtcacctgctgtccagccggctgccgttcggtggcgtgggcgcgtccggcatcgacgcctaccacggcaaagcaggcttcctcaccttcagccacgtcaaaaccgtggttaccaagccgcagttccccgacactctgcgcctcgtgtacccgcccttcaatgaagccaaggccaaactgttcaacatcatcgccaaattcagctagcgtgatatcgctcgctgatattgggtgatggcgttgtcatagtgacgttcgctgtcccggcagccacgtcaatcgattgattcgtgtaccgggccagatttttctgtcctggtatttgatttcgagtcattttctgcttaccgggacaaaactgacgccgaaagtatcgtccgcgtattacgaaaatggcggaatagtgcggttttgcatggaagggaattccaaatattcctatattcgaggtgttcaactgtcctggtttgcgaaaaagagccgaaatcagctaccgggacagaaaaatctggcccggtagccacgtcaatcgattgacatggctaccggaccaaaaatatgcggcagatgcgccgcttctgttacttcagggctttgaagccgatgtcgtggcggtagaacagtccgcgcagctcgagcttgtcgatgatcgcgtagaccttgtcctgagcggacttgatgtccggggcggaggtttcgatgagcaggacacggccggagttggcaatcagaccacccttgtcgtcggaggcgacgccggcatagtagacatgcgaatcctcgtcgacctcgatctcggacacacgggcacccttgatgacgttctccgggtagccgttggaggcgatgaccacgccgagggtggcgttggactcatcccagatgaattcgggggtttcgccgtcgagaatggcggagatgccggcaccgaggtcggaggtgagcttcgggagcacgacttcggtttccgggtcgccgaaacgagcgttgaattcgatgaccttcggtccgtcggcggtggcgatcaggccggcgtacaggatgccggtgaacggcgtgccttcctcggccatgccttcgacggtggggcgcacgattttctcgatggcctcgtcgaccacggactgcggaatctgcggcaccgggctgtaggcacccatgccaccggtgttcgggccttcgtcgccatcgtgggcgcgcttgtgatcctgggagatcggcatcggccagaaatcagtgccgttgacgaagctcatcagggagaattcctggccgtcaaggaagtcctcgataacgaccttggcaccggcggagccgaagcgatgatcgatgaagatgtcttcaagcgcacgctgggcggtgtgctcgtccatggccacggtcacgcccttgccggcggccagaccatcggccttgatgacgatcggcgcgccatgctcgtgtacgtaagcctgagccatgtccaagtctccgaacgtctgatatttggcggtcggaatgttgtgacggtccatgagctgcttggcgaagtccttggaaccctcgatctgggcggcggccttggacgggccgaacgccttgatgccggcggcggcgaaatcgtccacgatgccttcgatgagcgggacttccgggcccacgaacacccagtcgtagccgttgtccttcacgaattcgatgagcgcggcatgattcgactggctcagctgtgtggtgtggatgccgtccttgagcatgcccgggttgccgggagccacggtgacttcgtcaatgctcggtgccttgagcagcgtgtaggcaatggtatgctcacgcgcaccggagccgatgaccaatactttctgacccatgtttttccttcctaaagtctttggctcccctctttgaggggagccggtatctggagctacttcagtacgatttgcgtgtcggtggtgtcggtggtgatctggccgagcacgtaggcgggttcgttgttgtcggcgagcagcttcagcgcctcgtccttgcgggcggggtcgatggccagcaccatgccgatacccatgttgaagatgttgtacatctccttgtgatcgatgttgccggccttctcaagcacgtcgaagatcgggagcacaggccaggtgccaagctcgatctcggcggccagaccgtccggaatcatgcgcgggatgttctcgatgaagccaccaccggtgatgtgggccacgcccttgaccacgcccgccttgaacagcggggagagggccttgacgtagatcttggtgggggtgagcagcacgtcgccgagctttgcgccgcccagctcggcgagctcagtgtccacggtatagccagcctgctcgaacagggccttgcgcaccagggagaagccgttggagtgcacgccggtggaaggcagaccgataagcacgtcgccctcagtgatggtggaaccgtccacaatggcggacttttcggcaacgccgaccgagaaaccggccagatcgtactcgtcctcgtcgtacatgcccggcatttcagcggtctcaccgccgaccagtgcggaaccggcctgcacgcagccgtcggccacaccggccacgacctgctcaagcagggccgggtcgttcttgccgcaagcgatgtagtcaaggaagaacagcggctcggcaccctgggcggcgatgtcgttgacgcacatggccacgcagtcgatgccgatggtgtcgtgcttgttggccagcttggcgaccatgagcttggtgcctacgccgtcggtgccggagatgaggaccggctccttgtagcccagggaggctaggtcgaacaggccgccgaagccaccgatgccgccgaccacgccgggacggttcgtgcgggccacgtgcgacttgatgcgcttgacgacttcgtacccggcttcgacgctcacgccggcgttctcatatgcttttggcatttggtggggcctttctgttctattttcaagctcccttgccggggagccacctgcaaaaagcggattttcgtttgtactaagctccccttgtcaggggagctgtcagcgaagctgactgaggggtagtcgtaaagaccaatgactgaggtgtagtcgaaggaccggccgagcctactgcacgtccggctgcacggtgttgtactcgttgccgatgtacttgctcttgtacagcgcgaattcaggcagacgcacacggtcctcgggcgtgagggacttcaggaagtcggcctcgtagtcgtcgagcgcagtggggtagtcgccgttgaagtaggcgacgcacaggccaccgtatggggcgtcggcgttcagtccgatggattcgaccagaccgtcgagcgaaaggtaggccaaggaatccgcgccgatgtattcgcggatttcctccacgctcatcttggctgcgatgagttccttggtggtggagatatcaatgccatagaagcacgggtacttcagcggcggggagctgatgcgcatatgcacttcagcggcgccggcttccttgagcagctgcacgatgcgcttggacgtggtgccgcgcacgatggaatcatcgataacgataacgcgcttgcctttaaccacgctgcgcacagcagagagcttcatacgcacaccctgctcgcgcagttcctgcgtgggctgaatgaaggtgcgggccacatactggtttttgattaggcccatttcgttgggcagacctgctgcttccgcatagccggatgcggcggacaatgaggagttcggcacgccgataaccatatcggcctccaccggggattcggcggcgagacgtgcgcccatgcgcttgcgggcggagtgcacgttgacgccatagatatcggaatccgggcgtgcgaagtagatgtattccatcgagcagatggccagctgcgtgttgttggtgtactgcacgatcttgtagccgtgatcgttgaccaccacgatttcgcccggacgaatgttgcgcaccagctcggcgccgacgacatccagtgcgcaggtttcggaggcgagcacgtaggcgccgttcttcatcttgccgagggagagcgggcggaagccgttcgggtcgagtgcgccgatcatggcgtcttcggtcatcagcaggtaggcgaaaccgccatgcaccgtgttgagcgcttccttgagcttgtccataaaggtgcgctgcatcgaacggcgaatcaagtgcatcagcacttcggtgtcggagttcgaatggaagatggcgccttcgtcttcaagcttgcggcgcagtgacgggcagttcgtcaggttgccgttatggcacagagccacgtcgccgtcatggaagcggaagatgaacggctggatgttgtccgtggtgcccgagccggccgttgcgtaacgcacgtggccgatggcgcaattgcccttcagtcgttcgatttcgcgctcatcgccgaacacctgggtgagcaggccgagtccgcgatgaccgatgagatgaccgttatcgttggagacgatgccggcaccttcctgaccgcgatgctgcagcgcgtgcaggccaaaataggtgagtcgtgaggcgtcggggtggccccatacgccgaagatgccacattcctcatgaatgtcttcgagttcagccgacaagccaaagctcctttttcaaacaggggattaactatctgccaaccctaccaatcggcggctacatcgcgtgttgtggggtggtggaacttgttggggttcgcggacgcggtttaagcaccagatcagttgactatgaatagtggcttaggattttggcctttcgtcgtatgaatccggtgcttgttcttcggcttcgtctcagtgcctgaaatggctgaagaactcgatggtctcgggatcctgcgactcgtccatcacctcggcgggtgtgccgttctcggcgatgacgccgtgacggagcagtacgatgcggtcggccgcgtcgtgggcgaagctcatttcgtgcgtggccatgaggattgtggtgccttgggcctttaactcggcaaccatgttgagcacttcgccgaccagcatcggatcaagagcagatgtgatctcgtcaagcagcagcagttccgggtcggtcatcagtgcgcgcgcaatcgccacgcgctgctgctggccgccagagagctgatcagggtaggcgctggctttatcgcgcatgccgatgcgttcaagcagttccatagcgcgggtttcggcgcgatccttgctccagtggtgaaccttgattgcggcaagggtcacgttcctgagcaccgacatgtgggggaagaggttgaactgctggaacaccacgccgatacgtgcgcgaatcttgtcctggtcggcacgcgggtcggtgatatcggtattgcccagccaaatctggccgtcatcgacctgttcaagcaggttgacgcatttcatcaatgtggatttgcccgaaccggaaggccccagcaaagccaccacctcatgttggtgaatgtcaaaggaaatgccacgcagcacctgcgtgtttccaaaggatttgcgcacgtcatcaagacgcagcaccgtcttgttgctcacgggggagtcactcgcctcggtggtgatattggtcatttcgctcataccgttcctccgctgagttcgcgcttacgcagacgttccgtgtaccagtcgttcagcaggatgaacggcacgctcatcaggatgaacagcaggctggcgaccacatacggcgtgaagttgtaggtgctggccacgtcgatctgtgcggcgcgcacggcatccaccgcacccagcacggaaatcaggccgacgtccttttgcatggagatgaagtcattcatcagtgcgggcgcgactttgcgcaatgcctgaggaatgacgatcagtcgggtcgtctggccggaggtcaggcccaacgagcgggccgaggctcgctgagaaggatgtacgtcgttaaaaccggcacgcagcacctcggagacgtaggcgctgtatcccattaccactgcaatggtgccgagtaccgagggatcgatacggccgaacaagcctaggccgggaatgccgaaaccgattagatacagcacgacgataataggcacgccgcgcatcacagtcgtgtagatcaatgccaggatacgcagcgggaacagaataggggagcggctggtgcgcaccaatgcgatcagcgtgcttagaatcgccacgccgaccactgcgacgagcagaacgcggatgttgagccataggccgtcaagcacatggggaaacgatttgacgaagtattcgccggagaagaaggtctccttgactcgtggccagccgggggagagcttcaggccgatgacgatgaccacaacgaacacaatggtgctgatcagactggtaatcgtcgattgaatttgctgatgaacacgatattggcgtcgtctgagctcgacctgacttacctcgtgtccgtcaggggcattgtactgcctggtttcggttggtgctgcggtcatgtgatgaatgtcgctcgcttcctgaatgccggaatggccgggtgtcgcaggaaaatttccgcagcgcccggccaaggtgttgtgaccttatgatgtgagcctactccacttactttttcagttcggtcaggtcggtggtgtactcggccagccacttgtcctgaagcttcttgatggtgccgtcggcgttcaggtcatccactgccttggtcacggctgcagtcagcttggaatccttcggcagcacgatgcccatgccgctcttgtcttcggagtcaggcagacggccgagcaccttggcgtccttgacctgctcggactgcaccatgtacacgcattccacggtgctggtgaccagtgcgtcgatctgaccggcgtcaagtgcctgagccagtgcggcatcatcattgaacgtctggatgtcgtccttgatgttcgccttggcgtagtcgtaggcaagggtgccgaccatgacgcccacggtcgcattcttcagatcggataccttggtggcgttggcgaacttgctgtctttcttgaccacgacggactggctgtcgttgtagtagctggacgagaagtcaacggccttcttgcgctcgtcggtgatgccgaactgctggatgttgagatcccagtccttggcaccgggagcgatggcggtgtcgaatgcggtgcgggtccacaccacgtcgctcttcttgaaaccgagcttgtcggccactgcgtaggcgacggccgcctcgtagccctcaccgctttccggcttgtcgttcataacccacggctcgtaggccggctgtccggtggcgatggtcagcttgcccggcttgtacgtctgctgggtgatgtcgttcgaatcggcggaattggatgcggtggactggccggaaccgcaggctgcggtgaacgacagagccaggatgctggcggtggacgcaatggtacggacgatgtgttgcttattgaacatgggcttcctctcctcaagtgttcgtcatgcacacggttcaaagtcgtgcttgatgcatgcgcgccaattgtatggctattgggttactacaaaacagcgatattctcggatgctggttatctccattgcttatggccggctagagccgcgcaatctggcgcgtaagcgaacgatatctcatattggcgcagagcgaaatggcgttcactgttcgagtgtgaagccgtcgaatacgaatcccggactgaccacacaggagaccagcgcatcgccctggccaggcactgtgcgctgccagacgccagccggtacgaccgcatgtcccgatacggtcacgtcggcctgatcggtggtgatgccggaacccagggtgattacggttcgcttggattcttcggattccggagtctcgccgctgccgccgagttccagcttgaccgatgccgggccatgccacagccagacctcatccgcatcgaccttatgccaggcgctggcatctccctcggacagcaggaagtaaatcagtgacgatagcggtcggcctgaggcctcatccgtgtgcggggattgccagtcacgcgtgtaccagccgccttcggggtgggcttccagtccaaggcgttccactatggaccgggcgtatggactcatgtcttgcaaagcgacgctcataatgagatctcctgttcttggcgggtttgctggttttggcttcttgatatcaggtcgggtcagcggtgtcaccagacgttgttgtaggcttcgcgcccggatatcaccgtggctcggttcgtgcctgcgccgtgcttcaccagtgtttccagcgtttcttcgatgccggccggagatgatgtgtcgacggggatgtcgaagaacgcgaaatcagccaatgcgcccgcgttgatctgtccaatgcggtttcggcccacgtgcatacccatggaggcggcaccgcccagcgtcatcatacgaatcaggcgatgtgtcagatcgtcgctggcatagccttgttcgcgggccaggccgtaaagcatcgacacgtcatcaagcagatcgagggtcggcgtgctggagagcgaatcggtgcccacgcttaccggattgccttcctcgaggtattcgcgcaccggtgcatctttgccggtgttggtaatgcgattcgatcgggggcacaatgccacgcccacgccgcgctgacgtagaatacgccgatcctcgccattggcccacacgccgtgtgcaatgtgcacatccgggccaagcgagccaagctgatcgacgaactggatggcggaggcacctttgcccacgtccttgagctgccggtagctttcccaatcgtggtcacgccagtcggacgccgaataagtggtgagcaccggcggataagtgccggcctcgagcggggtctccgccagatggatatgcagtcgcatgttcagctgacgagcaatgtctggaagatcaacgaacggttcggactccagcgtatacggagcatgcgggctgatgccgaggttcggcagctgctcctcgttcatccggcgcaactgccggatgagctcggtgcggcccttttccatccattcatcgttgtgccagcccattacctcccaataagcgatgccgtgcatgccctgcgaagccagcgcgccggcggcgtccaaatcggtgacgatgtctgcggcggccgtcgttcccgattcgaccatctggcgagcaccgtcctcggcccactgcttccatggctgggtcttctgcgcctcggcgtacacctcgttgaatgccagttcccaggcgtggaaccgatcgtaggtgccttgcccgacctgcaccatgccgctgtactgcagatgagtgtgcgcgttgatcaatccgggggtgagcaccccatcccaatgccgttcacggatggtgccgtgagccgtcatttcctgcttcagcgcctccagcacccagcggcgtttacctacatgaaccacgcggtcgccatgtatggcgaccgcgccatcgatgatgacggggcccgtcacggggatgatgagtttggcggaatacagtgtcacatcatcgataagctcggtatcgacggtcggccaggtgttgtcggtcatattctcctcgctgcgttgtgttcggtgccgtgtctatggctatcggtcggcgttctctcggtcgttttccgcgaatctggtcagtcgccaatcgtagccgttgtcctccacggcatggctggctcggtatccgcgcgccttgagcgcgctggcggcgatgcgctggtcggtcgctgcgtcaagtctgataagcgtgtgatccagtgtgcctcgatgttccagaagatatgcgacggcgctggcctgtacggcgaagctcagatccatgatctcgattggattgccgcctcccaccgtgtagttcacgccatcgccgtcggcgattagcgtgagcgttggtccgtcgggaacaatgagttgcgcggtgtccctgttgacctgtgggatgaagtcgcttacctcgtccaaggcgatttcgttggcgatgccgccgatcactgcgagcgccgcgccctcgtgcattgcgcgcatgtgctcaagtgtgaccgtatgtctcacgccagtggcggacaccaccatatccgcgcaagggagtgcctcgtcaatgtcttgtgcggcgaagccgtcgaacaccgctttgagtgaagccactggatcgatatcgcagatggtgacttcggcgccaagcgcgcgaatacgccgtgcgaagccttggccgaccgggccgtagccgatgacggtgacgttcttgccgtcgaatgcatgctcgccgagaatgcgctgcatggtggtcacgcatgtctccccagtgccgtgggcgttgtcgaatccggttttcagcacactgtcgttaacggctacgaccgggtaggtgagcgctcccgcttcctgcatctgctggaacgcgcgtacgccactggtcgtttcctcggccactccaatgagattcgccgtgagctcggggcgttcgagcgaggcgagacgggcgaagctggcaccatcgtcgatgatgatgttcggctgtatcttgtccagcaggcgcagggctgcctcgtgcgcctgttccgcggtccaggctcggctggattcgaccgtgattccttcccggcgcagctgttccgccactcggggatccgtggaatccgggccgcaatatactccgacgattgcgccggcggccttaagcttgcgcagcagaatcgcggtttttggctccagtatcaggcagacggcaatacgaatgcctgaaaaatcgacgcgggtggtgaggtcatccatggtgtcgcgtaataccggcatgtgctgttccgcgtactccattgcctccagcccacttgccgtgcgcatatcggcaatggaatcaatgctttgtgtgccgtcacataggagttcctcgctgtgcccgtcggtcatcgtggcatcttcgacggtcatgccccattgctgggcctgagacttgatttcggcatgcttctgcggctccggaatcgcgaggcgggctcctgccagtgatcgattcgttttctgggatcgggctgccgcccacgccgcaaaatcgctgtctgccgtaatgcttttcttcatattcccatggtacgcatgcatgccgctgctctgccgctgcgcgtgtggtgtgggtgaagagcatgcttgggcgcgttgcgtgcgtcgacttcggcagcttcgaacagacatgttgtatcgaacaaatgttcgaccgtattgatatgctggtcgggccggcggtggtaaggaggtgatggcgatgggcagcggaacggtatcgacgcaacgcgagcatacctatattgccattgatctcaagtccttctatgcctcggtggagtgcgcggcgcgcggactcgacccgttgaccacgcatctggtggtggccgatgaaacccgcaccgataagacaatatgtttggcggtctcaccctcgctgaagaactatggcattcccggtcgtgcgcggctattcgaggtaaaacagcgcctgaatggagtcaacatcgagcgcgcggtccatgctcccggcggccgattaatcggggagtcctgcgatgcgcgcgacctggaacactcgccgagactcaaagcctcgatggtcatcgccaagccgcgcatggcgcactatctggaaatcagcgggcggatctacggcatctatctcaggtatgccgctcccgaacacattcatgtgtattcgattgatgaggtgttcatcgacgccacgccgtatctgcgctcgctgggtatgggggcgcatgcgatggcgcgaaccatcgtgcgcgaaatccttgccgaaaccggcatcaccgccactgccggcatcggctccaacatgtatctggccaaagtcgccatggatatcgtcgccaagcacatgcccgccgacaaggacggcgtgcgcgtggccgaactgaatgaaatgtcatatcgtcggctgctttgggatcatcgtccgctcaccgatttttggcgggttgggcgcggctatgccaagaagctcgagcatgccggactgatgaccatgggcgatatcgcccgatgctcggtgggtcgtgcttcggattactacaacgaagacctgctgtatcgcatgttcggtgtcaatgccgaactgctcatcgaccatgcgtggggctgggagccgtgcgaaatcgcggatatccgatcctatgagccaggtgcgcacagcatcagcagcgggcaggtgctcaccgggcccgccgattggcatacggctcggctgatcgccaaggagatggccgatgcgctcgccctcgatttggtcgataagggggtgatgacgaatcggctgacactggcggtcggctatgacattggcagtctcgatgcttcgaaacttgattcatgcgcagaccgggcgatgaggcgtgccgccgaacgcgcggcaaagacctatcaagggccggtgaccgttgaccgtttcggtcgtcgggtgcctaagtcggccgtggggtcgattggattgggcgattttacgtcgtctgccgcacgtattcgcgaggcgatgaccatgctgtacgagcgtattgtggatgcgcggttgctggtgcgtcgactcacagttgttgccgatgatgtggccacgcccaaagaactggcggcgggcaaacgctatgagcagcttgatttgttcggtgatgatggcgatatgcgatatgactgtgatagcacggaatccggtggcgacggaagcgggcgtatgccggcttgtggggacgatgccgccgcacagacgttggctcgagagcatgatatccagcgtgcgttgctggatgtgaaacgtaaattcggccgcaacgccgtcatcaaagccatggatatggaagacggtgccaccggtcaggctcgcaaccgtcagatcggaggccatcgcgcatgaccctgcaagaaacccatgcatacgacgacatcatcaacctgccacaccaccaatcacgcaagcatccgcacatgtctcgtcaccagcgggccgcccagttcatgccgttcgcggctctgaccggttacggccaagtcatcgagcagacagcaaaaaacgccgaaaccgctattgctcaggccgaggcccaaggcgataccgatttcggcgcttaacaatcgctccggttggaggaagccgcagatccgtcagcccacgtgacgctcaaagtggtggaagccagtgatcttgtcgatttcggccatcgcgtcagccggaatcacaaagcccgcggccttcatgttgttctccagctggctgggcttggaggcgccggcgatcacacagctgatctccgggtgctgcaggatccacgccatggaaagcaccggcaggttcgtgccgagctcgttggccacaacgcgcagcgtctcggtcagatcggtggtctcgtcgaatcggtggcagaagtacatgtccagatagtcggtctgcatgttcttcagtgtctgatcaatgctctcgaagatatgcttgcgggacaggccgcggtcgttcacgccttcgccggtggtgacttcgcgggcgcaacgaatgaaatcatcaatgacgctccagcggtatggtgtggccgaaacgtcgaatcggatggcgtattcggtctccggcccgcaatccagcacatgcaaggtgcgcggccgttcgccgtcaagcagcgctggcaggaaccgctccgggcataagcaggcacccatgccgtaatggcatagttccagcagcgtcaatatgttgtccgaacgggcggcgactttcggctcgaatccggcacgacggaacagaatctcgccgatgcggccatcgatgtcctgcggattgcccagcaaaaacgggcagtgcgccaacgaagatagatcgcctggagcaatggcgcgttcatctggaatcgtgttggggatggtggaatcgttggcaatattagtttggctgttcgcggttccggtggtgactaaatccagtcataatgattgcgcaataaccagtaccatacgttcgtcgtagaatctggggttatcttgagtcatggctcgtgcgaatagcattgatgtttgcaactgcgggtcatgagatgaaatctgagatgaggtcgtagccggaagaggagaggatcacatgctggaagcgggcgcgatgttgctgttctgtgcggtgctgtttgccagcgtcgccctcggctggtcgattattcccgcgctgttcgttggtgtgctgctgttcatggggtatgggctggttcgccggtgctcgctgcgcgcgatggcgagccgtgcggccggcagcgtacggtccgcggggaccgtggtggtgaccttcgtgctcatcggcgtactgacctcgctgtggcgggccagcgggaccatcgccttcatcgtggcccattcgactgcggtaattcacgccgccacggtgattccgctgtcgtttctactgtgctcggcgatgtcggtgctggtcgggtcatcgttcgccagtgcggcgactatgggtaccatctgcatgtcgctgggattgtcgatgcaggcgaacccggtgatactcggtggcgcgattcttgcgggcgtctatgtgggcgatcgttgttcgccggtttccaccagtgccttgctggtcaaacagcttacgcatacgaacctgttcagtactattgcctgcatgctgcgcactggtgcggtgccgtttgtgctgagttgtgtggtatacgttgcggctgcggtggcggagtggctgtgtgcaagcggtggttccggattcggtgcggctagagcggctgtttcaaccaacacaagcagcataaccgatatcggcggattgttctcatcggcctttgatttgcattggcttaccctagttccagcattactggtcatcgtgttggcgttgctgcgtgtggacgttcgcctgcttatgctcgccagcattgccgcctcggtcgcgatatgcgtgggcgtgcagcacatggaatgggcggaactgttgcggctgcttattttcggttaccatgcgcaaaatccgcaggtggccgcactcctggacggcggcggcatcctctccatgctcactgtgatggccactgtctgcatctcctccgcctacgctggcatttttgccgagacgcggatgcttgctcggctgcagcaggtcatcgagatgctcggtcatcgcatcggcgcatgtggcgccaccatgattaccgcgacttgcgcggcggcgctcgcctgcaaccaaaccctcaccatcatgctcactcaccagttgtgcggcgggctatacggcgacgacgaatccgaacgcgccgcgcaagctatcgatttggaagacagtgccgtggtgatcgctccgttgattccttggtcgatcgccggtgcagtgccgctcgccaccatcaacgcccccacgttgagcttggccgccgcaaccttcctctacctgctgccgctgtgccgaatggcggtttcagctgtgcgtcaccgccgtgcaataactactaatatatgagtgattttgggcgtatacaggcgaaattactcatatattagtagtttggcgaacaactatattgtattctcgaaaagcttcgcgataggcggtgataaggtccggcaaacgcattgaggcgttggccgggctggtggagggcagttgggtcataccgatggcgatgccggcttcggtcaggcgcggctcgataagtttgcggtaaagttgcgctgatttcgcgccggttgcgaagatgtgggcgattggagcgccgcgcaagattggtgtcaagtcgttgggcacggcattgcggatgctggcatcgctggctccggtgatatcgcaagaagcaatgacatcccataacgcaatgtggtggcgcagagcaaacgcacgacgggactcaggtaaatcgccgacagcgtcagtaggatcagcggagttggcaaacagcgcctgcatcaccggccaaaaccggttctgtggatgcatatagtaaaacgccgccgctcgggatttcggactcggcatcgatcccaaaatcaaagcccgggactcaccatcccacaccggcccaaacccatgctccacatgttcgctcataagccccatattatgccgtttggtcttgaaaatagttcgggggcggacagttaatgtcatattccctcaaagagaagaaggatttacaatgaaaaaaggtggaagaaattgccagtgaaggcacaagccattcttattggtgttttagtcgtcgtttgcgcaattgctgcggtatttggatataggtcagttgacaatatgctgcatcctcaggcgactctgaccaattcggttgtggccaggcagttggaaaagattcaggatcttactacggccaaggaaaccgattttggttttgaagagtataaggaaggcaacattgctccacgccagatcgtcctcgaagccatccggcaacggaaccagcggattcttccacatccggaaatccgcaaccagccgcttcaactcctcgacataccgtcgctcatccaaccgaatggacatccccactcaccctcctttgcactaccatcccagcacacaaccaaccgtcacgccatgggcagcgccgtacacacgccaatgacgaacaacgcctcggcggtgagccagaacgcggccggccactcgccacacgactcacgacgattatccacacaaaaacaggcagccgccaaatccaacgggaaccacagaagcccgacgaacaaggcgatgaacggggcagccaccaacgcgaaaccgctcacatgacgggtcaacgcgatgccgatggccgcgaccaagccaaccacgccgccaccatacgatatatagcgaggaagaatattcgacccacgatgccgatcctcccggtacaggaacagggaacccgacaccagcagtacaccggccaccaagccaatcacccaccaaccacccgacgcgggttgcgccaaaggcgcaggcagacga

SEQ ID NO: 2621 - DNA, 6004 bp, Unknown
  R222_15m  MAG No. k141_33418
aggtacgcgcataatacaggcagagttcttccgacgctcgagacatcagacttttgctggtatcacgtacgtcggcgttttccggataggtaaattcggattcggggccgctgaccatcagtatttgcgtttgcctgttgcgaatggcatgcagaagtcttcgcaatgctcccagatcgccgtctctatcgctgcgtggggtcagattttcggaaaagaatacgatgcgatcaaattcgtatgtggtgatggtgtcgacaagggtgttggcgtcagacatgttgacgattctgagacggtcattgccgtctacggtgccttctcgttccgctatcaccacatggtctcggggaaaagcatgctgaatccactgtttggtaatgaaatcggtattaccgaccaaaagcacttccatgctgccgccccagtgaatactcccttaaacggggttatggcatagttctgcccacaaaccctccattgttcctgccttacggtattccagtgtaatccgttaacagacaaaatcacccccctcaacgggggcaacgggggggggttattagtcactgctaatactttttcatacagcacctttccgctacgctcaatctccgccctcagcgatgaagaaatcggctcatccagattgatgacatcaactttaagcagtgaccacagattgtcctgaaggttctgctccaagcgattgaaatcgggacaaccggccacggcaagatcgatatcgcttttaggccggttcacgccctttgcgcgagaaccgaacagcacgaccttgcgagcgccggcatcagcggcaaacgcgcgaatctggtcgtacacgtgctcgataggaaccatgacacctcccgccgcatccaacagtcccggaccaatcccggaccacccgcgcttccatcatacggccgcgtcccactcaccgcacggagcccgaaccacccgaacgcggcgacgtagttgcgggaggcgggctggcgctgtagggcgtgcgggaagttcctgacgtctacttttcaggaggtgaatcctcatgttcaccacgttttctctggccatcattctcgactgcaccgtacgcattgtgctcggcacggcattgggcgcgctgatagggctcgaacgccagttgcgcgcccgaagtgctcggcgtgcgctgggatgtggagcacatcaccacgtccgactgaaacgtccgactgacgctgaccagcaacatcgcaacagtacaacaagccaacaagtgggatggggcatcgagcctcatcccactttgttattatccggcgattgtcagactcactcacgccacggtgaacgtggtgcgcttcaggtcctcacggcgcgaggagtggccgatgagcagttcgaattcgccgggctcgacgatgcggttggcgtccgggtccacgatcgtgcagttcgccaccgggatctcgaaggtgacggtcttggtctcgccgggttccagtgcgacgcgctggaacgccttcaattcgcggtcggtccagctgtaggaggtcacgatgtcgccgatgtaggcctgcacgatctccacgccggcgcgctcgccggtgttggtgagggtgatttcggcacgtacggtgtcggtttcggcgaatgtgccgtcggcgttgcttgcgtcgcccgtaatggtcggttcgccgtatgcgaacgtcgtgtagctcaggccttcgccgaacgcgaacgccggatcctgggtgaggtcggcgtaccggtcgccgtgctggccgcgaatctggttgtagtagactggcagctggcccgcgtggcgcgggaaggtgatcggcagtcggcccgacgggctggtcaggcccaggattatttcggcgatggcctgaccgccgcgcatgcccgggttcggcgcccacaggatggagccggtgccggtttcagggtcgctgacgcgcttggcgaacacgccgtactcccccacgatggaggcgggcaacacctgcggcttggagctgatgagcacggtgaccatcggcttgccggtttcgcgcgagacggcggcgagcgcgtcgagcagggcgttctggccaccgagcagttcgagcgtggcggtggagcaggtttcgccgaccagctggaccacgtcgccgaccacggccacgatcagatcggactggcgggcgttggccacggcttcgtcgatcattgctcgatcgacggcggcggaaacgccgattttcgggcgaggctggccgtccgggtagaactcgccggcagggtcaggcacgaggtcgatgacgttcgcgccgcgcgagtagaccactacgcaatcgtcggaggtgagctgggtcaggccgtcgagcacggtggtaatcatgcctcgaggctggccatccggcatccaagagacctgaccggagttgccggtccagtcgccgagctggttctgggcgtcgtcggcaagcgggcctaccacagcgatgcgcttggccttgtttgcggcgaacggcagggcgccgtcgttgcgcagcagggcgacggattcgcgggcgagttccaggttggtctgctggtgttcggcggagccgatgaccgccttgatgcgttcggcatccggcaggcgcgggtcttcgaacaggccgaggcggaatttcagggccaggatgcgggctaccgcatcgtcaatcagggattcgtcgagcagaccggtttttacggcttcgatggctccctcatagaactgtggggtggtcatgaccaggtcgttgccggccttgaccgcatcggctgcggcgtgcacgtaatcgggcttgacatgctgttcccataccgagcggccgacgttgtcccagtcggtgatcagcgtgccattgtattgccatgcgccgcgcagcttgtcggtcagcagccatttgttgaacgtgaccggcacgccttcgatggactcgtagccgagcatgaacgtgccgcagccttccttggccacgcgttcgaacggcggcaggaaccaggattcgagcttgcggtgggagaggtcggcttcggaggcgtcacggccgccctgggtctcggagtaaccggcgaaatgcttggcgcaggccaggatcgcgttcttcggcagggcctcgccggccttggcgccgccctggtagcccttgaccatggcggaggcgagttcgccgatcagcatcgggtcctcgccaaaggtctcgtccacgcggccccaacgggtgtcgcgggcgatgcacagcaccggggagaacgtccagtgcacgccggtgcaggagacctcttcggcggtggcgcggccagcggcttcgactttggcggcgtcccagctgacggccatgccgagctgggaggggaagatcgtggcgcccggccagaaggagtatccatggatgcagtcatctccgataatcaacgggatgcccagacgcgtcttctcattgacggtcttggcggcacgagataaatcctcggggctggtatgcagaatggatccgacatgcttattcacgatgagatcctcaagatcgccgccgcgggcgtcaagctgcatcatctggccgaccttctcctcaagtgtcatacgggagagcaagtcggcgattcgctcaccagcgggcaaatcaggattcttgtacggtaaggtttcagcagttgcggcaggcgtggtgttgtcggtcatacgaagtcgctttcctcagtgaaatcgaacagctttttaattaccaattggtagtttatctattgacagcatacaacacgcttatgccgcgcgcatcacatacaccaaaacgaccgtatgtatgcgaccccttcgttcgcccgcatacttactgccgccatcaagcacaagcctcagttcaaggcacacagcgaatcagcgatacccgtcccatatcggcgaaggaaatatcgccggctccagatcggcccattcatcgcataagtcaatggccggcccccgtaaccacctcagttgcacaccatccatgatctccagagcatggcgcaacgtgggccggacctcctcaaacgaggtgaattcggaaggcaggttccagttgtatgtcgaatagtatcgccatattgaatcccgacgattggcaaactcgtcatgtaacggatgcgcaggattgaacgattcgacctgcaatatcgagaacagctgaacaagcatggggcgcgtggaattgcaatgtaccaagaacctcagatacgcgggtaatctgaaatcatcgggcactgaaccaggcaggccggaggccatgaagtcttccacactgccaaacgtgttgtaattctcgtgatacatcgcggcaagcaggttatctttgctaggaaaatatcgcaaaactccctgcttggtaacaccgaccgcatcggccacatcctgcacagaagtaccgttgtagccacgctcggaaatcagtcgcacggcggcatcgagaatttcctgccggcgttcccccggcgacttgcgaacacgcttatgctgcaatgaattcccagatgtcatatccgccagtctatccgcattctccccactcccatgcgcaaccacatccaatatccttggccggatatgcaaaacggtgccaaaacaaaacattctgtcatgccttcgacaccgatatcgcgcaatagatttttctgtatatgcttcttcgcttactcctggaacacgtcggggtgcttcaggtcgccggggatgtcggacagaaggccctccaaccccaggaattccttccagaagtcgagcggctggccgtacggcgtggcttcgcggccgtgggcctgaatgttggccttggcttcgaacacctcttcctcgctgatgccctcgaagtagctttccagacgttcacggtgctcgggcacgtagaacagagaggacacaatctccgtcagacgttcggcacgctcgatcggcaaggaatcccagtggcgaagctcgatgaagttcttcaggcgtacgtcattgaagtgcgtggagatgatgtggttgatctcgtacgggttgagttcgcggtccgggtacacctcccccgcgttctcgcggaaggccgggcgatgcagttccttgggacttgctccagaagccacagcttcaggggtatgggtcaggtcagcgaacatgagcggcgtggacagcacgtcgatggcgtaatcctcccacccatagcgcgggtcgaacaggcccggcagcacattcgtgcgctggaagtcgagataatcccacatgcgctggcgcagcaacggccatgggttcgtctcaccttcgaaatacggggtgttgcggaagaagtacgccagaatcggaccgatgacggtgcccaaccgcagtttttcgatggaatcgcgctcgtccacgtagtcgatgctgacctgggtggaggcggagcaacgcatcatgcatgggccgaactgacccacgcggccgaggtagtcggtcattgcatcgtagcgatccttggggttgaccggcacatccgcaaagctggatttgggctggtaaccgtagttgaccagtcggaagtcgagatcgtcaagaatcggggcgagctcgcgacggaacttggaatacaacgtattcaggtcggacggcttcttcagaatgccgattgaagtctccacctggccgccgggttcgagcgagacggcgacgccggggcgcgcgagccccaccagatggccgttctcccagtattccttctcctcgtcatagtagggtacgagacgtttgagcagcgtttcgatgccgttcggctcgtagtaggtcacggcggtgtcgtcgctgttgtgcacgggcaggtgctcgatctccacgccgaagccgccggcgccccgctgggagcgtccattctcaaagaacttgagcaggctttcgacgtgcttggggttcggcttggcgagcaggtgcgcgtaactgattcggggagtaaccatgctttgtatcgtattcgagccggccggtgcgcgtgcccgaaagcccgtaatacgc

SEQ ID NO: 2622 - DNA, 141906 bp, Unknown
  R222_15m  MAG No. k141_33756
actgcgactgcgtaagacctcgctcctcgcgcacgactttgataacctgaccgatcgacatgactacctcccgacatcggaaaacgattcgagcgcctcgctgtgcgcttgctgattccattctaagggcatggcccgttcaccaagcgcgggtacaacaaaccgttgttcgcacttgcatcccggaggaagaaacggctcggtcgaacctatttcctctccgcacccttcaatgctcccggttcctctgactcctttgcgagcgccgcggatgggatgagcacgcttacgtatggggttgcgccagacaggacgtcgtcgtagaagcgctgtttggcgtcgatgaagtcgatggaatcctggatttccgcgagctgctcgaccagccgcgcccgcttgccggcgagcatctacttgcgttcggggatgctcggctcgtggaggagcgtaaggggcgcgagtaggggttcgcggctttgctgcggtctctccctcacccggctataccgggagctccctcgtcagagggagcttaaattcggtctggttataggcccatgggcttcttgggctttttgtcgctcatgagcatgaggaagctgcgggactgggcggtgatcatgaagcccgcctcatagctcagttccggcccatccgggttgtgcgtatccacgaccagctgccatttgcggccgtatcgctcatccggcagggtgaacataatcggctcgtaatgcgcgttgaagatcaggatgaagtcattgtcgaccatccggttgccgtaccagtcgacctccggaatatccgaaccgttcagatagatcatcatggagaacgcatgcgtgttctgccagtcgtccatatccatgatcgaaccggtgtggtcgaaccattcgacctgcggaatcatgttcgaatcgtcgccgggctcacggccggtgaaaaagcgacggcggtgcaacaccggatgatccaaacgcagatgaatgagtttggaaacgaaggcgagcagttccttgcgtcccttgtcaagatgccagttggtccaggagatctcgttgtcctgacagtaggcgttgttgttgccctgctgggtgcgggccacttcgtcgccaccgcaaatcatcgggataccctggctgaacagcaacgtggcgaacatgttgcgcatctgacgctgacgcaagtcgttgacgtccggaatattggtcgggccttcaacgccgcaattccaagagcgattgttgctctcgccgtcgcgattgccctcgccattggcttcgttgtgcttttcgttgtagctgaccaggtcgttcatcgtgaaaccgtcatgcgcggtgatgaagttcacggacgccaccggtcgacggccgttgacctgatacagatcggagctgcccatgaggcgtgatgcgaattcgggcaacgtggagggctgtgagcgccagaagtcgcgcaccgtgtcgcggtagcggccattccattcggaccagctggacgggaagccgcccacctgatagccgccggagcccagatcccacggttcggcaatcagcttcacgcgcgagatgatcgggtcctgctccacgatgtcgaagaacgcggacagcttgtcgacctcctggaactggcgtgccagcgtggcggccagatcgaagcggaagccgtcgacgtgcatttcggtaacccagtagcgcagcgaatcggtaatcaactgcaacgcgtgcggcgagcgcatgagcagcgagttaccggtaccggtggtgtcgaagtagtgctgctggtcgccttccaccagtcggtagtaggaggcgttgtcgatgcccttgaagctcagggtggggcccatatggttgccttcggcggtgtggttgtacaccacgtcgaggatgacctccatgccggcgtgatggtaggccttgaccatggacttgaattcgttgacctgctcgccgcgctctccggaggaggagtaggcgttgtgcggcgcgaagaagccgatggtgttgtagccccagtagttcgacaggcccttctcctgcaggaaggagtcgttgacgaactggtggatcggcatgagttcgatggcggtgacgccgagcttcttcaggtattcgatgacgctcggataggccagaccggcgtaggtgccgcggatgtccggcggcacgtccatgttgaggttggtcatgccgcgcacatgcgcctcgtagatcaccgaatcgtggtacgagatgtaggggtgctggtcgttgccccagtcgaaatacggattgatgacggccgacttcatggtgtgggcggccgagtcaaggtcgttcatcgccgaggtgtcgtccgggcttttgaaccagtaggagaacaggctttcgtcgccgtcgatgttgccttcgatggccttggcatacgggtcgagcagcagtttgttggggttgcatctgaggccgtgcatcgggtcatagggaccgtagacgcggtagccgtagcgttggccgggctggaggccggggatgtagttatgccatacgtatgagttctgttcggtcatttcgatgcgcgtttccgcatcgtgctcgtcgaacaggcatagctcgactttctgcgcaacctgtgagtacagcgcgaaattcacaccggcgccgtcatagctggcgcccagcggatacattgatccaggtctgatctgcatagttttcagtatcccactttcttgtgtcactgatgtgccggggagttgaacgtcaggagaacagcgacggcttgtctttgtcggagttcctggcaatgagtctgcgtaacgcctcatgctggatggcgatcatcgaattggatgaggtgatgcgcgtggcggcaaggtcgctccacggaatccacgcggattccacgtgctcgtccgcgtcgaaatggcgctgctcccgtctgaacgggcccaaatgcaacaccatgatgtgggccagttcgtcggtcatgccttcggacgagtagaaatcgcccacgaagtcaacacccatggtgtcacggtccggcaccacgccggtttcctcggccagttccctcagggccgcgtccatgatgtcctcgccctcgtccatgagaccggcgggaagcccgtaggcgaacatgtccgatccggcacggtattcgcgttcgatgaggtaacggtcggtggacatgtcgtgcacgagcatgaccacacagggggcgtgacgcagcacctggcggccgatctcgtgttccttgccctgcttgtcggtcagagcgatgcgcatgtcgtccacgtggaagatgcgcccggtataaacggtttcgctactgatcactttggcgggcacgtccatgtcgatgccgtccgaggaggcgttcagcttatggtcgagccgatgctccagttgttcctgcttgcttcccccaaacatgtcatctcctcggaaaaaacgttttcgccacgtcactatagcgccttaatcccgatgcgcggtaatggacagcgtccatggatcggtcgtgtcgtggaaccactcgacttcaggccttgctccggtcgcttgttcgatggcggctggcacgtcatcgatcgcgtagttgaaccacatggattcgatggcggcatgaggggtgttgatgaagcagggacgcacatggctctcccccgccattccatggccgagcatgatgccttgggccctcatacgggcttcataccgggcttgttcgatggcgtcggtcaccgggtggtgacgcaaatcgctggttacgtacacgtccgcaccggtggcacgcacctcgttgaacagggagtcaccggagccaggcagaatggccacatactgaacaaaagtgtccgaatcgccgcatacctggatgccgagcgcggtggtcatgccatgatcggacacttcgtcgaatacacgctgagcgaaatccttcagggcaacaggcttcggcaaacgacccacacgccccaaaccgaccggatgagaggcgttggcatcgtcaatcggcacgagtggtttctggtcgatgagtccgaagtagtcggccgccgcctgccccacgccgcgatacgcagcgtcggcattggtgtgccctacccacagcccgcagccgtgctggtagagcctgcggacgatgtcgccccggaaaccgagtccgctcgtctcgtgtacggaacggaagaacaacgggtgatgggtgatgagcaggtccgcgccggtggcgatggccttgtcaatgatggcggaggtcgggtcggcggcgaacacgatgcggtgcacgtcgtggctcagatcgccgacgatgagacccggctcatcccattcctcggcgtagcgcaatgggtacagggtctcgagaacgtcgatgacttgcttgagattcggcatatgtcccattgtagtgggctattgcggcaagggactcattctgcaattgcggacaagccatgctcgtgctcttcattgctcgactatcggctcgccttcgcctacaaacaatccactggactgtttgctcaacggctcagcctcctcacccgaggggagctagaaattgtcagtgtgcggcgagctgccagtcggaaccgataccgcacgatacgtccagcggcacggcaaggtcgacggcgtgttccatggcgttgcgcaccagttcggtgacctggtcgccttctcccggcgcgatttccactaccagttcatcgtgaatctgcagaatgatacggctcttgacgtgggcctctgccaaggtctgctcggcgcgaatcatcgcgatcttcatgatgtcggcggcagatccctgaatcggtgcgttgagtgccgcacgttcggcggcctcacgcgcaacacgattggtcgaatgcagggccgggaagtagcgacgccgtccgaaaatggtttccgtataccccttctctcgggcattggccaccagcgattcaaggtaatcgtgcaccttgccgaaggtatcgaaataccggtttttcaacgcttccgcttcacgtggcgcgatcttgagctgctgggcgagaccatacgtgctcagaccataggccaatccgtagctcatggcttttacgtggctgcgctggtcgccggtgatctggtcgaccggcagcttgtagaccatcgaggccacgtatttgtggaagtcggctccggagcggaacgcttcgatcagcgcctcatcaccggacagatcggccatgatgcgcagctcgacctgtgagtaatcgcagctcatcagggcctcgtacccctcccccggcacgaacacgccgcgaatctcacggccggcggcgttccgattggggatgttctgcaggttcgggtccacggagctcaatcggccggtggccgcgacggtttgctcgaaagtggtgtggatgcgctcatctgatgtattggtggcatcgatcagcgtttggacgatctgcttgagcttgttgatctctcggtggcgcagcaacgccccgaggaaaccgttggcccgctcattgtccactgatttgacatacagatcctgcaatgcggccgcattcgtggtgtatgagccggacttggtgcgtttggtgggcttcaaacccatatcttcgaacagcaccttctgcaactgcttgggactttgcaggttgatttcggtgccggcatactcccaagccatttcctgcgcctgacgagcctcggcggcaaactggtcacgcatggaaacgagtcgaacgctatcgactttggctcctgtgtgctccatgccgtgcagcacgcgggaaacaggaagttcaatcgcgcgcatcagccagcattgttcacgctcgtcgataatcggcccgagcgtgacggcgaggctgcggataatggccaaatcgcgcagacgatgttcgttcggatcttcttcgacctgatcgtcatcgaagtccaacgtgccttgcgaaggctgttcggtttcggtgaagtggatgtcgaggaagtgctcggccgcctgcttgaggctatcggcgtggaaatccggttgggtcagatacccggcaagcttggtgtcgaacatcggcaggtccatgtcaagatctaccgcgcccagaagatgcagcaattctttatacccatgcacgatggtgcgggagtgttcgcttttcaggaaccgcgcaagctgtgctcgcagggtatcggtgattggaaggggcactatggccgctgatgttgccgtggccacggcaatggtttgtgccgtggcacgccccggcctttcgtcgccccatgcggccacggtccaagcgcggccgaccgcgtcgccgcagacggtatgccgctgcgatccatcgccatagtcggaaaccgtgaaatcggcgatttcaccgggaacattgatctcgacgcgatgggccttgacccattcgtcgaactgctccgaagaggtgatgctcgtgggttccggcaggttcagatcgagactgttatcctgctcgtcctgttcattattcgtagactcgccggctccgtatgtgttggaaaccttggcaccggtattgaaggttttcagcacgcgactcctggtacgcggtccgaattcaagttccttgaacagggcgtcgatttgtgccacgtccacggtgccgaatgtcagatcctcaatatcgacgccaagatcgacatctcgtaccagtgcgttgactttgcgattgagcttgacctggtcgatattggcccgcagtgattcgccttttttgccgccgatttcatcggcgtgctcgcaaatgccgtcgagggaaccgaattggttgatccacttggccgcaaagccatcgcctacaccgggcacaccgggaatattgtcggcggtttcgccgcggagcgccgccagatccggatattgtgcgggagtgactttgtatttgtcgatgatggactgcggcgtcatatgcttcaggtctttgaagtgatgacccgggtacaacacggtgacgttgtcatccaccagctggaaggcgtctcggtctccggacaataccagtgtgtggtagccggccttgtctcccatggtggcgagggtggcgatcacgtcgtcgccttcgaatcccggcttctcgatgtaggtgacgccgagggccgtgagcatgcgttgaatcaatggcagctgggtgagcagctcttcgggagccgcctcacgggtgcctttgtattgcggaagcatctcattgcggaatgtgccgcccttcacatcgaaggcgacgcccagatggtcggggttctccgcatcgatcacctgcgcgagcatggtggcaaaaccccagacggcgttggtggcctggccgctggaagtactgaagttgtcgaccggcagggcgaaaaatgcacggaaggccagcgagtggccgtccaccaccagcaatgtttcattggtgggtacggtcacgctggcctctcccatagtgtgtttgtgttgctttacgactcagcacggtgatgccgataatcagcgttcgcccgaatcagaaggcttcggatcgccatacttggcgatgatggcctgagccaggcgcttcttggggatgcgctggtccatggaggtcttctgaatccaacggaaggcaccctgctcggagaagtcagccttgtccatcagcagacccttggcgcggtcgacgagcttgcgctcctcaagcgtgtcttcggccttcttgagcttctcttcggtttccttgagctggtcggtggtttccttgagcttgcgttcgctgcgctccacgttgtccagcagatcgttgatctcggcgaaacggcccatggccacctcgagggtcggcagcaacttggattcctcgtacggcttggtgacgtatgccatggcgccggcaccggtggccttcttcaccagatcggtctgggagaatgcggtgagcatgacgacaggggcgatgttctcatcgcagataatgccggcagcggcgatgccgtccatacgcggcatcttgacatccatgcacaccacatcagggcgatacttgcgggtcagttccacggcttcctcgccgttggcggcctgaccaacgacctcataaccgttgtcttccagcatggcgaccagatccatgcggttcacggcttcatcctcggccacgacgacggtacgcggaccatcctcggccacggccttgcgctcagcaggttcgctttcatcggctacggccttgagttcttcgtcggtcagcacctcatcgacgttgatactcggttcttcggacttcttccttgcagccatgccaacctctttcttgaattacccaacaatggggttcgtaataatttcagcgaactcctagctaaagtgccctcggtgggactcgaacccacactgcgcagattttgaggctgcttcctctaccaattgggatacgagggcgtgcctaagcactctgaagagagtagcataccgattcgactcctgcgacacaagacacgcgccagtcctccattcccccggtaaaacaggcgaaacacgtcgatatcgtggacggcgtacccgtgtgttgcccgttcttctgcgtggtttcaccgcttacaatgggctgtagtttcgatgtatcgcttttgttaggagggcttatgagcaacgaaacttaccgtcagttcgatccctggcgcccctctccggtcaaggagatttcccgtagacagattgtggagacgcattatttcaatgtcgatcacgtctcctatgagtcgaatcagatcggttcgtttgaacgctactttgttcaggagaacaatggcgacactgtggctgtgctggccgtcaccgatgacggcatgattccgctggtcgagcagtatcgcatcgccaaccatcgttggacgttggagattccggcaggccacgccaacaacccgtccgaacgcccgaccgatgtggctaagcgcaagctggccgaagaggctggtttcgatgcctccaagcttacgcagttcacccgttttatgaacacgccgagctattccacccagcacaccgcaatcttcttcgccaccggacttaccccggcttcccgtcaggaaatcggcccggagactccgcgttccgacgtgcgtatggtgtcggtggacgatgcctatgagatggtggtcaatggcacgattgtggatgccaagaccatggtcgccattctgcgtctgaagagcggcacgctcgatcatctcaacgactagtcaccacgctcgatcatcgcggtgactacgtgccattgcaatcaccgcacaatcgcaacataacggataacgaaagcccccccatccactttctggatgggggggctttcgcgtgctatgtgctagctgtcagcagctaccagcggcctgaaatcagtcgcaagcgccaacggtgtgcacgtagatggagtcggtgcggcccggctggtgatcgccctgagcagagctcaggatgacgatcttgtcgccgtcagcaaccttgccggcgtccttgaggatcttgtccgtgtagatcatcagatccttgcgggacttgtcgtggtagtcctccttgagcaggaaggcttcggtgccccaggacagagccagccagtggtaggtgtgctcgttgctggtcaggccgtagatcggggcggccggacgctcacgggagacgcggtgcacggtggcgccggtctgggtgtaagcaacgatggccttggcgttgagcttgtcggccaggtccacggcggcggaggagacggcgccggtggaggacatgtcgaggttcttgagctccgggatgcggtcgaagccgtggtcggtggcgtagccggagatgcgcgacatggtggccacggtcacatccgggtacttgccgacggcggtctcgttggaggtcatggtggcgtcggagccgtcgaggacggcgttggcgcagtcggaggcctctgcacgggtcgggaccggggagttcaccatggagccgaggacttcggtggccacgatgaccggcttggcatactggcgggccagctcgatgatgcgcttggtggccagcgggacctcttccagcgggcactcaacggccatgtcgccacgggcggccatgacaccgtcgaaggtcttgacgatctcttcgaggttctccagagcctgcggcttctcgatcttggcaacgatcgggatgcgacggccttcctcgtccatgatctcgtgggcgcggtcgatgtcggtggcgaaacgcacgaaggacatggcgatgatgtcggcaccggtgcggatggcccaacgcaggtcagcctcatccttctcggtcagagccggcagggagacggcgacgcccggcaggttgatgcccttgtgggaggacacaggaccggccacgacgaccttggtgtacacgttgttgccctcgaccttggtgacctcaagacgaaccttaccgtcatcgatcaggatcgggtcgcccgggtggcaatcgcccggcaggcccttgaaggtggtggaggtgatgtgctcgtcgccctcgacgtcatcagtggtgatgacgaattcctggccgagctgcagctgaaccttgtcttcgccatcggcgttcttcttgaaccaaccgcagcgaatcttcgggccctgcaaatcaacaagcgcggcaacgttgcgaccagtggcttcgctggccttgcgcacgttgttgtagaccttgaggtgatcctcgggggtgccgtgggagcggttcagacgagcaacgtccataccagcttcaacgagcttcaggaggttgtcgtaatcctcggtggaaggaccgatggtgtctacgatcttggctttacgcatgaatgcctgcctattcttgttcaatttggttcgaggcacgattgccccatttgccgaaacccagtctactagcgcgagccgactcatgacaagttttcttcacggtgtgttgtgagcgctcacattgttgtgttgactgggtttaagggttgtattctctaacgatttcaggccttctcggcgctttccatgctcttcatcttgatcacggaagccacggatgcgccgccaattgcgaccacaatcacagccagcgacagccatgtgggcacttccggcacccaatggatgccttcgccgccgttgatgaacggcaaggtattgccgtgcagggcctccatgatgagcttgacgccgatgaagcccagcaccacggacaggccggcaggcaggtagacgagcttgtcgagcagagcacccagcaggaagtacagctgctgcaggccgagcagggcgaacacgttggaggtgaacaccaggaacggatccttggtcaggccgaagatcgcgggaatcgagtcgaaggcaaacatgacgtcggtggtgccgatggtcaggaacacgatgagcatcggggtccagtaacgcacgccgttcttggtggtgcgcagcttctcgccgtcgtagtcgtcggtgatcttgatgatcttgcgcagattacggatgatgccgttttcgtgatattcctcgtcctcatcgccgccgagcaccagtttgacggcggtgtagatcaggaaggcgccgaacaggaagaacacccatgtgaagcgggtgatcagggccgcgccgatcagaatgaaaatgccacggaagatcaaagcaatggtgatgccgatggacagcacatacttctgaatctgcttgggcaccgcgaagttcgacatgataatgacgaacacgaacagattgtcgatggacaacgagtattcggtgagccagccggaatagaactcgatggcgggcttggagccggcgaagaaccagatgcatccgccgaagatcagcgccatgaccacgaagaaggcgatatgctgcacgcattccttggtggagggcacatgcggtcggcgcccgatgacgaacaggtcgacgatgaagaacagcgcgagcaccacgaaggtgatgatttcaaatgcgagtggggtttctgccatgattccctacactaacccatgtatgtgacgggtcatcgccccgcctcggtcatctgccggagctccttcttgagatcacggatctcgtcgcgcagacgggccgcgagttcgaactggagttgttcggcggcggtgtgcatctgttcggacagctggcgaatcaggtcggcgaggtcctgcgcgggcaggccggccttcaggatctcctcgtggcgtttgtctgcctcgttgggatcgagtaccggcacgcccaggtgtgtgttgccggccttgcccgcgttgcggtagccaccttcaagcaaggtctgggtgtccacatcctccttggcgagcatatcgttgacatcgctgatcttcttgatcaggggcttgggatcgatgccgtgttcccggttgtaggcaatctgcttggcgcggcggcggtcggtctcgtcgatggcttgccgcatggcttcggtggtctcgtcggcgtacatgatcaccgtgccggacacgtttcgggccgcacggccgatggtctggatgagcgaacgataggagcgcaggaatccttccttgtcggcgtcaagaatcgccaccagcgatacttccggcaaatcgaggccctcacgcagcaggttgatgccgacaatcacatcgatcttgccttcgcgcaacatgcgcagcagttcgacgcggcgcaacgtatccacatcggaatgcaggtattcgaccttgatgccgcgttccagcagatagtcggtcaaatcctcggccatcttcttggtcagggtggtcaccagcgcacgctcgttcctggccacacgggccttgatctcggcgagcagatcgtcgatctgccccttgaccgggcgcacgtcgatcttcgggtccagcaggccggtcggacggatgatctgttcgaccaccccgtcggacaagcccaactcgtagtcgccgggcgtggcggacagatacacggtctggccgacgcgctgcaggaactccggccatttgagcggtcggttatccatcgcggagggcagacggaagccgtgttcgaccagcgtgcgcttgcgggaggcatcgccctcgtacatggcgccgatctgcggcacggtgacgtgtgattcgtcaatgaccagcaggaagtcatcggggaagaagtcgagcagcgtgtgcggtggggtgccggcggcgcggccgtcgaagtggcgcgaatagttttcgacgcccgagcacacgcccacctgggtgagcatttccagatcgtaggtggtgcgcatgttgaggcgctgcgcttccagctccttgccttgcttacgcagttctgccaggcgttcgtcgagttcctcgcggatggttttgagcgcgcgttccatgcgttcggggccggccacgtaatgggaggccgggaagatgtggatttcgttttcctcgtcgatctcgtcgccggtcagcgggtgcagcgtggagatgcggtcgatctcgtcgccgaagaattcgatgcgcacggccagttcctcgtagacggggatgatttcgaccgtatcgccccgcacgcggaacgtgccgcgggtgaaggcgatgtcgttgcgcttgtactgcatggccacgaaccggcgcagcaggtcgtcgcgattgatctgctggccttccttgagaaacagcatacgcccggcgtattcctcaggagtgcccaggccgtagatgcaggagacggtggccacgaccacgcagtcgcgtctggtcagcaggttggccgtggcctgatggcgcaaacgttccacatcgtcgttgatgttggagtctttctcgatataggtgtcggtctgcggtatgtaggcctccggctgatagtagtcgtagtaggaaacgaaatagctcaccgcgttgtcgggcatgagctcgcggaattcggcgcacagctgcgcggcgagcgtcttgttcggctcgatgatgagcgtgggacgttgcagccgttcgatcagccatgcggtggtggcggttttgccggtgccggtggcgcccatgagcaccacgtcgttctcgccgttctcgatgcgcgtggccagttcctcgatggccttcggctggtctccggatggtcggtacggcgatttgaccacaaacggcttgtccacacgttcgatgttgaatcccatgcgctgtttccttccgattcacgctgtatcccgatgatatatcggaatatacgctaggcaactccaatacccgtcttcctcttggacgcgcagccaaccaccgctccgcgtaattgattgacacagatgagacattccaaatcccatgcccaatgttctcggagattccgccaatgctccatccgccatcttggcgggaacgtcagccaccgatacgtacagtccgtcttgccgcacttgtatggcgagtacatacccttgttcgcgatccgcgtgcttggcgatattggcaaacgtctcttccagcaacgaccgcgtcaactggatagtcttctcgtcaaaccgactcaggagatcgaagggatcggacacaaccacctcgcctcggaaaccaagcgttgcgagttcccgccggcgccgttcgatctcggcctcgaatcgacctgcaccgatcggaacaatggcttctccggagcgacgcgcatggcatcgcgggattcgcgcagtaccgacattgtgctttgcgagaaccgctatgacatcatgcgtctgatcgagcgcccgttgagccacttcgcgcaacagtggcaagtccatcgactctccttgcgaagggtgttccgacatgatcctgtcgatgctcatgatgagatatgagagatcattggtcgtcgcatcatgcagccttgccgccaaatccaacgattcggccctgccacgcgcttccgactccctctccccctcacgatgatgccaattcagcagcagaccgattccaacgcacgccaacgccggcatgacggtccaaggcacaacggacaccaacgccccggcatcccaacccatcggcaacccatactgccatatcagctgcgccacgcgagatacggtcacagtcaccgccaacaccacgccgcaccatatgcgttgataggagaggacgattaatggctcggctatcaccacgctcaccgacatggacagatccaccggcaaggggaacaccacgcaccatgagatcgccaacgcgatattgccgccgaacgggaatgccacgcagagcaacgacaggatgacgaacaacagacccacccacagggcccacgcatcccaaaccggattgatacacgattcgatgaccgtatcagcggctatgcacaaggcgcaggctagcgccgcgatcttctcgccatgccaagacttcccgaaatcgcggaagcgacgtctaagaaaacggctgccgtcacagaacatggtatcgctcacagtaatcaaggagttcgccgcgcctcgtcaccccgaccttgcgcatggctcgtttcacatagctgtacacagtttcgacaccgattcccaagcggcgcgcaatttcaatggtcggtacatgatgtgcatagagacgcaacaccgccagctctcgatcggagaagagcctggcaccatccgcttccggctgtgcggcatccaccgtatgcaatgtctcttcaaggctatgccaaccccaaccatgagggtatgttcccccgtcaaacaccgatttgaccgcctcgcgtatggtcgctgcgaaatctcttttcgaaatcaacgcttgggctccgcaacacgcgatatcctcaccataggttgccaggtcatacgaagtgactacgatgacgccaacctgcacgttccgctgtcgaatacgttccgtcagccgcactccgttcagcccgtccatcatgagatcgcaaataaggatgtccggcttccgcggatcgaacagacaacgttccaaggcaagactgggattatccgtaacccatagcatatgcgcctcgggaatcgtcctgccaataagcaaagccatcatctccgcagagcaacgatcgttgtccaccaaggcaagccgaatcaggcgcccgttcttcataagtaccccctccccaaatcgcctccgtcaaacgaaatcgtaacactgtgacgattcccgtcacacagacttcgttcgctcctcattggcgtcttaccgtgttatatgcggcaaaacagccgcgcaataatgtgcggcgagcgaacttcctatcgtccgccgcacaaacacattgttaccgggaataaggtgtatcatgcactggacttataaaatcgccagtatattggccgtggctctcatcactctcgcagcaggattctatgcgcagaataacgaagaaacctatccctccggccctagctacgatattggaatttccgacgcgcacgggcagactctatcgacattgaccggtctcgcagcgacccatcatgtcggactcgcgagagtctcctatgagccggacggtcacggtaccaacagacgcgtaatttctattttcggcgcattagacggcaacggcatgcatgcgaattcgccatacccggattatgggttcgggccgcgcacacgtgtgcaacgcggagacagattcaccgacccattgggaagatggcttctctatggatcaccacgggataccgcttcagtagccaaatccatacggcgccaaggattcgaacttaacagagcaacccccatcggcatcacacaaatcaccaaacaattcttctccaattccatcgcccaagtcatattcgccggacttgctgtagtatttgtgtccggcgcgctttccgtgtcgacagcttcacgcgtttgcgcgatacaagccttgcatggcatgagaacaaccggcattattatgaggcaattcctgcggcatgcgttctttttcatcatctgcgtctgcatcggatggatgacttggatttccattggtgcgatcttctggcctttcgcttctcccttaggattcgccggtcaggtattcctctccatcatcatcgccacaacgtgcatggcattggttgccttgtcattgtcgattgctctagtaagggttctggtgccgaacgcactcaaattaatccaaggaaagcgccctttacgttttctcatggcttccggctgcatcatggcaatcatcgttctcgctctcagctctgccagtttgaacgttacgaacttcaaatggcggcaatcccaaacactgaaaacaacattggagcatcaattgtcatccaacgacggattccaattgcaactgtggtatagccgcgatcaaaaccgagcccgttccatgccctcatggaatgacttcgtcgaacaaacttcccaatcagaacatacgcgattcgcctcattccggctaggatgcacgtgggtggatagctcgcaagacccacagccctgcatcctcatggattcccgtacggcaaggcttcatcatcttatacgaaacaacacgacacttgcacgaatcagtgtgattatgcccgagaatgaacaatggaacagcgaatccattacgaacaatgtgcttcgcgcatactcattcgagcaaagtttggcggcagaagagggaaagagtctgcccgccatcaatcgcacgagcatctccattgaatccagaccaagagatgctgtcttatcggcatttgacaccccttccaacaccgatggcctttcctctgttcctgttgttgtcattgacccgtcactgctctctggcgataccactacatcgatggtgtccaccggcggcatgaccttcgattacagctcccgccatcagctgctcgaaatcctacgggaaaagggcgtggactctttggtggcttcggtcgtcaatcggcacgacgagatacaaactcgtttggcacgaacaactcaggaaatgaactatttttccatcacagcttgcatatccataacatgtctgctgggcggcgcaatcatggtggctttgacactatgcacactccgacgtcaaattatgttcgtggaatatatgcatggagcgccgtcatatctccgttttcaatcgatactgttcctagcagcggcgttatgcagtgcatctcttccgatccagttgctcataggaggttacaacgccgtttccacgacctcggtttccttactattcatcgtcgtttcgctggcaaccacagtgctttacgattcgcggctgcgcgccgacagtatcaaacatccctgatcgccatccacaaacctgtatcagcaatcacttaccacgtaaggaacatcaatcatgagcgccttattgatcacgcataatctgacatatcgaatcgacgaccgcaccttatgggaaggactgaacctgacgttcagtcccggtgacatggttgccctaaccggagaaagcggatgcggcaaaaccactttgttgaatgtcctaggtcttttggaagagccaagttcaggaacaattacctatgatgggcaaacaattgcctccagaaagggccgacggctcatgcaccgcaacgtcatgggattcatgttccagaattacgccctggtggagcaatggacggtgaacagaaatctgattctggctctgcgcagcgtcggaataccatcggcagatagaagtcggctcatcagacgcgcattgcgggccgtgaatctgacgggctacggcaatagacctatctacacactcagtggaggcgaacaacagcgagtcgcaatcgcgaggcttctcatccgtcaatcgctgcgcgtcatactggcggacgagccaacagcggccctcgatgccgacaaccgcgccatggtcatgcgtcacctgcgtgatttcgccgacaacggagcgatcgtgatctacacgacgcacaacgaggagaccgcggccctcgccgaccgcatcatcgcattatgattccgccagccactgttcgtacagcgcatcgacggcttcgagcattcgacccatcggctgcgtggaatcgatcaccgcgtcggctatgacacggcgttgttccgggctggactggtggcgaatgcgcgcaagcgcatcatctcgcgtcatgccgcgggtcgacaccattctgtcgacccgtacttgttcgggcgcttcgacggtgacgatatggtcgaatcgcatgggcatggcgtccaggacttccgccaacagcggaacatcatgcacgaccacggcatccggattgtccgcgaccgcctgccgctcccgcgacagcgcaagatcatagatcaacggatgctcgatatcgtccagtttcctccgcatccgttccgagtcgggcccggcgaacacgtgctcggcgatccatcgccggttgagccgcccctgatcggtcagcgcgtcggggccgaaacattccgctatacgacgaagaccgacgccgcccggttccaccactcggcgcgcgagctcgtcatagtcgataagcgccgcgccgagctcccgcagtcttgtggacaccgtgcttttgcccgccgcaataccaccggtcaatcctattcgaatcatgctccccccatcatgccatgtttcgaggttcatgcacacaacggcaaaacccggcccgccgaagcgagaccgggttttgactatacgtcaggcgtcagtcgcccgatggcgaactcacttgccgagcagctggtcgcgcagggcggcgagctgatcggagtcggcgagggtaccggtagccggagcagcggaagagtagttggaggtctcctcgaccggcttctcttccttcgggccctggccgtcggcggctgcggattcggcagcgttctccagctccttggccacgaactccttgtgctcctcccacagctcgtgggcggcggcgtactgggactcccactcctcgcgctgcttctcgtaaccggcgatccactcgttggtgttcgggtcgaagccttcggggtacttgtagttgccctgctcgtcgtactcggccggcatgccgtagatggccggatcgaagtcctcggaagccgggtcgacggagtcgttggcctgcttgagggacagggagatacggcgacgatcgaggtcgacgtcgatcaccttgacgaacacggcctcacccggcttgaccacggtctccgggttctcgacgtgacggttggcgagctcggagatgtgcaccaggccctcgatgccgtcctcgacggagatgaagacaccgaactggacgatcttggtgaccttgcccttgacgatctggccgggaacgtgggtgcgagcgaagcgctgccacggatcctcctgagtcgccttcagggacagggagatacgctcacggtcgagatcgacgtcgagcacctcgacggtgaccttgtcgccgaccttgacgacctcggacgggtggtcgatgtgcttccaggacagctcggaaacgtggatcaggccgtcaacaccgcccagatcgacgaaagcgccgaagttgacgatggaggacaccacaccctcacgaatctggcccttcttgagctgggacaggaaggtctcgcggacctcggactgggtctcctcgaggtactggcggcgggacaggaccacgttgttgcggttcttgtcgagctcaaggatcttggccttgatcttctggccgatgtacggggagaggtcgcggacgcgacgcatctcgacgagggaggcaggcaggaagccacgcagaccgatgtcgacgatgaggccgcccttgacggcttcgatgacggtgccctcaacgacgccgtcagcttccttgatcttctcgatgtcgccccaggcgcgctcgtactgggcacgcttcttggacagaatcagacggccttccttgtcttccttggtgacgacaagggcctcgatggtgtcgccgacctcgacgacttcgtcaggatcaacgtccttcttgatggaaagctcgcgggaggggatgacaccctcggtcttgtagccgatgtccaggaggacttcgtcgtgatcgatcttgacgacggtgccctcaaccagatcaccatcatcgaagttcttgatggtggaatcgactgccttgatgaagtcctcttcggtgccgatgtcgttgatggcgaccttggtgacttcagtgttgttctctgccatgtaaatatatggtttctaatagtggatggataatttctcgatattcagttatacgcacacccttacaggcatacagatattcacaatacaagcaactctgcccaaatttcctaggaaactctaggcgtgtcgttcggccatttccacgacgttggccaggagcatggctcgggtcatggggcccacgcctccggggttgggggtgtaggcggaggccttgtcgtagcaggccttgtccacgtcgcccttgatgcggtagcgaccggcttcttcgtcgtagacgcggctgacgcccacgtcgaccagcacggcgccgtccttgatcttgtcgggcgtcacgaatccggccgaacccattgcggcgacgatcacgtcggcgcggcgcatgtggtcggccacatcccgggtaccggtgtggcacagggtgacggtggcgttgacggcgttgcgcgtgagcatcaggccaatcgtgcggccaatggtgatgccgcggccaagcacgcacacttccttgccgttcagatcaatgtcataggcgtcgagcagctcgagcaccccgcgcggagtgcaaggcagcggtgtcgaaatgtcgccgcgcacatgcagcaccagttcgccgaggttgtacgggtgcatgccgtcggcatccttggccgggtcgatcatgtcgatgatcgcgttctcgttgatgcccttgggcaacggcaactggacgatgaacccggtgcaggccggatcttcgttgagttcgcgtacggcagcggcgatgtcgtcgaagctggcgtccgccggcagttccttcttgactgaggtaatgcccacttcctgacaatcggcgtgcttgccggccacgtacttcatcgacccggggtcctcgcccaccagcagcgtgcccagccctggttggatgccctgcgccttgagcttgttcactcgctcggcaaggttggtcttgatttcggccgcgattcgtttgccgtcgatttttgtggacatcaacgccctcccctgtggtttcggtgcattctatcgaaacgataggctatcgttggaacaagtcaggattatatatcgttcgctctcacgaagaaggcgtgccatggggactcaaatcacacgacttacgcgactcgccgcagccggcctgagcgccgtcctgttgttcgcgaccgccgcatgcgcagccacctcccccactgaaaccgagccggacaacaagaccagtgttcccgcaccgaccgggccgatcaatgtggtcgcctccctcaatcaatggggctcgctggccgccgagctgggcggcgatgatgtggaagtcacgtccatcgtgaactccaccaatgtggatgcccacgatttcgagccaaagacctcggacgtcgccaagctgtccaaggcccagatcatcgtggccaacggtgcgggctacgattcctgggccaccaaatcgatgaccaagaccacgaatatcgtatccgccgcttccgtcatgggtgccatggaaggcgataacccgcatctgtggttctccaaagacgctcgatccagcatggccacggccatcaccgatgcatatgtaaaggcgctccccagcaagaagaaggccttccagaagcggctcaaggcatggcaggcggatgagaaatcgctggaaacatgggcgtccgagttcaccagatcccactccgacctcacctatgcagccaccgaacccgtggtctattatctgatggccgatctcgggttcaagaatcagacgcccaaggggtatacgcaatcgaccgcttccggcggcgaaccggcccccgcggacctgcagtctttccagaaactcatcgaagacaagggcgtggatgtgctggttaacaacacgcaggaagccagtgacgcgaccaatatgatcactggcgctgccggtcgtgccgatgtgccggtagtcgacgtctccgaacaaatgcccaaggataccgacacgctgaacgcctggatcaaccagctcatcaacaccatcatcgacgcggtggatccgagctatggctgcgaagacgccacggacggcaacgcgaattccgatgattccagcgccgacggcgccgccacggatgatgccaatgcgcacgattccaaggccagcaccggttccagcacggagcccaagtacatccgtcagtgcaaggcggccacatccagtgattcgtctcaggattcggcaaaggccgatgcctccaatggcgattccggcgatgcctccggcaacgaccagaccgactccggcaaatagttagaagcaaaggacagcggcatcggattcatgcaatgccgatagacgccttgcacgagaagggttgtgcgaccattgtcgagatggccgcacaacccttttctttggttgtcaccatccgtacacgatattgagaacgattgtcagcatcgtttgccacaatcgggcgttatgagtgaaacttccgattgcatcgtgttcagcgatgccgccatcaagcgtggtgaccatatcatctggcagcatggcacctttgccattcccaccggttcggtcacggccatcgtcggcaccaacggcaccggcaaaaccacgatgatgagggccgagctgggacttttgccgctttgccatggcagcctgaccgtactgggcaagcctgcgggcgagatgaacaaacgcatcggatatgtgccgcagagctatgtggcgaatgtcgattccaatctcaccgccgaacaatccgtgttgctgggcctgaccggcacccgattcggcatccaccccatcaccaaggcccagaaagccaaagcgctcgaggcgatggagttcaccggcatcgccgacaaggcgcagtaccgtctgtccgaactgtccggcggtttgcgccagcgtgtggccatcgcccaggcgttggtgtgcgatccacaactgctgatgcttgacgagccgttggccaacctcgatctggccagtcaacgcgccaccgtacacgtgctggccaagctgaaccgtgaactgaacatgaccatccaggtggttgcgcacgatctcaatatgctcttgccgattctgaccggtgccgtctacttgctcgacgggcacccgcactacgccgatatgcacaaagtgctcgactccgacctactcacccacctctacggcacacaggtgcaggtggtcaccactccgcagggtgacatgttcgtgaccccgacgccggatgagccccaggaccagccgcaggatatgcacacggcagccgaagtggcgcaattgcaccatcacgagcacggcaacgccaccaatggcagtgccgccaacagcgccgagaatcgataacatcaagctagccgatccacagcccgtcaacgggctgcagctcaggcatggagaaaatacagggacatgagcaccatcaacttttcgtatgatcccgaatggctggacacactgtccgctccattcatgaccaacgccttcatcgccggcctgtgcattgccctggccgccggtgtcatgggatacttcaccatcgcccgtcgttccaccttcgcggcccatgcgctggcccatatcggtctgccgggcgcgaccggcgcggtgttgctcggcctgcccgtatcactgggcatgggcgtgttcgcactgggcggcgcactggtgatcggtgctttgggcaagcgcgtttccgagcgtgaaatcgcaaccggcaccgtactggccttcgccaccggcttgggtctgttcttcgcgcgattgtcgagttccgcctcccagcagatgcagtcgatcctcttcggctcgatcctgaccatcaccaccggccagatcatcggcttcgccgtgttcgacgtattgctgctggcattgttggccatcatctaccgcccgctgctgttcagctcgttggatgagcaggtggcacaggccaagggtgtgccgatcgggctgatgaacgtggcgtttatggcgattatggccggtgtaatcaccattgccgtgccggcagtgggcaccttgctgattttcgcgctggtgatcacgcctgcggccaccgccaatattctggccggctccccattcaaggcgatggtgatcgccagcgtgctgtgcctggtgtcgatttgggccggactcgtgctgtcggcgatgttccccgcccccccgagcttcattatcgtgacgctttccaccctgttctgggctatcgccaaggccgtggagacagtgcggaagtaatctcattcatttttcttgccctccgctggcaaattcatagcgggggctttgttatatcttctccaccaaggcattggcgatggcggcgatgccttcgccgcggccagtgaatcccatatggtcggtggtggtggcggtaaccgataccgggcaaccaaccgccgcagacagggcggcttcggcttcagcacggcgtgtgccgattttcgggcggttgccgatgatcgccaccgaggccgatgccggcgtatacccgttggatgccagatgcgccacaacttcttgcagcatatcgatgccatgccttccggcaccatgcgcgtccgcaccgacaccgaacagtgaaccaatgtctcccaatcgggcggcggcaagcaacgcgtcaatcagggcgtgcgcggccacatcgccatcggaatcgccttcgataccctcgtatttggcggcatcggcctcgctgcatgaatcagacgccggccagtaaagcccggcaatccacagttcacggcctgagccggcaggcgcaaaacggtgagcgtcaaaaccctgccctatcaacactcctgcagaccccatgcagtccccttcgatggcgctacccagacgaacggcagcaaacgattatgaatcacgaagccccggcgtatcgcataaggacacgaccggggcctcaacaatcaaatcacttcttcttggacttcttctcggcttcgacacgagccaaagtatcggccgcggcctcttcgggctcggcggtgtgatgcttgtcgtcaccgggttgagcgggctcgtagcccaggttcacgtcgagcagacgctgggcttccgcctcgtcgatcttctcggacaaggcgatctcagaagtcagaatggcgcgggccttggtgagcatacgcttctcgcctgcggacaggccgtgctcgtcgacatcgcgctgggcgagatcgcgaaccacttcggcgatcttgttgacgtcaccggtggcgatcttttcgacgttcagcttgtaacggcgagaccagttcatctctttctcgatgatcggggtccgcaggatgccgaacaccttggccacttcggatgcggagacgatgtcacgcacgccgaccttcctggcattgtccacgggaacgttgatgaccaaaccatcggaagagagtacggacagctgcagatattcgcgcgtcactcccttgaccgtccgctcggtaatggcctccaccttcgctgcaccatgacgcggatagacgaccatatcgccgactttgtaagacatgtaccctccgagaactgacggcttacacacaaaaactcgattaattatgccatgcggtctggaccgcccctatgagagcgctcacaaccacggagacacaccgaaaagggcaagaattcgccattttcgacgcgccaatgtagcgttttcgactccaacgcacgtagactttgggtcatggctaaagaaacgaagatcaaggaagataccgtcaccgtgcctgtcgcccaaggcgacctcgatgcggtgagcaatgctgaattctacaacccccacggagttctcggcgggcatctcggcatcggcaagcatgccgacaccgccacaatccgtgtgctgcgtccgcttgccaagtccgtgaccatcctcacccaggatggcgaatacccgatgacccacgaatacaacggcgtgttcgtggctaccgtgccggcctccggcaccaagaagcagcccacgattcccgactaccgcgtcaggaccgagtgggaaagcggcgcagtgctcattgaggacgacccataccgttatatgcccacagtcggtgacatggacacctatctgttcggcgagggccgtcacgagaagctctgggaggcgcttggcgcgcacgtgctgcgctatgacgatccgatgggcggcgtggacggcacgcctggcgaacaggtggtaggcaccgcgttctccgtgtgggccccgaacgcccatgccgtgcgcgtggtcggtaacttcaacgcctgggatggccgtcgtcatgccatgcgcgagctcggctcctccggcgtgtgggagatcttcattcccggcatcggcgcgggcgagacctacaagttccagatcctgaacgccaattacacgtgggagatgaaggctgacccgatggagcgtcagcacgaggttccgccgcacaccgcctccatcgtcaccgaatccacctacgagtggaacgatgacgcctggatgcagcaccgccgcaccaccaacccgcatgatggcccggtctccatctatgaggttcacgccggcagctggaagcagggactgacctaccgcgacctggccaagcagctcgtggactatgtcaagcaggaaggcttcacccacgtggagttcatgccactggcacagcacccgttctccggctcctggggctatcaggtcaccggctactatgcggtggattcccgcctcggctcccccgacgacttccgttacctggtcgatcggttccatcaggccggcatcggcgtgatcatggactgggtgcccgcccacttcccgaaggatgccttcgcactcggccgcttcgacggcaccccgctgtacgaggacccggacccgctgcgcggcgaacaccccgaatggggcacctatgtgttcaacttcggacgccgcgaagtacgcaacttcctggtggccaacgccctgttctggctcgaggacctgcatgtcgatgcgctgcgcgtggatgccgtcagctccatgctctacctcgactacagccgcgaacccggccattggcgtccgaacatctacggcggacgcgaaaacctggaggccatcgacttcctcaaggaagccaccgccaccgcgtacaagaacaaccccggcgtcatgatgatcgccgaggagtccaccgcatggccgggcatcaccgcccccacctccgccggcggcatcggcttcggtatgaagtggaacatgggatggatgcacgacaccctcgagtatctgcacgaggagcccatcaatcgcaagtggcaccacaacgaaatcaccttctccatggtgtacgcctactccgaacactacgtattgcccatcagccacgacgaagtcgtgtacggcaagggctccctgtacggcaagatgccgggcgatggctggcagaagctagccggcgtgcgttcgatgttcgcctatcagtgggctcacccgggcaagaagctctccttcatgggcaacgagctggcccagtggggcgagtgggatcacgacgcctccatcgattgggattgcctgaactggcaggagcaccgtcaggtccagaccatggtcgccgacctcaacgccttctacaaggcgcatccggcactttggagccaggacttcgatccggccggcttccagtggctgaccagcgacgatgccgaccacaacacgctgagcttcctgcgcatcggcaccaagggcgagaccttggccgtggtggtcaacttctccggtgaagcctggcccgattaccaggtggcgctgcccaccggcggcaagtggaccgaagtgttcaccaccgatgacgccaagtacggcggctccgacatccacaacggcaccttcgaagcggtcgagggcgaatatcattcgcgtccgttctcggcgaagatcaccgttccggctctgggagttgtattcttgaagccggaagactgaactggtcaacaggctgaaaggtaaccggtttatttatgctcaataccacagcgcgtcagaatacgacaccgcgcatggtgctggtggtcgaggacgagcccacactcgccacggccattgcccagcgcatcaccgctgaaggatggaccgctcgcgtggccggggacggcgcttccgccgtccaggccgcgtcccagctacgccccgatctggtaatcatggacatcatgctgccggtcatggatggtcttgaggccaccaaacgcatcgtcgccgaacgtccggtgccggtgctgatcctcaccgcacgtgatgacgaggccgacaaggtcatcggtctgggagcgggcgccgatgattacatgaccaaaccgttctccatgcgcgagctcatcgcccgctgcaaggcgctgctacgccgcgtggagcgtgcgaaggtcatcgccaagaattcggagaacgagaagctgctcgacttcggttcgatggtcatagacccggcccagcgcatcgtcaccgtgaacggcgagcaggtgcatctgacccccaccgagttcgatctgctggccacgctggcccgccgcccgaagtcggtgctcacccgcgaaaagctgctcgaagaggtctgggactgggtcgacgcatccggcacccgcaccgtcgacagccacgtcaaggcgctgcgccataagctcggcgccgataccatccgcaccgtgcacggcgtaggctacgctttcgagccgccgaccgcgtgatggcatccaaaaaacaacagcaatcccggcttgatgcgatgaaacctcgcgtcaagccggttgatttgttctcctctctgaagctggaactcagcgtactgatcgttatcgccactgccatcgcgtttgccatgtgctggttcctcctgaaattcggctggtccggttggatcgccatgccgctgactttggtggtggccttgggcatcacctatttcttctcccgcggcatcaccgctcccttacgccagatgcgcgatgtggccgaagccatggcggatggcgattacacggtccgcgtggatatcgatcaggatcgtcatgacgaggtcggccagctggctcgctcgttcaacgagatggccggcgaactcgaacatgccgataaaatgcgccgcgacatgatagccaatgtgagccatgagctgcgtacgcccgtttccgctttgcaggcgatggtcgagaacatggccgacggcgtcaccgagcccactcccgccaatctggagagcatcctcacccaaacgcagcgtctctccgacctcatcgccttcctgttggatttgagccgtatggaggccggtgcggcgagtctgaatatcgaaaagttcaacttcgccgactttcttgacgagaccatcgagccgttggaaatcgccgatggcggccacgcccacgacatccgcgtcaccgtgccggccgacatctcgatggaaggcgatcaggaccgcctgcgccagctgttcaccaacatcatcgccaacgcactgaagcattcggccgacggcaccaccgtgctggtcgatgcccatgaggatgacagccaaggcaccatcgtgaccaatgtggtgaatttcggctcccagattgcaccgtccgaccgttcggatatcttccggcgctttgtcaaaggcaagacgggtcccggcaccgagtcgggcggcaccggccttggcctgtccatcgcacgttgggcggcccaattgcacggcggcaccgtcaaagtggtcgatgacacgcgaggcgccgatttcgaaatcatcctgcctaaatatcacgtcgccgaacgctgatattgtccgccgtcctaccgtatactgtattcgaacagatgttcgaatacagggtgggaggcacagcatgacacagcaatccaagtcacgaaccatgccgcacgacaccacgctgtttgtcatgcagatggccggcgattccatgatcaatgccggtattcataacggcgatctgctgattgtcgatcgttcgttggcaccagtccccggagatgtggttgcggctgtcatggacgatgaaatcgccatcaagcggctggtttcacgggccggcatcaccatattgcacgccgagaatcctcgatatcccgattacatgccgagcaacggcgcttcgcctgctatctggggcatcgtcaccgatgtcattcacccgttgatatcgtcatcggaccgtcgcgccacggcatccgccaataccagcacgcccaccaccttggtgccggcctgctgaaacacctgaacgcattgccgcacggtggcacctgtggtgacgatgtcatcaatgagaagcaccgcgtcgccatggcctatgagatcacgcttcaccctgacatgaccggtgatacgacgggcacgctgtaccgaagaggtctgctgcacggagcgtgccttggtggaggagctcagggcattgcatggtcgcgcattgacaccgtacccacgcaatgcccctgccaccgatttggccaacggtgccgtatgggcacgccctcttcggcgcattgacgcccgcgatgacggcaccggaaccaccaatacgcgatgccccaagcatgatgatgatattggcgtcttgttcagcagcgacaccatgatgcggccgaaagggccgtcaagctcggtatcgtcgtggtccttccagtcgagaatggcacgacgcgccgctccctggtaaatcgatgcggaccatatacgggctccgccaccaccgtctgtatcccgctcccggcattgtgcgaacaaggcccgacatgccgcacacaatacctcatccggcgcgtcacacccagcgcagccgcgtggaaacagcagattgcaggcctgtgcccacatcgcatgccaccacttgtatacgctcggcctgtccataacgcgtcaccatcaagctggagtatcgaatcgcgcaagcagtgcatccagcagttgtaccgtgtcttgcggattctccacacgaacaccgatcgcaccggcctcaaccgcaggatagtcattacccgtaggcgtcatgcgatcgcccacgaacaccatttcatcggcctgtatgccaagtgtctgcgtcagcttgcgcacggcataggccttatcgatgccgcattcgctgacatccacactggtgtagccgccggccctgacccgcatgtgcggcagatcggccttgaccgcttcgaccagcgcctgtttcttcgtgttatcgcgatcccatgcctgtttggccgctacgggtgcgaactgtcccagagcggagaaggtgatctggctgcccctgttctcgattcgaggcccccatacctgctgttcccacaatcccagttcccgggcatgtcgctcaagactttccgagacagcggccacggtggcttcggacagatcatgcgcatacaccaaggcccattgcgtgccatcccaccggtaataccgggagccggaggcaggcatgacatgcagattgccgcgcctggcattcggggtgagtacatccagcacctgtgaggtgaccaccgccatgccgccccctgagatcagggccaccaccgtatggtcgagcagcgcacagaaccgttcgatcatcgcgggcctcatcggctgttttgagctggccagcgtgttgtccaaatcgaaaccgaacaccttggcgttggagcagacattatcgaaatcaagttcggaccacgaacgtaccaccatttgtcgcgcctccctcgttgacgaatgttcacagccaatgaaccaatcctaacgcatgttgcctccgccatgtcctatggtgggaaccatgcttcagccaccttggaacgcacgaatctaccgcaaccgccacggtcgcggcacacgaaccccgatgttcggcacccgtctgccccgttaccgcactcgcaccggcatgttcgacgatatggtggcggcccaggttcgcaggctcggccaagcgtggccggaactgatacgtccgctccagttcgcggtggaggatgcgccgccttcggatccgacgccttggcagaccgagccgaatatgacgtcccagtgcttccccgccagccacggcattcccgcacgagtcgtgctctaccgtatgccgttgcagaccgaggcacctaccaagctcgaattgcagttggccgtcagggatgagctggtggctcgcatagcggaattgtatgggcgcaggcccgaggaaatcgaccccgattggggcctgtgacagtattgcgggggccgtgccacttcaagtaagacagtggcacggcccccgcagctatatcggcgccgaaacatcatcagaccgatgcttcggcgagcgcgctctacttgacgatggaggaatcgttccgagcccagacatggaccgtggcgggcatcagcgttgaagcgtcgatggcggacaatccggcgatgtccttgtcttgcaacgaatcgtgactgaaacgcgctccccagctcactttcttggatgagtcctccaacatcagcacgaccgcggtgccatgatcgccggaaagtttgccggtctcaatcgtttgcgccgcgttcgcatccagcgtgatttcctcggaggtcaccgaagcaccggcatcatcgtaggcgtgcaaggtgaccgtcctgcgcgcattggacgtattggccagcgtgatggaggcctttactccgtcgggaagggccaaccccgagaattcggatggctcgccggcattgaccaatgcgaaatcggcttggccggagtcaccggagcgtgtggccttgacggagaacgacacggcatcctctgcggtggacatcacgcccaacgccccatcaggagcctctcccaagtcgatcgccgtcaccttatcggcagtgacggtggcatctttggcgggaaccaatcctttgtcggtaatccatgacagcccggtgctggtgtctgccttggcgaacagataagcggtgaccgcatcgccggcagtgatggacggcgccaccgacgcattggaggcggtcggcagcggcagcgcgaaatcagaacccttcggtgtcagaccatccatggtcaccgtacgtaccacggacgcgataggagtctccttgctggaaacggtcacgaacagaccatgctgcccatcgaccgcggcggacagttccatcgaggactccccctcggccggcacagacagcgtggattgtgtggacaatgccattttcccggctgtctcggaaccccagacggcaatgtcgacggtggtcggcttggtggagggattcgagacgatgagctgctgtgtggtaccggtcgtgccgccggagagcaagaacgactggctgagcgaggtcgatacgcaggatgccgccgatacgcctctcacatcgccgtcatcggcccatgatgcgatggtgccgacggtgccggtgccagctgcggcctgcaacatacgggtattgatcaggcgagctccctgatcgatcttctgagcaccggttttcaccgaggaatcgtcggtcggatcggcgtctttcaaagtcacgtcatctgaactggacttttgcccgatcgccgagacagtggcgctgtagacggagccgaacgccgcgtagcgcgcctgtgtgctcagattgccgacagtggcctggaaggcgctgtcgccgtacgtgccggtatcggccaatcctataggtgccgggcagtaggtttcggactgggtcggactaactgtctggtcgatggcattatcggaagcggccaccttgtccacccagatattggggatgggggccatgacgagaacgacgaacagcgcaatcaacaccagcatggtgatcacaccgagcacgatgccgatcgcacgtttgaaaccagaagttgtgttgctcatgcctgctcctccaatccgtaggacggtcgtctgcgaggcatggcgaccaagcagtacaacgccgtgatcacacctaggcatatcagccaggcgtgcctccagacactatgctgtgcacgttgctgccatgaggtatccacctgctgtgaggtgctgctacgcagcgtcagacgatagtagctgccgctatccgtggagaccagggactgggtgccgttcgatgcggcgatattcgcgctcaactgttcatacggcatgtcgttcgaggaatcgccggtctcgggaaccacgtagatgccgccgaatccaagcgcgctgatggccgcgatggcctcttcgtcgggattggacagcagcgaggcacaggcctgggccagctgttcgtcaaccgcatcatgcttgccggacagcaggcgcgcccgctggaccggagagctgtcgatcagatcgccgcgcgaggtgcgcatcaccgcatagttgacgatgttgcgggtctccgcgctcacggcaagcacacgatgatcggcactggcctccagataatcggtggtgaccatgggcaggccgttttcggacacgcccagtcccgcatccttatgacgttcgatgccatacatgcattggatgccgatgcagcacaccagtatcagagcaagcaccacacggccagacacgatgagcgcatgcagacggtcccttttcggtgcgggatcgctgccggacgcatgcaacggttggaatcgcttcaccgccccaccggcgacgaggcacacgcaggcaaggaagcccaatatcatcatcgcgatgccaggctgtgcggaaccggccacgacgccatcggcatccacggctatggccacacggctggaaatcagggcgagcgcgcctccgcaaacgattaccacccacatcagccgcgaggtccgcaacgcgaacggcagcaccagcgaagcaagagcgagcagcgtgatgacgccgaacagcacagtgaccgccaaatcggcataatcggtcgatcccattcgccatcccagcgcacgctgtacggcctcaagcaggctcagcgacgccggcgacccgttggcggatgacgttggcactgtgatgtcgccgaacagttgacgccacatgcccaaatcggcgtaacgcaccgcattgacgagcgtaggggccaccgcaaaggcggcaggaaccggaataagcaacagcatggcgcgcttgcggcgcacgaacagcaggaacatcaggaacacgacgatcagcgcgaacagcagctgcggttcggcggccaccacagggatgaagcacagtgcggcgatggccgcggcctgaacggatgtgcgcggcttgagcgggtcttcggtatggtacatgcccacggcacggaacacgaatgcgaacgcggccggcaggaacaccattacggtgagcatcggcatattggcctgcgcataccagccgaacataatgccggtggatgcccacaacagtcctcccagcacacgaaccacgtccgagcgggtgaatacgcccgccagcgcccagaacgacaatgcgctcagcggcgcggccacaaacagtatcatcgccagagcggcggtcacatggccgagcgtgaccagcgaggccagcatcagcaccagcagccacggcgtgggcggcgcaggaatgccggtgccgctgccaaacacccatggcgtggtggcggactgcaccagttgagtgaagctggcaccggtggaaagcaacacatcggaatacaacgatccaccggagaatatcgaacggaacaccggccaatacatcaccacgatggccgcaaagcacaccagcgccatcaccacggctgcgctccagcgatatatggtgcgtgtccgcagatgggcacgttccagcggactgagcagcactctgccctgctgggattggaatgcatcccgacgatcatggaactgcttgatctgccgactgtcggcgaacaaaacctgcagggacgatgcggcgaccttcgactgtctggccaccagcctgcgcgatttcatgtttcccgcgatatcggccaaagccaaccatggcaggcacaattgcacccatgcttcatacggcttcttgccgaacatcatggctatggccatgccaaaactgcgaatcagcctccacagccagacgataatccaggacgacatggccaggtcagtgtacagatagcgctgttgggagcgatgcaccgtcatcgcatgattgaccgtgtgatcttccttaagcggctccccgcctcgcgtacgaatgccctcataccgtgcgcgacgatgtgatatctccgcttgcgggactaccaccacgcgtccgccgctcaggcagacacggcggcagaaatcgaccgattcgctgtaggtggtcagccaggcattgatgccccgcagtcgcgtgaattgcgacatggacaccagcgcgcccgccagcgacaccgcgaacacatcctgtcgcccgtcatactgctcctgatcgggttctccatcgaccaccagggaatgcacggcgtgtcggcctgcatacataccgacatcatgcaggtgggatccttcccaatcacactgtttgcacccgagcacgctggcccccggcgtattgcgccacgcctcaagcaatcgttcaaggcatgaggcatccgaggggcgggaatcatcatggagcaaccacaatgcgcggggagcgtcatccaaatcggcccgatccaacgcccggctgaccgcatcgccgaaggaacgcgcgcccttggccgaaacgatgtgaatggtcacatgcttggactgcggcacctccactaccggccccgatggcgagggaatgacctcgaacgaagtggttatcctcgaaccggcgcgcccggtcgcgtcggcgatgatgacgactcccggaagaacattctgcgtcaataccgaacgcaatgtagaccggaggaaacgcatatcctcctcaacggtgatcacagccgtaatgccggtatccacatcctgcctatgcgtatacggtcgagaagacatggcgtcggccaacgcctcatgaatatcgctattacctgtcggactcataaactcccagtgtacgcaccagacttgaagggggtgtgtgtggaactacgcctgctcccggtgctctcgcttatatcgacggcgttcgcgctcgctcatgccgccccaaataccgaatcgctcatcatggtcgatggcccatttcaggcattgttcacgcacttcgcatttggcgcacacacgcttggcatcacgggtcgagcctcccttttccgggaagaacgcctccggatcggtttgcgcgcacaacgccttgtgctgccaagatacatcgccatcaggtcggaatagtccccacaattcatgccatggctcttcggctgaatcgtcgaccacaccccacatgcgattctccttgcctattgagcttttcatacggactaaattacacacatgcaatttcgtttttgtcaaattctttctcgtgtcattacatcatttttatggaactgtgtgctatggcgcggacacgatgccctgatgccgttgcacatgatattgtgccgttcctgcgcaggaacaccatagcgcaggaacacccggcggatgctgtgtcaaagtgtcattcagacaatcgacagtttcaggaggggttatgacgcaggaatcaggtggggcggatccgcatatcaacccgccaagcttcattcctgcgggaaatcgacgcacccgaccttccgggcaggtgccacgctccttcgcccctgcccgcgcctcacgtcagtcaggtcaggctccatcggcccgtccgtccgtcacgggaaatgacatcgaagagcctcaaccgaacgccaacgccacggcaagcgccaacgtcacggacaacggcaggcggactccgcccagtttttctccgaaaaccggacgtgccacccgcagcacggctccggatgccgccgcaccgcgcagcattccgccgtcgcgagcgcggatgtcttccggctcatcccgcaacgccgtgcgcaatccgtcggatatgccggtttcccggccctcatcgccagcagcaaacgtgtccacgaagttcagccatattggccggccggcggcggcaacggcgaaaacggtaacggcacaccggccgcgcgccttgcgcatcatcttatgcgcgattgcggtactggtggcggcgttgattctttctgttttcggtgcctggcaatgggtggacagcaaactgaaccggagcgactggctgaccgacacccccaacacgccggcctcgacctggctgattcttggctccgacgagcgagacggttccaccgattacggcggcgtggacaatatctcaggcttcagaaccgatacgattctggtgctgatcaagcctaaaagcgggccgagttcgctgatttccattccccgcgattcgcttatgaacgtcgataaccagtacatgaaaatcaatgcggtggcgcagattgccggcaagaaagccttggtaagcaacgtcgagcagattaccggccagaaaatcgaccatgtggcgcagatcaagttcggcggtctgcagaacgtggtgaacgccttgggcggtatcgaactgtgctatgacgaggatgttcaggattcctattccggactgaactggaaggcgggatgccatacgacggatggttccactgcattgtccttctctcgtatgcgatacgccgacgcgcgaggagacttcggacgcaacgaacgccagcggcaggtcatctcggccatcgtcaaaaaggcttccagcagtgggaccctgaccaatccgtccaaagtcgtggcagtgtccaatgccgcgatgagcgcactcactgtggatgaaaaaaccaacccttacacgttgctcaccatggcgttggcgttcaaaagcgccaccggctcgaatggcatctccggcagcgtgtactggtccgaccctgattattacgttgatggcgttggctcctcggtgctgctcgatgacgccaggaacaccgaactgttcaatcagcttgccgacggcacgcataaggccggcgccgtgggcaatctggcggaaggctgaccgacgctttcccggagcccatcggcttcatcgtcggcgcatgatcgccgccgttgcccacgcagccaatcatgcacgggcaaaatgtcatgtggataactcggcaagctagaaccacataccttgattcggcttgcgctttcggcatgcgctcccccacgctggaagcatgacatcacagcagaacgattcgaagcgacattccgcccatacggcatccgccgtatcccgggcgaagcaccgtttgggcgcgccgccattgcgcgcccgcctgaccatgcttgccgcggcgtgcccgatgatcgcgcaggcactgatgatggtcatactgctgttgcacgggcaatggctgttcgccgccatgatcacgccaggcatattcgcctgtctcgtgtccctgctgctgacgctccccccacctccgggcccggagaagacccccgccccgcaacaggcaacgatcgatatcggtatcacggacgatgccgatgcccgcgccgcagacctccgtcatgcgccgtcgcagccgatagaatcgctgctgcacttcgcacgcctgccatggcgcaccattgtgggccattggcttgaaccccttgaccttgcggtgccgatcggcatgaccggaagcgagccgctgaggctcgatctgaaccgtcaggggccgcatgctctggtggccggcaccactggttccggcaaatccgtgttgctgcaaagctggtgtctggcgctcgcctcgatgaacgggcctgagcatctgaatttcgtgtttttggatttcaaaggcggttccgcgttccgcaaactcgaacggttgccgcataccgtgggcagcgtatgcgatctggatctggcgcatgccgtacgcgcgttgcgtgcgctggaagccgaactgacacgccgtgaacagctgtccgccgctgtccatgcttccgatatccgtgatatggtcaatccgccaccgcgcctgatcgtggtcattgacgaattccatgccctgaaggaccagctcccggattatgtgaatcgtctggtgcgtattgcctcgctcggcaggtcactgggcatgtatctgatcgcctgtacgcagaatccgatgggtcaggtcagtgccgatatgaaggcgaatatgtccgtcagcatttgtttacgggttcgggaccgtctgcaatcatgcgagctgcttggtgatggtcgtgccgccgacctcagtccggcaatgcccggtgcggcgttctgcaacgattccgaacaggtgacggcattccgctgtgcaacggcgcgcgatatcgatgcggtatgccgccagatcgcgttcgcatcgcggttcgtcgggagcccgccgcagccgtccctgtttaccgcgccacttccccggcacgtaaaagaccggactgtggccaatcacgcaccgcaacgcattcgatttggacttgccgacgatggcatcaacctgcgagaagcgacggtatccctcaccggtggcaatatcggtgtcatcggcccgcaggggcgcggcaaaaccacgttgctgaaaacattggctcgacacgccagcatggctgatggcttggcggtacgtgtcagttccccgaatcgccgggtatggggatcgcaatggcttcgcaacggccgctgcacgccgtatgccagctcggatgcaccaccgcctccgcatatcgtgtggttcgtcgacgacgccgatgagttgttcgacccattccgcaccgacgagcaggcgctgtctttcacacatgcgttggccgatgagtccgtcagcgtggtattcgccgtcagcacgattcgcccgatacgtataccagagcattgcaataccagaatcgtgttcccgtgcggggaacgaacgtctgaccttatggccggagtccccgctcgcctattggatacgatgagtcatatcgatgccgacaacgcgggccgggccgtgctcatcgagggcacatcggcatgtctggtgcagtgcgcttcgtgaaaacttcggttttttctcggcgaaacctcttgaaaatcaccacggttcgtggttaccttggtactggacttaaggaacaacaccagccacggggcttttaagggaggcaagcaatgagcagcgcttttgattggcgagccaaggccgcatgtcgtgacaaggatccggaactcttcttcccggtgggcaacaccggtgcagcctatcagcagattgaggaggccaaggccgtgtgccgcacctgcaaggtgattgatgcatgcctgaagtgcgctctggacaccaatcaggattacggcgtgtggggcggcttgagcgaagatgagcgtcgtgcgctgaagcgccgcgccatgcgcgcccgccgttctcaggccatgcagatgcaaatctgatgttttgattatcgcttcgtcatactaggaaaccctcccacttgggagggtttccttatttttgggcttcgcatcactcatcctgagcggccctgagcttcatatcaagcaccacgcgggtgccgccttcgcggcgcggctcccaatgcacggaaccaccgaaatcattggtcacaaaggtgttgatgatctgcgtgcccaaaccagaaccggaagaacgagccaatcctccctgttcttcggagccgagaccggaaccgtcatcctcgaccaccacattgaggttcgggccggagcggcccacggaaatcgtgatatggccatccttgcggccttcgaacccatgctccaccgaattggtgatgagctcggtcagcacgagggacagcggcgtggcatcctgagcgggcatcatgccgaacttgcccatgtagttgatatcgatgtgctggtctttcatcgtggctaggtccacggccatacgcagcaggttggcaatcaccttgtcgaagtcgacgacctcgtcggcggtctggctcaatccctcatgcaccatggcaatggtctgcacgcggcgttgcgcctcctgcaattccttcttgacctcatccgacttggtcttacgagcctgaagcctcagcaatgcggagacggcctgcaggttgttcttgacacgatggtgaatctcggaaatcgtagcgtccttggtctgcagctcctgctcacgacggcgcagctcggtgacgtcacggcatagcagaatcgctccgatacgaccgttgttgtcatataagggcagcgagcgtatcgagacggcggaacggttggcgttgagttcggagtcgaccgcggctttgcccgccagcaccaacggcagggtttccggaacggggtcgttctccttcaacagctgtgtgccgagttcgctgaggtaatggccaggcatggtggtcagcaggccgagacgcctaaagcagctgatggcgttcggggctgcgtatcgaaccacgccgtccatggtcaggatgatgaagccgtccgccacgcgagcgatatggcgctggctcatcaccgaatccttgtaggggaactggcctcgcggaatcatctcgtacagctgtttgcccgcgttaatgctttccgactcatatcgaccgttggattctcgtgtggccatattggtctcacgcacgaccaagcccaaggtcttgccattgtgccgaaccggcgcgtacacgttgcagacggtcgccttgcccacggttctcaataccgtggagcggaacaccacgctggagagcatggcggcgtccaattcgccgaccatgtcatccggcatgacgtttcccaccacgtcttccgcccgtagcgtcatcacggtggatgggcggcattgttcggccaccacgtatttgccgtcaccgttctgtaccagcagcagcaggtcggcaaagctcaaatcggcgatcacctgccaatcggcaacgagatgatgcagccactcgcggtcctcgtcgtcgaagtcggggcgcgttgcaaggatgtgtgaaaaatcagccatgcccctatcatacgcagacacgtcgccgccattgcggcaagccacacgggcaagtatgacgactattacgacatcgcatcttcaataccgcaccaatcgcgttgcacggctgcccgccgttcaggcggtcatcgcctcatacacctgagaggacaatgcggcgatctgctgctgcgcggttcccgagaccactcccgaggtcataaccaccatcacataatcccgttctgttccgtccgcggccttgccccacaccacggcggcatcattttccacgccggccagttcaccggttttattggccacctgaatgccagacggtactccggcgggtatcttggcgcgtcgcgtctgcccgagcaatacgtcaagcatggagcggctggcttcggcggaaaccagtttgcctcggtacaatgcagcgaggaatctgccgcaatcggaagccgacgtccagttctcggtgccggtcccgtctgtgccggcatcggacaacacccgcaactgcttggatgagctgaagccgtatcgggcggccgtaccagtcacccgttgcatgcctgtggccatgtcgccatcgccgaccatcaataccagctgattggtggcagcgttcgagctgacggtgatcatctggttgatcagcgaggtggtatcttgcccgcccgcggccaaggtgccggcatgttgcttatcgtacacggcaagcatcacgtacagtttgatatccgaagccgccaccatgggctggccgccgacgctcacggttttgcccgtggccagatcctcgacatacaccgaccaggtgcctccattgccggccacagctgccgtgaccgccgaggacacatctgacatccgcttctcttccgccaccgtggtcaggtcgggagcaggtgccgccttgcgctccaaggtgtcatgcacagggcgttgttcgtgtttcgatgacgccgttgacgacgatgccgacgctgttgccggtgagtctgatgccgaggcgacgggcgatgttttggcgtgcgatgcgccgagaccgttatgcgcgtacatccatccaccgacgccgattaccaaagcggcgatcagggcggcgatcaggatcaatcccacgacgctgcctgttgcacgcgtgtcgctactatgcttggtatgccgagccaccgtcactgccccaatgtcttgtcaacactggccagcacccggctcatcaggtccgcggccaccgactgcccctgatattgggtgacaacggccacggcggccttatgaccattggcttcgacgatggcgaagtaattccaggtgtcctggatgccttggcctcggtgggcatgcacgatcatgtcggacggaatggttacgccttcggaagcaatgtccacgttcatcaatgacgcacctcccttggcgtccactgcggcgagcatgcgggccgcatcgcgggaggaaccgtaattctcataaccggcattgctggccgccacatcgccgaaatcacggttgaacgaagtgcccttatacccatgcgaagatgcccacgaattgacgccgctccagccacctaccgccgcggccgccatattgccggcattgttgtccatggaacccatcatcgcgtttgcctgcgctttggcgttgtcatcgccattgtcctgggccgcaagatagaccggcagatagagaccggcagccacgaattgcttgccggactgcgacgtggtcgcgatggtggcgtcctctgaggaatcggcgtatgttccatcgatgaccatggcggagacggccacatcggaggacgagtatgaatccgcgatgtcagacaactggctggatgtgatcaccggagtggaaggcttcgacttctccgtcgagcttttcttggacgaatcgtcgctgttcttgtctttggcgctatcagacgtgttcttcttggccttggacttggcgtcagaggaatccgtcgtgccatcatcggcggaatccgacgcatcggacccggtcgactgtaccgatgtttgcgcctgcggctgagctccccacaatcccatgctatgggtgacgaacaagccgatgaccaacgccacgacgcaaatcagcgcgatgagcacaatcaccaccgctttggtgtgatcgccgccaggacgcccggcgggaggttcaggagaagcaggtgccgcagggccagcggtcatgggtcccggtgccatagaccccggcaccgcggaacccggcgccgttggcggcgcgacggcgggcaacggcgccgccggctgcttcaccagcgtcagcgcgttatcgtcataggcaggggccgccggattggcctcgggctgctccaatgggcttccgcactgcgaacagaaggcatttccttgctcgttggcaaacccacactccgtgcaatacaccatcaccgaaccccttattgctgtgacgttctcatcttcggattccatagtatcgccaccattgggtgatagtgttcgtgtgagtcggtattgacaagcataaaagttacgctaacgtaggttacggcagcgtaagaagcgtatcgtcaactcgtgaaacgggggcatcaccatggcatcaacaaccgacgacgcggaaaagacgatgcatcacgacgctcataacagcgcgacgattgcagaggatgccaccatcgcatccaagcgtcaggcggctatcgaggcgcgcgaacaggcgttgcaggccaaggctgatgccgtacgggccaaggcccagttcaaggccgaggccattcgagccaaagccgaggagaaggcccggcacaagctcgccaaagcggagcaccgtgcgctgaaaatcgagggcattgcccctgcggaagtggaacgcaagattcgtctcgacgtgcacggacgaccaaagccgttgatgcgcggctggattcacgcgattgccgctcccctgtcattggcggcaggcatcgtgcttatatgcctggcacatggcgcgagtctgaagtgggcgtgtgccgtgttcatgacagcgtcgctgattctgttcaccaattcggcctgctaccatctgggcgattggagcccgcgcgtcaccgatgtgctgcggcgtatcgatcatgtcaacatcttcctgctcattgctggcacgtataccccggtttcgtttgcgctggaaccgttctggcgcaatgtgatcatcatatcgatgtgggcgtgcacggccatcgccatcgtgattcatgtgatctggatcaatgcaccacgctggctgtatacggtggtgtacatcatcttcggcatctacggcctggcttatatggtgatgttctggaattcgccgtatgcggggccagccgtggtggtgctgctgtgcgccggcggtgcctgctacatcctcggcgccatcgtctacgccttgcgcaagcccgacccttggcctcgcgtcttcggcttccatgagattttccactgcggaacggtggccggatatgcctgccatatggtggccatctacatggtgatcgtctcgctgtggcaataaacgctacgacatataagtatgcccccgcctacgggggcatactagtcacttataactcaggccagcggcttggcggccttgaccgtcacggacagctcgcggccgttcggtgcggtgtaggaaacgacgtcgcccaccttggcaccttcgatggccttgccaatcggggaatccggggtcatgatgtcgtagtcggtgccggccacgatgtcacggctgccgagcacgtaggtcatctcgttgccgttgagctcgatggtcaccacagagccctcgcccacggtgccttccggggcattctcgatgatcttggaatcgcgcagcttgacggtgagctcggtgatgcggccctcgttcttgctctgcgcctcacgggcggcctggtagccgccgttctcggacaagtcgccctcggcacgcgccacggcgatcttgtgcgcgatttcctcacgcagctcgccttcacgatgggcgagctcttccttcatcttgttgtatgcttcctgcgtcagcaggtagaccttgtcctcagccatatcgtcctcctgaaccgttgtcgatgctgaaacaattttcgttatttatgacaaaacgccggctatgaccccggcgttcgtcatgtgctgacctatggtcagcgggtggaaatgatgtcgatgacgaacaccagcgtgtcctcgccgccgatgccggcctgcgggatgccgcgggaaccgtagccgtattccggcggaatggaaaccaccagacgcgagcccacgttatggcccggcacggtctggtcccagcccttgatgacctggcccacgccgatgccgaagctggcgggctgatgacggtcgaagctggagtcgaatggggtgtccttaccccacaccacgccgtggtagttcacggtgacggtgtcgccgcgacgcacgatcgggccgtcgccctcggtcagctccacaaccttgaggcccttcggggcttcgggcgccgggaactcgataacgggcgtggtgccgaattcggcgttcacctgaggcatctgatctgccattagtcctccttcaaagacacaatgcgccctaccttagcaccatcggcgaatcggcggtagttcttcatccctgtgcgatacgacacgctggccgtatacgtcaattccggtcatcatgctggtgaataccagacatgtcaatcagcattcgacgacattgacggcaagcccgcccttggaggtctccttgtatttggccatcatgtcttcaccggtctgcttcatggtttcgatggcctgatcgagggtcacgatgtgtgagccgtcgccgagcatggccatacgcacggcgttgatggcggtgttggcggccatggcgttgcgttcgatgcatggaatctgcaccagtccgcccaccggatcgcaagtcaggcccaagttgtgttcgatgccgatctcagcagcattctccacctgttccggcgtgccgcccatgactgcggcaagtccggccgccgccatcgaacaggccgagccgacttcgccctggcaaccgacttccgcaccggaaattgaggcgttgcgtttgaacaggtatccgatggcaccggcggtcagcagaaacgtgaccacgccctgttcattggcgttgtccacgaaatgccagtaatagtgaagcacggcgggaatgatgccggcggaaccgttggtcggagcggttacgatgcgcccgcctccggcattctcctcagagacggccaaggcgaagagatccacccatgcggcgtcggaagactcgagcacggcgtctttgcgccggctgtcgcggcgcagcacatcggaattcgaagcgagacgccgatacatcttcggcgcgcggcggggtacgtcaaggccaccgggcaatgtgggctccgccgaggtgcatccgtggtccacgcaggcgcgcataacacgccagatggcatcaatatcggaccggacctggatgcctgagcgtgaagcggtttcgttggcccatacaagttcggcgatgctgagatgatgttcccggcacaacgacaccagttcggcgcatgatgagaacgggtagggtgcctcgacgccgaaatcagtggatgatgattcgtccgcgtcggcaaaggaggtgccttccggaggacgttcatgaatgccgatcatcgggtcttcgggagcgcctttgcgcacgaatccgccgccgatggaataccagacctgttcgtcgaccaagcttgcggcggcgtcgaaagcctggaatcgcatgccattggggtgcgcggccatgcgcttccattgttcgaacaccacgtcgcggtcgtagtcgaaatggatgcgtttgaggccggcgaggttcagagtatcgtccaacgcgcaggtctcgcggatgcgcatcatgtggtcggtatccacggtggccggcagattgccttcgagcccggccatcgcagcacgatcggtgccgtggccgagaccggtcagcgccagagaaccgtaaagcgtgattttgacacgtgcggtgcgatcgaccaaatggtcggccagcaacgaggaggcaaaggcatgtgccgcgaccatcgggcctacggtgtgcgaggatgaaggtccgacgccgatggtgaacatgtcaagcacactgaacatttggctccttctcccctgctggttcggcatgccggtgtcaccaggcgtcatgccatcacgatatcgtattccagcctagcgcccggaatctttcgctttgcgcgatgatggccgcgcgcgtcgtgccggcgagcgataagtcagtcagtgagatagtgcggagaacatcataaccagtacgatgataccgatgacggccaatacgatctgcaccaccatcagcccgatggtcagtcccttcttggtggcgattttgggcgcgtacgcctgtgccaacaggaaggcgatgaagccgaacaccgcgtagttgacggtcagggccatcacatcgctgttcgacaacaccacgccgttcagcggctggttcagcgtgttcatcatcgtgctcatcacgaacatgccccacacgccgtagccgattaatccgacgacgccgtacagccatggcttgagtttgtcgttggcacgcagggtcagggcttcggcacaccacaacagggcgaagccgacgatgtaggtgaacgccacggcgatcagtatcacgatagtcgcccacggcaggagtgcggccacattgccgatcatggacagatagaatcccgagcaggcgatggcaccaacggtgagtgcagtgcccgcaatgacggcttgggcaagcatggtgggcagggcgccttgttcgactcgttcgacatcggtccagcgtgaagccatgtggattcctcgtttcatcaggtacatcgtcacaacgccacatagcctaacggccttttgtttcggccttataagctctccacatagtaagctgcgagcccctctgacgaggggagctgtcggcgaagccgactgggggagagaccgcggcacagccgcaaaaaacggcatcggccacaggccgatttcaaggtgcctccggtgggactcgaacccacaagccgaagcgatcgattttaagtcgactgcgtataccatttcgccacggaggccaacttttctattataagctatctcctgccctgagcattgcttgcgggttgctgcgcttcgtgcagccgtcgcggcatagccgctcccttcgcctacaaacagcccagtgggctgtttgtagcagccggtagcgatagcgtcgccggcgtcgcatataacgcaaacagcccaccgggctgtttgcttaacggctcagcccgctggaggcacttaccacttacgctattgagccagcaaccggcgaccataatcgagcacaatgccgtccagcagcccgtgttcgctggcgacgaacgaatcgatggcttcaccatgatcggccttggcggcttcgctgacacgcgccagcacacggctccagaccacagcgccgccgccgaccacatcgatacggccggggtggatggtcttgtattcgcggcgctcggcgcgcgtcatcctaaggaacttgtcgtccacggcataggcgtcttcaaggctcaaccgatgcccgtcgaccacggtgtgatcgtattctttcaatcccatagccaaggcggtcatcgtggtcaccgtgccggacacaccgatgatggtacgggccttgcctgcgtccacggtgcggaaggcctcatcgatatgctcgtcgatgtccgcaacggcctcatcgatctgcgcctgggtcggcggatcgttggtcagatgacgttcggtcatgcgcacggaaccgatgttcatggagaatgcgccctgaacctgggtggtgggcgcactgacgccgtcgccaccgatgaccagctcggtggacccgccgccgaggtcaaccaccagatagggggcgggcagatcgtcgcgattgaccacggaagtggcgccgaggaagctcaggtcggcttcttcagtgccgggaatgacttcggggcgcacgccgaggatacgttcgatctcatcctcgaactcctcgcggttttccgcgtcacgagtggcggaggtggcaacgaaacgcaggccgtcgatgggatgctcggcaatcacaccggcgaattcccgagcagccgcataggcgcgttccaacgcttcgtcggcaaaacgatgggtcttgtccacatcctgaccaaggcggatcacacgcaggatgcgcggcaccacctcatgcatgccatcggcatcgacacgtgcgatcttcagtcgaatggagttcgtgccgcaatcaatgccggcgacggttacggattccttgctcattgccttctcctcgtatcccttagtgcgtatgaatgggctgttcgcggtggctcatctgttgatcaatcatccagcgtgcagcggcagacggtcggatcgaattcgtctttgacgcgttccagcaccaaatcgccaatggggttgacgcccggccccataaccaaggactgggccagcagggcatgcaggcacttgacgcgcaccggcatgccaccggccgaagtgccttcaatatgctcctcactgtcgccaagacggcctgccagttcgtgacggaatgccagatacagattatgggcctgctcatatgcggccttgagctcctcatcagcggccagcatatcgttgtattgctgcatcacgccggcggcctcgacatgggaggcggccttgacggcttccggaccggtcagatagcacgtggtggggaaagggattccgccgggcaacaccggacgggtgattacggcaagtggcctaccgcagacgcatcgcgcccccacggcgaccatgccgcgcgggtatcggccgagctgacgctgcacctggtcgatgtcatggtcgttggcgggctcggcaagcatggtgtcgacaagggccttggccttggcggcgatatcgatggtcactgttgggttccctcccctgtgttttgctgggtgttctgatcggattgggtgttctggtctgacttatcggactgcttggatgagtcgttggatgacgagtcagaggaaccggaagtatcggatttgccggactcgctatcggtcacaggctcatcggcctttttgagcgagtaagacagttcgctgtaccatggcaggacttttttgttgctggtattggaatcttccgttttctgggattcgcgatcggagccggtcacggcttcgggatgcagcacacgcacggcctgttcgccggggaatacgaagccgaggcgttcacgggcctgggcggtgatgtaggccttgtcatcccaacgcttgatatcgttctccaactcctgcttttgggcgatcagcgaggcttcctcacgcttgaggccattgagctcggccaggttcagggcataagtgtggaaggtggagaccagctggatggtgccgagtgcgatgatgaacagggagacgaagaacgctatgggccccgccgacccttttttcctgacttgtgctttgccggttttgccaggtttgccggtacgggacgacttgctcatgtcacatgaaaatacccgccgcattcgacttgacgaacacgacgggtatcgagcttcagtggaaactcacgcctttacgggcgtttcagctcacttggccaagtacttcttgcaggccttgaaggcgctgtagccggcgtactgagcggtggagccgagctcctcctcgatctcgagcaggcggttgtacttggcaacgcgctcgccacgggccggggcaccggtcttgatctggcgggtgttcttagcaacagccaggtcggagatggtggtgtccggagtctcgccggagcggtgggaaaccatggaggtgtagccgttggcggtggccagctcgatggcgtcgagggtctcggtgacggaaccgatctggttcagcttgaccagcagggagttggcggcgccgaggtcgatggccttctgcagacgagccgggttggtgaccagcaggtcgtcgccgacgaactgcagacgatcgccgaggcgagcggtgatggcagcccagtcttcccagccttcctcattgaacgggtcctcgatggagacgatcgggtactcgttgatgaggttctcgtagtagtcgagcatgtaggcggagtcgcgctcttcaccgtcgaagcggtacttgccggtctccttgttgtagaactcggaggaggcgacatccaggcagatgccgatctgcttgccaggctcgtagccggcggcggagatggcgtccatgatgtacttgagggagtcctcgttggacttcatcttcggggcgaagccaccctcgtcgccgaggccggtattcaggccttccttcttcagaacgttcttcagggtgtggtaaacctcaacgccagcgcgcagagcctcggagtaggtgtcgaagccgtacggggagatcatgtactcctgaatgtcggtggcgaagtcagcgtgagcgccaccgttcatgatgttcatgttcgggaccggcaggatgtggccgttggtgccgccgatgtagcggtacagcggcaggccggcggactcggcggaagcgtacagagcagccagggagacacccaggatggcgttggcgcccagcttgcccttgttcggggtgccgtcgagctcgatcatcaggtcgtccagagcgcgctggtcagcagcgtccatgccgatgaccttcggagcgatgacctcgttcacggccttgaccgcgttaagaacgcccttgccgccgtagacggacttgtcgccatcgcgacgctcccaagcctcagcttcaccggtggaggcgccggacggaaccagacccttgccctgagcgccgtcttcggtctccaggtagacctcaacggtcgggttgccacgggaatccagaatctgacgcgcgtacacgctttcaattactgccacaactactccttaaaacggttgtgtatcttgaatgacattcttaagagtagtgcgatttgtggacgttgtgaacaacacgcccaaaatttagtgttagcgctcacaatgccgatgcgccgcctgattgcaaggcagtacggacgaaatcgctcagtcgacgtccttgccattgaggtagtcgatttcactgtcggacaatttcagttcgctggctttgaacgagtcctgaatctcctgcgggtttctggccgagggaatcgtgaacagatattggtattgcgcaagttcccacgcgagcgtgacgcgctggtaggagcagtcgtgggacttcgcgacttcacggaaccggtcgaacagatgctcgttgaacgggtcaaggaatccaccgagcggcgaccagcagacgaaagccaaaccgagtttttcgcaggtctccaacgtgtgttcggggtcgcggtgaaccggggagaactggttctggacggccacgagacgatcgcccaaaatgttgtgggcggcttcgatgtccgcgttgtcgattctggagataccgaccgctttggccacaccttcgtccacgagctgcttgagtgcgcccatctggtcttcgtacggcacctgcggatcattgcagtgcgagtagagcagatcgagcgtatcgacaccgaggcggcgggctgattccttggcattggcgatcatggtttcgggtcgggcgtcggcctgccagccgtagttgccgttgccgtcaagcgtgcgcagccagccggttttggtggctacgagcacctgatctttggggccatgccacgagtgcagagcatcgcggaccagatattcgccatagcccatatcctccggttcgccggtgccgggtgcgctgggcagataataggaccaagccgtgtccaaataacggactccggcatcgagcgcggcatggatggtctcgatcgcctgatcacggttggaggggcgcccctcgatggcgagcgccattgtgcccatgccgaggcggggaatctcatagccggcaagtgttgccgcgtgttggtttttcatcgttgtggcctccatgccaagtcatcgaggagttggttagtccagaggactacctggtcggagctcatggggccttggcccagggaaccggtgaacggggtgggtacgatgagctggtgggtgaccgggcggtattgggcgcctttgtaaatacggcccatacgcatctggatggattcgggcgggtcgatacggccgatgcgcacgcggttggattgcgcgagaatctccgaaatgccgagcttgcgggccttgaacttcagacgggccacgtcgaacagggtctcgaattcgaccggcggcttgccgtaacggtcggtaagctcctcttccagatccttcaaatcggcctcgttgcgagcggaggcgagcttgcggtacgcttccagacgcagcttgtccgaatcgatgtactcgatcggaatcgacgcttcgatgggcaggtcgatggacacggccaccggctcgacgttctcttcgggctccttgtacttctccacggcttcggacaccatgcgtacgtacaggtcgaagcccacgccctcgatatggccggactgctcgtcgcccagaaggttaccggtgccgcgcaattccaagtccttcatggccacatcgaaaccggagccgagcgccgtgttctgcgcgatggtggcgagccggtcatgggactgctcggtcatcggcttggacgggtcgtacaggaagtaagcgtacgcgcgctcgcggccgcgaccgacgcggccacgcagctgatggagctggctcaagccgaaacggtcggcatggtcgacgatcagcgtgttcgcattggagatatcgagaccggtctcgatgatcgtggtgcacacgagcacgtcgatgtcgcgatgccagaagtcgcggatgatctggtcgagctgcttctcccccatcttgccgtgggcgatgccgacgtgcgcctcgggcaccagcgtgtggatcttgtcggcgatggacgagatatcctgcacacgattgtggacatagaacacctggccgcctcgcagcagttcgcggcgtacggctgcggtggcctgcgcatcctcgtaggcgcccacataggtcagcaccggcaaccggtcttcgggcggggtggcaagcgtggacatctcgcgaatgccggtcacggccatctccagcgtacgcgggataggcgtggcagacagggacagcacgtccacgttggtgcgcagggctttcagcgtctccttgtgttccacgccgaaacgctgctcctcatcgatgatgacgagtcccagatccttgaacttgattttcgggttcagcagcttgtgcgtgccgatgaccacgtccaccgtgccggtttccagaccctcgatggtctcgttgatctctttggtggtctggaatcggctcatggccgccacattgaccgggaaaccctcgaatcgttcgctgaacgtctcgtaatgctgctggacaagcagcgtggtgggcacgagcacggccacctgcttgccgtcctgcacggccttgaaggcggcacgcagtgcgatttcggttttgccgaagcccacgtcgccgcagatgaggcggtccatcggcacgggcttctccatgtcggatttgacctcgtcgatggtggtgagctggtcggcggtttcctgataggggaaggcatcttccagttccttctgccatggggtgtccgggctgaacgcgaagcccctggcgcgctggcgggcggagtacagcttgatcaggtcgtcggcgatctcgtggacgtgtttgcgggccttggccttggtggccgcccagtcggagccgccgagcttgttgagcttgggggcttcggcaccgatgtatttgctgacctggtcgagctggtcggtggggatgaacagtttgtccgccggggcgccgcgcttggaaggcgcatattcgatgaccaggtattcgcgagtggttttgttggcgccggtgccgatggtgcgctggcgcatttcgatgaaccggccaatgccgtgctgctcgtgcaccacgtaatcgccttttttgagttccaccaagtcgatggccttgcgccggcgtttcggcgttttggccacggccacggccgaagtgcggccggtcaggtcgcgttcggtgagcagggcgattttggcggctttgtccacgaagccgtcgatggcctgagagcggatgacgtcgaaattggcgatgccggtagtgttgatcgcgcgcctgagcctggccaaggtgccggccgcagcggcggtgatggtgacgtggaagccggcgtcgagcaggccttcgatgccttgggaggccttggcctcatcccctcggaattcggccgggttctgggcgtcgagctgcacatggccggtcagcgtggtgtccacgccgaaactggtgaggcgaatcaccggatgttcggagtattcgagggagctgatggtttccgcatagtcgaggaagctggctttgtcgaagctgatgggcgcgccggcgccgtggccggaagcggccacatgccagctggcggccaggaactcgttcgcggtttttgccaagtcttcggcggaacggcgcagtttctccgggtcgctcaggaggatcacggcgtgcttgggcagcatggagcccaccggttccagatggtccacgagcgcgggcatcagggattccatgccttcgaccggaatggcgttggcgatggattcgagcatgtcctcagcattgggaatcgaaccgaccaaggctttggcgcgggcgcgcacggcgtcggtcagctgcagttcacggcatgcggtggcccagatggtcttgaggccgtcgccgtaggtacgctggtcggaggcgtggaattccttgatggtgtcaatttcgtcgccgaagaattcgatacgcaccgggtgcggtgcggtgggcgggaacacgtcgaggatgcctccgcgcaccgcgaactcgccacggtccatgaccaggtccacgcgcgtgtaggcgttttcgatcagacgtttggcggcttcgtcgaggggcaggtcctcccccacggtgaacacgagcggctcgacgtcgcccagtccttggacgaccggctggatgagcgagcggatcggcatgacgagaatgcgaatcgggccgaacatcggatcggtatcgctcggatgcttgagtctgcggaacacggccatgcggctggccacggtgtccgcgcgcgggctcagacgctcgtgcggcagggtttcccaggcttcgagctgggcgatgtcgtccgggtcgccgtcataccaggagcgcagcgagcccacggtctcttcggcttcgcggccggaggccacgaccagcacgaccggcttgccgggtttgccggtcacaccctgcccgatggcggcggccaaagccgggcgcaagccttcggaaacaccggccagaacggaattgtcgatgtcgtccgaaacctcgatgtcaccagtggcgagtctaaggaaggtcttgtcctgttccagctcagacaggatgcctaccagtgagccgttgatcaggtccgggtgcgtcgcctcaccggccattgaacttctcctgggtcttggcaagaccgcggaagatgatgtcctcggcggcgtcggcgccgtcagccaggaattcgggcagctgcttgcgctggtccggaccgaatccgcccagcacccagttcaccgtgttgtcatgcgcgttcgcaccgcgcttggagtgaccgacgcccatgcgcacacgcgcgtatttcggcgtgccgagggaacggtcaatcgacttgatgccgttgtggccccctgcggagccgcctgccttgaccttgatacgaccgaattccaagtccatgtcatcgtgaatcaccacgatatggtcgggctcgatctggtaataggcgctaatggaagccaccgcattgccggaatcattcatataagtcagcggcttggccagaaagaacttgacggtgcggccgtccaggttcatcacgcttttaccgagcatggccagacctttgtggtcggcgaagttcaccgtccaacgttcggcgagcacgtcggcggtcatgaagcccatgttgtgccgcgtgtcctcatattttttgccggggttgcccagtcccgcaatcagccagaaatccgatgccataatccactcctcgtccgtcttcctatattcccgtatgcacgttctgtacgttccgtacgtcatgcgcgcgttcgcctcgcgcactggcccatgcccggccggattcaaccgtcaagattgtactcaacgccgccgtcaagccttggaatcggcaagcagcagggcacggcattgctcggcatccatcgatcggaccgatgaatggtgaaacgcttcgacgtcacgagtcacgatgacgtcggcgtcattgtcctcggcaacggcacggatgagcccgtcctcgaagtcgggctcatcggatcggtacgacatacacgcatggcgttccataagtggacggatgtcgaacaattccatcagtccaccgatatcgtctcgcgccgcccgctcctcgccataatgcttgcgcaacacgcaatacacgtcattcaatgacgataccggcgccatgatctcaatgtttggctgtgcaacggcttccatgagcaaatcaacacattgtttatggaaaggcgctcgtttgtcattgcacaaatcgagcagaatattcgtgtcaaacagcagtttcatcccgtcccccaaatcgttccatacgtgcctgcgcgagaatctcctcatccgaaagatcgccttccgcctccggcaaattccggtcggcgaaacgttgaatcaactcctgctttttcctacgctcccgctcctgaatcagggagagcgtcagacgctcgaattccggcagttcccccgtatccgcaaggtagtcggtcagatcacgaatcaggtccgaataggtgcgcccattacgcttaagcactttctccgcgtcgcgcttccgttcggcattgacgcgcgccgtcaccatggccatagtcatatcgcacctccttgtaataccagtattacaagagatggggacgagtgaatcgcgtctattaggcggtgccgccagcgaccttttcgcgctgtttgccgttgaggtaccagtaggccagcgccacgaacagggccgccgaggatattgccgagcgtggctgcggacaggttatagaggatgcccgacacgtcgagcgccgcgacgcccgccgtgtcggcgccgaaaccaaacgttttggcgaccaggcccatcggcaggaagaacatgttggccacgcagtgttcgaagcccatcgccacgaatccggcgatcggcagcaggatgcccagcaccttgtcggatacggagcgcgcggcgaatccgaggcgcacggccaggcagacgagcacgttgcacaggatgccgcacacgaacagcgtgtcccagcttggcgtcactttaacatcaactccggttggaaataatctcagtatgtagcattcggttctcaaataggagaaacatgcagcggcaatcaacaacttgtcgtttacgacgccaagcaagggaaacagctcagacagatgacgcttccctgcaatcggatgacatattgcgggacggcagcggattttgggcgttcttggcgtggcatcccgcaagcgttatcgcacgttatctgcatcgaatcataagaatggcagaattccaatgatttcgcaggaagagttgcgggacgcgagctatgtgcatcgtttgacgtgtgtggcatcccacgtgattgcgggataccacgtcaaaacggacgaaaatcgcgtgccgtcccgtagtttgccgttatctgggataagcgcgtccgatatatggcgttcgaggaaaagagctgatccgatacaactttttagtgttataggacaccggaatccatggagagcaagggtaaaccgcctcgggcctacaggtccaaataccagtaggacatgtcccgcatggtgccggtggagtcggtggcagcggcggacatgaggccgaattgggtgaagccgaagcggcgcatgagggcaatggagccgacgttatcggcgaaaatgatgccacaggccttgcgcatgtggcgggcccgcgcctcggtgagcagcctgtcaagcatgaacgtgcccactcccctgccttgccatgccggatcgatgtaataggccaaatcggtgacgccgtcatacccggcacgatcgtagaacacggagagcgcaccgaagccgatgattgaaccgtcttccgattccacaacaaaaacgccgtagggcggcgtatgggattcgacccaggcgcggcgttggtcgagggtgcgcggggtgaggtcggcggtggccccacccgccaccaccgcagcgttgtagatgtcggtgatggcttggatgtcggattcgacggccggatggaaggtgtatggcatgaagttcctttgaatacgcaaatagcccgtccttatgataaggacgggctatgtcagttgaggtaaccgactcccttcagtcgccttcggcgatagctcccctcaccctgagggaagccaagttacttgtcgagctcgatggccttgttgagggcgtcttcaagctcctgctgcgccttgccgtaggcggtccagtcgccgttcttcatggcggactggctgtccttcatggcttgggcggcatcgttcaacgcctgctggaattcggggctgcggtcggaagacgagccggaatccgactttccgtccgtggtgccggactgaccaccattggtatcggaaccagattggtcaccggacacgttctcggcatcgcccgcggccgcaccggaattgccaccgaacacctgatccaaggcctcatccaacgtatccgcgaatccaacctgatcaccgaatgcgaccagcgtcttcttgagcaacgggaatgaggtcacgcccgaagacttgacgtacacgggctgcacgtacaccagtccgccaccgagcggcagggtgagcaggttgccgcgcaccacttgcgtgtcgccggattgcagcaggttcagttccttggatacatcggcgttggcgttgaagttgttctgcgcctggccggggcccggtacgttcgaatccttgggcagctcctgcaatcggatggtgccgtagttcgagcctatcttgcccttctcattgccggcatctgagtcgaccgacaggaagccggtcaggatctcacgggtggactggccagccggaatgtaggtggaggtcagcgagaacaccggttcctcggtgccaccggtctgcaaggtcaggtagtacggcggctgcaggatgtcctggtcctgctgggactgggattcggtcggatcgaccggcgtctgccagaagtcttcgcctgagtagtactggctggcagaggtcacgtggtacttggagagcagctcgcgctgtactttgaacaggctttccgggtagcgcatgtggctcatcaggtcgccggagatatcggagagctggtggtactggccagggaagatcttctcccatgccttgatcaccggatcggattgatcccacacgtacaggtccacggaaccgtcgtaggcgtccacggtggccttgaccgagttgcggatgtagttggccttctgagagcccagggacgagaccgttgcggaagagacggtggtggaatccttggtggcggagccgaggtcggttatttgcgagtacgggtaggcgtcggaggtggtgtagccgtcgacgatccacttgacgcggccatcgaccacggccggatacacgcggccgtcaagcgtcaggtacggtgccaccttggccacgcgctccttgggggaacgatcgtagagaatctgcgattcgctggtcacacggtcggagaagagaatctgatcggagccgaagcggatcgcgtagagaatcctggagaacaggttgccgaccgaagggccgccgtcgcccttgaacgtggtcagagcaccttccgaaccggtcgggtagtcgaactcccaagcctgcgtgccttcaggggcaccgacaatcgagtattcggtggtgttcggcgagaagtagatgcgaggctcgtacttttcggattcggtgagcttgccctgggtggggatgccggattcgaagaattcgggctggccgtcggcggtcaccttgttgccgtaggcggccaccacgccgtaaccgtgggtgtacacggtgtggtcattgacccagttgcggttgtcattgccggccagatcgagctcgcgggcggcaatcacggtgtcctgggagacgccgtcaatctcgtacttgtcgaccgccagggtgtcggcgaaggtgtagtactgcttggactgctgcaactgtttgaacgtggggctgacgacctgcgggtcgagcagacggatctgcgcggtggtgtcggcctccttggccagagcgccctgctcacccttgtcggtcaccttgtattgctcggtcttgagcttgtcaagaccgtaggcggcgcgggtggcgtcgatgttgcgctggatgtaggtggattccatctcctgtgcgttcgggttgacgcggaagcgttgcaacagcaccggccatgccacggtgagcacaagacccaccacgaccacgacggcaatggaggtcaccggcactcgccaggccttgagcgcggcggaagcgcgcacgccgatggacgcctggccttcgagcgtgtgggagcgcatgagccagatgcccagcaccacgccgaggatggcggtcagcacggccatgatgaaggtgacggggatgttggcatgtacggcggtgtaggaggcaccggtgatgcgtgaaccctgcacggtgagctggtcgaagacgccaatcatctggcgcactgcccaagcgaacatgttgagcatcagccagatgccaagctggcgacggcaacgcttggtaatggagaacaggccgcgtccgttaaccggcatggtaatgcggataccgcccatcagcacatgcgtgaccacggaaaacacaaggcccacgcccagcagcatggccacggcggcgagcacgagcttcaggcccggcagcacgaacacgtagaagccgttgtccagaccgaactgcggatcggtggtgccgaacgactgcgcgttgaacatgagcagaatctcgctccagttcgcgttaaactgggaaccgaagatgacgccgacgatcagcgaaatcaccacggccacgcggcgagcggttttcgagctgacggatttgccgacctcgaccacatcgccgttaatgcgaatggtggaaccgtcggccgaatcagggcgtgctcgaatggccagccaggcggaaacgaagccggtcagggccatgagcagcgcgtaggccacccacagaccgattttcaccccgagctgggtccagaccacggactggaagccgagctggccgtaccacatcagatcggtgatgaatcgggacaggccgaagaacagaccgacgatgatggccaaggccagcaccacgccgatcagaatcttgctgccacggctggctcctgagccaccggacgctggcttacgggtgatacgcggattggccggaccacgtggagggcgggatgacccggaggggccagcgttggtgttgtgggccggaccgtccccatcggcctcgacatcgaggatgatcggatcgtcattgttcgcattgttgcgtcgtgaatcgccgccattgccgaacagtactgagaaaggatcgttaaaagacataactcaagcctatcgaaagggcgggaggtcggttatgccctgagcacagaatgaggcaacatcctgttctacgctctgttctacgcttgccggtatggacagacaacggccacaacatatgcgtccctcagcacacgccacacgccaacttcggcacaggagcattccaatcgtggcggcaatatgtgctttggcggtggtgttggccggtgtggcagtctacggatggcatgtcggatggttcgccaaatccacatcaaacggcaacaccaccactccccagacctcccagacgagtgcgttaccgcgcaccgacgttccttccccgaagaagaacgacgatccggcggcacaagcccaacgtgcggtatccgccatgacgcttgaggaacgtgtgggacagttagtgatggtgccgttgttcgccggttccgaaccctcctcgttggcttcaacaatcgccgacgagcacattggctcggccattctcattggcaattggaataccggcgtcgatacggtcaagaccgcgaccgcgcaactccaaggatatgcgccggccggcaatcgtctcatcatcgccaccgatcaggagggtggtcaggtacagcatctgactggtaccggtttcgacacaatgcccagtgccgttgagcagggcacaatgtccgctgacgcattgcgtcaatcggcaggcacgtggggttcgcaattagctgctgctggcataaatgtcgatttggcaccggtgctcggcacggtggtgggcgatcgtgcctcaaatgctccgattggcgcgctggatcgtgatttcggattggatgcggccggcaacgccgaacatggcatcgccgttattgaaggtttgcgagacgctcaagtcggtgcggcggtcaaacattatcctgggttgggcgcggtaagcggcaataccgacttcaccaccgaaggcattctggatacgaccaccacgttggacggggccgaggcaggtgcctttgaccaggcgattaccaaggccgatcctgcaatggtgatgatgtcgttagccacgtatcaatccatcgacccgaataatccggcggtgttttcttctacgattatcgacggtcatattcgcaacgtcctgaagtacacgggcgtggtgatttcggattcgatatctgccgaagcgttgagcagctacgatgtaagccaattgggagtaaatcttgtcgaggcgggcggcgacatgtcctgcatcggtcagacggattatgtaaagccaattgtggacggcctcaacgaacgggcgaagtccgatccggctttcgcttcgaaggtgacggcggcggcgactcgcgtaatgacattgaaaatcaagatgggactgacctgaccgttcatccttgcactggcgaggattgatgcgcgctgattcgcgctaatcctcaccagccctcgtacaaatgcacactagtcctcgtacgaatcgtcagtcctcgtacgaatacagaccatgcttgccgatgtattgcaccacgccgtcgggcaccagataccagaccggctcgtcgtgttcggcgcggcggcgtacatcggtcgaggagatggccaaggccgggatctcaagcgtatcgaccttgccttcgggcaaggtcacgccgtccgggctggagtagccggggcgcgtgacggccacgaagtgagcgaggtcccacatgaggtcggcgtccttccactgcatgatttcggccacggcgtctgcgccggtgatgaagaacagctcggcgtcgggatgttgggcgcggatatcgcgcagagtgtcgatggtgtaggtgacgcccggacggtcgatgtcgacacgcgagacggtgaatttggggttggatgcggtggcgatcacagtcatcagataccgatcctcggcgttggtgacgtgcttgtccagcttgaacacaggtcggccggtgggcacgaaaatcacctcatcgaggtcatacacccaggcgacttcagaggcggcgaccaagtggccgttgtggatcgggtcgaacgtgccgcccatgatgccgacgcgcaggcgtgtatgccagttgccgcgtgcggaaagcctgcctttgccgtggctgctggccccggccggtacggacaggtcggacatgcgccgttcggtttcgccttgggtgacggcaatgatttcggcgggctcggcggattccactgttttttcggactgaactgacgcagccgttttgtggctgccggtaacaccactcatgcctggccgccctcgccggcggcgtcatcggctgattcggtttcctcttcgatttcgccggcggagggattgtcttccttgggatcgatcttgcccatgtcttcatcccattcgtcttggaccacgcgacgaatctcggcgaaggtgggcagcgggaagtccggctggtagaggcggcggacctcggccacgcgctcggtgatgcggatgagcgtgtcggtcatgccgtcgaggtcgccgtcgtgctccatctggctgtatttgccgatgtagccttccatgagttccatgtgttcgcgcacgatcttgagctgggcatcgttgaggtccacgacttcgggtgaatcggtctcgggccagccgatgagcacggcgtccgcgtattcgagcgacgcacgctgggcggcggaggcgatgccgtcctcaatctgcacgaggaacacatagcggacgatgctgagccgttcggccgcgatcttcaggccgagcttgggatcgttgaggtcgatgtcgggccgcagttcacttgccttgtttgccgtgtcagccgtagtgttcatgttgccgtcctcgttcatgcgcgcacctggcctgttccgtaaccgatccacttggtggtggtcatctcccgcaatcccatgggaccgcgtgcgtgcatcttctgcgtagaaatgccaagctcagcaccaaagccaaacacgccgccatcggtgaagcgagtggaggcgttgaccatgaccacggccgagtcgatgcgcttggcgaattcctcgatggccgcataatcctcggcgatgatggattcggtgtggcccgtggaatgcgtgttgatgtggtcgatggccgcgcccagatccggcaccaccttgatgcccatcttgagggccagatattcagtgtcccaatcctcctcggtggcgcggttgaggtcaaggccctcgatcgccgcgccggagatgatgtcatacgacgtggtgtcggcctgcagtacaacgttcgcctcggccaacgcggcggcgatctgcggcaggaattcggcggcgacatccttatgaaccaatagcttctcggcggcgttgcacacgcccacgcgctgggttttggcgttgatgatgatcgggatggccttggcgagatcaccggacttgtcgatgtagatatgcacgttgccggcgccggtttcgatgaccggcactttggagttgcgcacgacggcttggatcagacccgctcctcctcgcggcacgagcacgtcgatatggcctcgcgcctccatcatggcggtggcaccggcgcgtccgtactggtcgacggactgcaccagtgcggattcgaaaccgtgtgcttcaagcaccggggcgatgacgcccagcgtggcagcattggtgcgttcggcggcgtgaccgcctcgcagcaacgcggcattgccagatttaaggcacaggctggccacgtccacagtgacgttcggccgggcctcataaatcatgccgatgacgcccatcggtacgcgcgtctgggtaaggcgcagaccgttgggcagattgtatccgcgcacgatttcgccgaccggatcaggcaaggtggccacatgacgcatgccttgggcggcggcggccacgcgcggcacgtcgaacagcaggcggtcaagcttgcccgcatccatgccgttttccttggattcgagcatgtccagcgcgttggcggcttcgatgtccgcggcgtgcccgtccaacgcatccgcaatggcgagcagcagttcgtttttggcttcggtatttgcctgtgcaagacgctcctgcgcgcgtgcggcctgatcggcctggcggcacaccgcgtcgaacacctcaggactcaattcatcgctcataacagtcaagcgtaactcacaacgcggctgattgcttactccgacccgcttgttatgggatgtctgacgttttgaatcgcaaacagaaccggctcccctccatctcaggcgggaagccggtgatgtgatgcgctccggtcagcgaatcatcactaaccggtgcaccacggtggattagcgaatcagcgaatcagtgaatctggtccaggtcggggtagagcgggaagtcttcggcgagcttgtcgacgcgggccttcagcgcggtcacgtcggcggacgggccggcggcgagcgcggtgccgatgatgtcggccacctcctcatattccttcggtccgaaaccgcgcgtggccagggcggacgtgccgattctcaggcccgaggccaccgaggccgggcgcgggtcgaagggcacggtgttgcggttgatggtgatgccgcaggcggcaagcaaatcctcgccctgctgcccgtccatctcgctgttgcgcaggtcgaccatcaccaggtgcacgtcagtgccgccggtcagcacgctgatgccgttggccttgacatcgtcggccaggagacgttcagcgagaatcttggcgccgtcgagcgtgcgctgcatacggtctttgaattcgggggtgccggccaccttgaagctcacggccttgcccgcgatcacatgcatgagcggaccgccctgctggccggggaacacggaggagttgagcttcttggcgtattcctgcttggcgaggatgaagccggagcgcgggccgccgaaggtcttgtgcgcggtggaagagaccacgtcggcgtacggcacaggactcgggtgcaggcctgcggccacgagtccggcgaagtgggccatgtcgacccagaatttggcgccgacctcgtcggcgatctccttcatggccttgaagtcctcgatgcgcgggtaggcggaccaaccgccgatgatcatggccgggtgggtttcgagcgcacgctggcggatgatttccgggtcgatgcggaaggtctcggggttcacgccataagcctcggcatggtagaagcggccggagaagttgattttcatgccgtgggtcaggtggccgccgtggtcgagggccaggccgagcacggtgtcgccgggcttgacgagcgcctggtagacggcggcgttggcctgggcgccggagtgcggctggacgttggcgtattcggcgccgaacagggccttggcgcgttcgcgggcgatggtttcgacttggtccacgtattcgcagccgccatagtagcggcggccggggtaaccttcggcgtatttgttggtcagcacggagccctggcattgcagtaccgctcgcggcacgaagttctcagaggcgatcatctcaaggccattgcgctggcggcccagttcggagtccagcagttcggcgatctcaggatcggtttcgcagatcggcgcgttgaaagcatcggtcgctttctgcgcaaggggtgaagcggtcatgggtgctcctttggtatgggcgacaattgattcgccgttgccgccttactgtatggccggtttgtagccggcctgtttcatgatatggccggtccccgttcgatggcaatggtgattttcgccggtttgaccggtcggctatgcgagacggacggcccttctgcccacggcccacgctaaactggtgtggattcatcatccctttcaggcagaaggattcatcgtgacaaccaccttccattccacccgtagcaccaccgattcgctgaccgccaagcaggcgattcgtaagggcatcgccgatgacggcggcctgttcgtttcggacgcgttgggcaagaccaaggtggacgtggcctccctgccgggcaagtcgtaccagcagatcgccgccgaggtgctgggcgcgctgctgccggacttcacggccgaggagctgggccagtgcatcgccgacgcctacggcgaacagtggtccgatgagcgcatcaccccactcaagcccctgggtgacgattacgtgctcgaactgttcaacggtccgacttccgcgttcaaggacgtggcgctgcagatcctgccgcgcttcatggcgcacaccacgccggccgatggcgacgcggacgagaagatcatgatcctcaccgccacctccggcgacaccggcaaggccgcgctggccggcttcgcggacgccccgggcaccgcgatcaccgtcttctacccggaaggcaaggtctcccaggtccaggaactgcagatgaccacgcaggccggctccaacgtgcaggtggccgccgtggaaggcaacttcgacgacgcccagtccgcggtcaagcgcatcttcggcgaccgtgccctggccgagcgtctcgccggcaattcgcacgtggtgctttcctccgccaactccatcaacgtgggccgtctggtgccgcaggtcgtctactacttctccgcttacgcccagctgctcgccgaccaggtgatcaacgtcggcgatgaggtcgagttcgtggtcccgaccggcaacttcggcgatatcctcgccggctactatgccaagctgctcggtctgccggtcaagcacctcgtggtggcttccgacaagaacaacgtgctgttcgacttcctgaccaccggtacctacaaccgccagcgcccgttcttccagaccatctccccctcgatggacatcctcatctcctccaacctggagcgcatgctgtactacttgtccgagggcgacacccgtctgatctccatgctgatgaacgacctcaacaagtggggcacgtacgagatcccggaagaactgctggccaagattcgtcagatcttcggcaccggttgggccgatgaggatcaggtacgcgagtccatcaagcactgctgggacgagaaccactacgtgatcgacccgcacaccgcctgcggctactacctgcttgagcagatgccacgagacccgctgaccccgcgcgtgctgctctccaccgccagcccctacaagttcccgcgcgtggtgaacgaggctctgggcttcgacgccaccggcaccgacttcgagtgcatggacgtgctggcccgcgagaccggcaccaccgccccggccgccctgcgtggcctcgagaccgccgacgtgcgtttcaaggacgtcgtggccatcgacggcatggaggactacgtggagaaggccgcccaggcgctgtaaacataccggcacattggctcccctcagagcggggagccattttttacatcagaattgcgtttacatcagtatcgcggcgactggcagtcctatggcgattgccaacagcacgatagtgccgatgatcacgctggggcgtgcgaggttgacggtccagccgacgccgaaacgtttggggatcatgatggcaggatcgtcacggttgatgtagatgatgccgccaatccagtgcaggtcatcgtcatacggcatggcattatcgtccgaaatgtcaccgccgtcactgtgccgaacaccggcatagacgcgcgccccgttctgcccgtaatacacgccgatcatcagcgcgccgaccagagccgccacggcgatgaacatgccgatgatgccgattagattgatatccagcacgccaatggtgacaagctgaacgcctaggcccaatccaccggctgccagcagtccgatgaccagcacgtagatgctccagacccgcgagaacacaccataggcatacccggtggcggcggggtggtcgggatcaatcgggtgcttggcgtagatgatcgcggcatggctggccaccatcaccgctgccagcaccacctgcgcgagcacggcgtaccaaatcaccatcggactcttctcggcccaaccgttcacattgccggcgatatccgcatgaatcggcacccgctccggcatccggtcatagcccagcaacccgacagcaatggtgacagcgagacaaacgacttgcagcaattcccacttcaagctcatcgggtcgggattgtcccgctcacctatcaatgctgcacggcgggcactggacgcctcccatccctgatcgactttgatggatagtactttgcggcgaaacatctgctgcagcacgaaaccacatatcgcaatcgccaccgctgcgatggacacagtccagaacgccgcgtcgactccgcagagttgccaaacggccagcgagaccagtatggcgcatacgccaagcgccaccgtaattcccgaaaacgcgactttaaatccgcgaatgcgcgtattgacatgggcggcggccggcactgtgacaccgaacacctcatgccggtcggtaacccatggaacccctgccaggccggcggtcactatcaccggcaacagtaaaaacgcacacaacgcgatgttcatcgacacgactgtattattcatcgttatctcccctgatttccttttgttgcaccgtcagtaacgctctgcgaggagcgcacgccgtatgcccgttcgcattgccgtttggtggcatcgaggaatgcggccgaatcaccgccgcgcgccctgtaggccaaggcaaggcgatagagttcctcgcccatccgctcatcctgtgcttcggcagttcggttcggtgcttctcccccgccgtcatgctcggcgacggttgcaccggcaccacgacgcataacgatgtatccctcgtcacgcaacagcgcataggccttgttcaccgtgtgcaggttgatgccaaggtccacggccagcgagcgcacggacggtaacgagtcacctggcgacagctcatcgcccgcgatggctgcgatgagctgcctgtgcagctgctcgtaaatcggcacgtcactgcgctgatcgatttccacaatcacggtcaattccacccctctcaagaactgttctatttgttctacatcaaatataacagttttgccgtatgagtcaagatatgcgaatctcggttgaacatccggcaatgggccaacggcgtgttgcttgaattttctaggaaggcgggaatcgccatgctgccggcgaatgggaaaatccatgtggcttgtcagattctgttcctgcaactgaatagtcccatgagggagtagacagcattgcggcgaagggctcggcccaaaccgcaataaagcgtgccgagcgccaaagccgccaacaccggtatgacgccgctgcaggagaagctcgcgaagctggacgaacttcatgggcggcaccgccgaacagcagtcgaccattctgttcacgctgttcgtggtattccagctgttcagcagtcgaccattctgttcacgctgttcgtggtattccagctgttcaacgccttcaacagccgcgagctgggcaacgccagcctgttcgccaatctgctacgcaataaggtgatgatcggcgtgttcgcgctgatgttcgcacttcaggtgctggtggtgcagttcggcggagcgatgttccgcaccgtgccgctgccgatcgacatgtggctgaagatcatcgcggtcggacagatgcgcggttagagttctttggctcggtagatgcggatggctataagcatggagccaaaatatgcgagcagacacaacacggcgagaacaagcgccgtatgccaccagatcgtcaggaaatcggcaatattcagcaatagccattgccagtcaacaggcaatcgggccagcagcgcaatgactgcatacaagccgacaatgaccgcgccagaggccatcatcatcttgcgggaggtgaaccggtatgcacaggccagcagcaccgacccaagaatgatagccaaagcgaagatggaagcacctgctgccaaggtaccaatccaccccatatctgctatatcgccaaagacaatgaagacgccgccgcatatcaccacgtccaaagcccagagcaggccaaccaccaacagaaaaaggtaccgacctacaacttgtgcagtgcgtgaaacaggaatcagccctcgcatggcactgtgccctgcagattcctcggatgacgcaggccccaatgcactcatacatgccatcgccgatgccaaacctccgagtccgcccatcagaccactggcaacgtgttcatcgacgtgggtcgatatcatcaccagcgataccacgatagacagcaccgggaaaaccagcagaaataccatattcgctacgctaaacagacctgtcccaacacaatcgaatcgacattgctttactacggatttccagctcatcgtcaccattcccttgaagcaaatatgcgagaggcaattacatacgagattccatatgccacaaccgtcgttgccaataccgcaataaccagccacaatcgttgcgcgatgatggcattcgcggcatgggccaatcctttggtcaccgaagcaggcaaaatagatagcagtatgaatccagccaatacaacgacataaatcaccatcatcgtgacttgaagaccgcctagtttggtccacagataacccgtgggcacgataagcgcgaccatcagcgcggtgcagaaacctcccaacggagccgcccacagattgcccgcgaatgaccaatccggattgaccagcacttgcaacccgtcaatcagaacaatcatcgctatcgacaatacggaaatcaccaatccaaccacatatcgcgcggccacctgactcttcctcgaagccggaataatgccacgaagtcgatatccgttctgtaagtcagcaaccgccatggtcagcacccacatggcgcaggtgaataccgtcatgatgacacccatgcgatagccgaagccatccccataagcttcaccttgaaagatgacggagaacaacggtgccaacaacaacgagaacacagtccgttcgccgacgcacaggtaggccatatcgacgcgcaatgcagtggtcaatgcatgttgccgagaccgcgacaccctcagtattgcctccatggccgctcacctcccgctcaagtcacgattggaatcatgggcattggtcagtcgaatgatgtcatcaatggaagccgattcaacgacaagccccgaaaccaccgatgcaacagcatcaagcctgtctgaccggaccagcgcatcgaatccggtggcatacgtatgtgagcccagcactacgtccgcaggcagttgtgccagttcgtctggaccgcccttaatcaggcggaacgattcctcaaactcgtctttcggaccggtgtagtagagacggccatcggtgatgtaggtaatgaagtcagcagcacgttcgaggtcggcagtgatatgggtgctgaacagtaccgaatgttcgccatcctcaatgtaggcatgcaggatatccatgagttcgtcgcgggcaagcacatcgagtccgctggtcggctcgtcgagaatcagcagcttggcatcatgactcaatgcgatggccagcatcagcttcatctgcatgccgcgggaaagatccttgatatgtttcttgccgttctgtgcgtcaccaaggccaaaagtatccagatacttgtgatagcatccaccgtcccatgatggatacagtggcgcgacaatacgttcaatgttcttgacttgccactgttcatgcatgtagctgaagtcgaacaccacgccgagttgttctttgacggactcctcgttggcgatgttgtcgaggccgagcacgtgaatcgaaccggcgtcgcggtggatcatgttgaggatgagtttgatgagggtggatttgccggcgccgttcgggccgatcagtcccatgatgtagcccttgggcaggtcgaaggtcacgtcgtccagcgtgaagccggaatcatagtgtttggtgacgtcggtgacctgcaacgccatcgcgtcggattcggatatggcggtcatggccatggtcctttcttgaggttatttcttgcggtattcctcttcgagcatgcggtccaatgcgtccagcggaatgccggcggctttggcgccccggcttgcctcggccaggctttcgcgaatctgggttttgagctgacgttgcatcagttcgttgcccttgtccatcacgaaagtgcctttgccttgaatgttctgtaccacgccctcatcggccagttcgttgtacgccctggtgacggtgagtacggagatgcgcagttccttggcgagctttctcaaggaaggcaaggcctcgcccgccttcaactcgccgctgagcaccgccgaacggatttgggttttgatttgctcgtagatgggttcaccggacacggatgagatgatcagtttcatctatgcccctttcgattgtggttgactagcaccccagctgtttagctgttatacaacacagtataactgttctgcttaactgtcaaggtgtgttacataacagctaaacagtgaacaaacaccttgccaacatacagtgtcgaaacatgggccgcgcctacaatggcctcgggaaggggcacctatgccaaacaacgccgttacgccgacagccccgccagcgggggtgtaactttttttatcacagcacgcgcggagcgtcgtggaagtcgaagaggacgccgtcggccaggtggcagatttcgggccaatcggaggcggaggagtcgtcgtgcatggcccagaccttcatgccgaccgatttggccgacttcatgccgaccagcaggtcttcgaacaccgtgcagtcggccggtgcagcacccaggcgcttggcggcgagcaggtagacgtcgggctggtccttgccgacgtcgttcacatcgtcaacagagacgatgtcatcgaatagcccgaacatgcccacatgccgcagcgccggttcacgcaggtgcgggggcagcgaggtggcgacgccaagcttgacgccggcggccttcaggtcgtgcagatagccgagcgcgcccggcttggcctccaccgtggtggagtaggcgacactggccatgtcatcccactcctgcataagctcctcgggggtatctttcaggccgaatcgcgcgatggtgtattcggcgatctggcgaaactgcatggcggagaccgtggtcgtgtagtcgggcggaaccgcgatgccacgcttgttcaggaagtcgatgtcgacttggtcccagactcccatggagtctaggagggtgccatcgaggtcgaatatggcggctttggtcataggacactttccttcaacagttctcgggcgtggtctagggaggcttcggattcgctgccggagagcatgcgggcgatttcgtggacgcgggtttcgccgttgacttcggcgatggtggtgaccacgcccaaatcgtcgtcatcggcatccggcggctccttggtgaccacgaactgcgcgtccgcccacgaagcgacctgcgccaagtgggtgacgacgatgacctgcgcgctgcgggccagccgtgccagacgtttgcccagttcgaccgcggccttgccacccacgccggcgtcaacctcgtcgaagatgaaggtctggtcggcaccgccgcgcgtgtcggcggccaccagctccaaggccaacatcagtcggctcagttcaccgcccgaagcgcttttgcccatcggcaactgcggcgacccctcgaacggcgtaaacaggaacgcgatatcgtcgcgaccatacggaccgagcggatcatcggccttgtctcgcggcgtgacacgcacttccaaggaggcgcccagcatggcgagcgagccgagttcttcagtgacgcgcgcgcccaagtcggcagcggcagccacgcgcgcggcgctcagcacgtcggcggcggcgagggccgcatcgtacagcgtctgccgttcggattcgagttcggcgaccttttccggcgaggcgtccagatcctccaaatcgaacgccgccttgtcccgccaagcgagcacgtcggccaaggtggggccccaccgacgggtgaggtcgccaagctcgtggatacggccgttgatctggtccagatcctccacgctgccttcgtcgcccagctcctggctcagggcgaacaccacgtcgcccaaatcggcattgatggattcaagccgatcggcctgctcggcgaacgtgccgccgacgcgaatcgcgcgcaacgaggtcaccgcatgattgatgagttccacggccgaagcgccgtcggcggcgtccacatccacctgcgaggcatccagcgcgcccagcgccgaacccacgccttgggcgatgtcagccgcgttttcgatgcgttcgcggcgcgccttcagctcctcgtcctcccccggctgcgggtcggttcggttgatgcggtcgatggattcgcgcaggtagtcggcctgttggcgggcagaggattcctgcgagcgcaggcgttccagccgctcatccatggcggccagcgcatcccacgccttgcggtaggcggccagttcggcttcgtctccggccacccggtccagaaactcgcgttgccgtgcggcggccgcgattttcagctgatcggtctggccatgaatgatgaccagttcgccggcgatggcccccagcaccgaacgcggtacggacttgccgccgagcacggcccgcgaacgtccggaagcgcgtacggtgcgggaaaggaacagttcgccgtcttcggggtcgacgcccgcgtcgtgggctttggccacggccgcggcagcaccggtgagcccgctgtcagaatcgtcagaaccggcatcgtcaccggcatcgttggtgtcgccggaatgttcagatgcgacggcatcatccgcgagcgcgaaaatcgcctgggcccaagcctcgtccgccccggccgagacgcgcgaggattcggcggccccaccggagaccagtcggatcgcggagagcagcatggatttgccggcaccggtctcaccggtgatggcggtcatgcctgcggccggcgcaatggcggcttctcgaatcggccccagattgcggatatcgagttcttcgagcatcaggctcctgccttgccgtcgcgttcgcccggcttgtcgggctcggtaccagcgacaccagcgtcaccggcaacgccagccgcatacgcggccgccgggaacgtgtgcccgtgatgcagcggctggctcgaggcctcgttgcgcgcgtgctcgcgccaaccgaccacgggcagatcgaacttggagaccagacggttggtgaacggcacgccggagagtcgggcgaggcgcaaggtatcgcgcgattcgcgcaccatgacgcgcgtaccctgcggcagggcgcgctggcggcggccatcgcagcaaatccagccttcggacatggattcgtccagaatatcgatggtaaaggtcgaaccggagccgatgatcagcggcctggcgaacagggcgtgcgcggccaacggaatcaactgcagggccttgacgttcggccacatgaccggaccgcccgcggagaaggcgtaggcggtggaaccggtgggcgtggatacgatgacgccgtccgcgccgaacgagttcatctccacatcgtccacgcggatggacagttcgaccatcttgcctcggtcggcgcgttccagcgtgatatcgttcagcgcccaatcctcgatgggcttggtggcaccgggcagccagacgtccacatgggcgatcatgcgttcgtcgatcgaatagtcgtgggtggcgacccggcggatcgcctcgtcgatctggaagctttcgaattcggccaggaagccgacatgccccatgttcacgccgagaatcggcacctgggtgcagtggacgagttcggcggcgcgcagtatcgtgccgtcgccgcccaggaccacgacgatttcggtgtcgtccgacacgcacggcggctgcacgccgaaatcgggggcctcggtgttgtcgatgatggtgacttcgaaaccggccactcgcagctggctcaccgcctcggccactacggttccggtctgcctgagcctggtatgcgtcaccaccaccgcgttgcgcttggccatggcatcctcctgtcgattcggtcgcactgctcattattctagccgcagacaccgtcatcactcgtacaggtgttcgaaaaatgccgcttcgtggcgcgtcgccgacaacgttccgcagagtcgattaacgtaaggcttcggcatacaatggcatacagccgcgcgatcaccgtacgcgtgccgtgcgcagcgcgatggcatgccgtatgaccatacggcagtatcagttgaggagcttgaggacccatggccaatgacttcgacgaatcctccgccaatgaggaggcctcgaagggcctgtcatggtggtattcggccgatgtactgagccgagacaaaaacgataaaaccgccaagcgcattcgccgcatcagcatcaccgaccgtctgctcaggcacccgggccgtctgtccatggtgtatttcggcgcactgatcatcatcgtcaccggcttgctgctgctgccgatctccacatcggacatcatcttcaccaacttcccggtcgcgttcttcaccgccgtctcggccctgtccacctgcggcattccggtggtgaacaccggcgaatactggtcgacgttcggccaagttgtcatcctattctccatccagttcggcggcctgggcgtcatgaccttcgcctcgatggtggctcttggcacttcccgcagactcaaggtctcccagcgcatgcttaccgcgaacgaactgggcaccacgaagctttccgaggtcaaaggcgtactcaccgtggtattgggcacctccatcatcgccgaggtgcttaccttcgtgctgctgctgcccgacctgttccgcgtgaaccacggcaatatgggacgtacattgtggcaggcgctgttctacgcggtatcggcctacaacaacaccggtttcacgcctgacgccaccggcctgcatgtgaaccgttggggcgtgggactgccgattctcatcagcgcattcataggaacgctcggcttccccgtggtgctgaatctggtgcagtgcgcacgccgacatctcagcccgaaacgttggacgttgcacaccaaactcactttggtgaccaccgctgtgctggtgtccacctcactggcttggttcctgctggtcgagtggggcaataccggcctgttccccgcagacggtcccggcatgaagatgcgccgtgcgatgagcgccgccgtcatgccccgctccgccggtttcgatatttcctgggtgcccgaagtcacgaatgagaccaaggtgttcatgagcatactcatgttcatcggcgcaggctcctcatccaccgccggcggcatccgtgtcaccacgttcgcggtgattctcttgatttgccgcgccgcattcaccggccatcgcgatgtcaccgtgttccgccgccgtatcccccgccgcgtccagatgaccgccgtgtccgtgaccacggcctgctttgcgctggttatggtcggtgcgatgatgctgatgttcaccaccggctgcgcgttcgtggacgccgtgttcgaggcctgctcggccttctcgttgggcggttattcggtgggcgtggcaagcgccggcaatccggccagcctgtttattctgtccgccgagatgattgtcggacgacttggcccgttgaccatcgcctactccatcagcagaccgatggctcccgaacctattcgttatccgcaggaaaacattatcgttggctgatcggccattcaatcggcacacagaaatccggcatagagaggaccatcatcatggcagcaaaaccgagcggcaacaaaagcgtgctggtcatcggcctgggccgtttcggcgggtccgtggccgccaccctcgaccagatgggtcaggatgtgctcgccgtggataagaacccggagcttgtggcccgttggtccgcgcatctgcccaccattcaggccgacatgaccgatgtgctggccatcgagcagatcgacgcctcccagttcgacacggccgtcgtggccatcggcgacagcatcgaggcttcggtgatcatcaccggcaacctgctggatgccggcgtttccgatctgtgggccaagtccgtgtcccaggagcatgcgcgcattctgcagcgcatcggcgcccgtcacatcatcaatgcggagatcgatgccggcaagcgcgtgggtcatctggtggccggcaattatctggattacatcgaaatcgacggcccgtacaccgtcgtcaagatccacacgcccctatacgcggtgggtcgcagcatcgaggacgtgcaggtgcacgacaaatacggcgtgaccgtggtgggcctcaaggccccaggcaaggagttccagtacggctccaaggaactggtcatgcatcgcaacgacgaactcatcctcatgggcaagcaggatcagatcgaccacttcatccaaggctaacccccctaactgcgctcgctataccccctatctgctcacatcgtgaccgatataacccccctcaacatggatgcgctcattattggggcaataagccataaagctgtacgtccatattgagggggctttatcatcatgggcaagcatacgcagaattgcacgttgataggcaaaggagtctacggcaccataggagtggaccaacgttcccgtcttgccgatggcgcgcattttcacaccatgattgtgaccagcaccctcgaggcctcagttatagaaggggacaaactggtcatcaagagtggcattgtgcggtgtgatggtgatattcgcgtatccagcatcagcggcagcggcgacatcgaagtcggcggcgacattatttgcgatgaaataacctttaccggcaaactgcgatgcaacagcgatatcgtttgttccggaaatctgtccgtcaatggctccctaggcacccgtcatattagcggtcagacagtccgcttgaacggcgtgttgaagggtcatgacgtcaacagcagggctctggaagttcatccactgcgcagtacgatgttttctcgttttgatatggatgggtatgaggatggcagcatggttcgccatatcacagccgtcacggttgaagccaaccatctgcaatgccggactttgacggcggactccgccatgctacgcaacggcagtgcggtggaaagcgccacgtgtgccaccgcaataggcatcgaccgtacctccagcgtgctgctggtgaacggagactgccgacgcattcatctcaagacagcgtaaagcaggtattcctcattaccgtgggtgccgatgatgggactatcggcagtggccaccacgtcaagtccgtgctgttcagcacaggcgaccacgtcgtgcaatgcccgctcccgcaatgccggatcttccacgatgccgtttttgccgagtcctgcccgcccgacctcgaactgcggtttgaccagtaacacaatctgcgcaccgggagccgcgatgcgcgcgattaccggaatcacataggtcagcgaaataaaggagacgtcggagacgatcatcgccggccggtaaggcaggtcgtcggcctctacttcgcgaatgttgacgccgctcatttcgatgacgtgctcgtcattggcgatgcgcgggtcgagctggccgtggccgacgtcgagcgccacgactttggccgctcccccgcgcaacagtacatcggtgaagccaccggtggaggcaccgatatccagacattccaagctttccggcccggtaaggccattgccggcaaaggtctcgaacgcgcccaagagtttgtaagcgcctcgggagacgtagtcgtcgcccttatccacggcgagttcgctgtgcccggctttgaccatgaacgatggcttggtgatggtctcgccgtccacgcgcacatgcccggctttgatgagtcgctgcgctttggcccgcgattcgaccagtcccgaagccacgagcatcatgtcgagtcggtcaagtggggtcgcgggatcgatatgttgcttggtcatataccttcctttcgacccaccatccaccaacggggtggctcggcatggagccaccatccagcacttcacgtcatcttccgctggcgggagaatgaatctcctctgctagctgcggctgttatcaagctcgtgttgtaacgattccagcacgttgcgataggtctcaagcttgcggtcgttgtcttgttcatcaatatccgcaagttcggggtatcgctcggtgaccggcgcgtgttcgctatccgtaggcataggactatgcctcgatggcgaacaccggtaccgtggcctcgctgagctgtgcgccttggtcggcggcttcccatgcggcgcatacggcggcacgcaggccgtccatactggtggggtcgctgacgtgtacctggccgttttcaaaccaagcgctagccttgcggcattcccaagtaccgctctcgtcgcggaccggctccggttgggcttcgccgagttcacgcagatcaagggcgatgaatgtgggcctcaggtgtgccggagccagcatcagttcgatcgggttggtgacaccggtcagcaccgccagcgaatcatagtcaccgcggttaccggcctcgatatcagtgtcgagtcggtcgccaatggcgatggacgcctccttgggcaccagatcgtggccttcggcggcgttcagttcgcgggcctcatcgtacatgtacgcttccggcttgccagcggaggcgaccggttcgacgccagtggccgtgatcacggcgcgaatcatcgatccgcaaccgggggcgatgcccagttcacgaggaatcgtcaggtcgcggttggtcacgaaatacgtggctccggcctcgaccgcgaacgcggcatcggccatcatctgccaagtcatatccggataccagccctgaataacggcctgcgggcggtcctgaggaccgtccacgatggtcaggccgttgcgggtgacctcatcgcgcaaatgctcggcgcccaatacctgtacgcgcgcgccggcgggcaacgccttggccaccacacgggcggccaccaccgaagaggtgatgacctgccacggctccacgtccaagccgaagcccttgagctggtcggccaccacgtgctggaagcgcgaggagttgttcgtggtgtattcgatggtcatgccggcggcttcggccgcacgaatggaatcggctgcgtattcgaccggattcttgccgcgatacaccacgccgtcgaggtccagcagcgcaagctgataggcctcggcgagcgggcgatcggtgcctttgaggaaacgggtcattacgccgctcactcctcggtttcggtctcggtctcgtcggactcagccggttcaacggcatcgtcagcggactcggaagactcctcggcttcagattcctcagattcttccgatgcatcctcggactcagcattttcgacatcggcctcatcagactcggcatcgccgtcttcagcctcgtcgtcctcatcgccgtattcctgctccggatccggggcgtactgcgcttcgtccggatcgatgccgagcttctcgagcacgtcggagtcgtcggtgatgtcttcgagatcgtggtcaatcaccacgtcgtcgctgttttcgtcaatctcctcgtcggcatactgatcctcaagacggtccagcaggtcattaagctgctcggcttccttgctgcggccggcctcttcaaggaagtactgctcggcctgcacggcacgcatacggtactcacccggaagaccctgagagcggccgacggtatgaaccacttcaatggccttgtcccacatctccaaatcgccaagggcaccggcatacaccaggaacatctcgaccttgggagcgccatgcagctgcttgccctcatcggacagcgccagttccacggccttcttcggttcaccgacaccacgctcgcagtcagcgatgaacggcaggtagtcgaggaagccgttcatacggtaggcggtacggaactcacgcagggacagcttgtagtcgccctgacggtaggccacgaacgcgagcgtctcgcgggcaaagtcgatgcgggaggcctgacgggccacccacttggcgtgctccaaggcaagttcgggatcgctctcctccagcgcgaaagcggcgaggatgtgcagaccaatgttctccgcatgctccttggacaggccgcgcagacgttcgcgctcatccttggacagcatcgaccattccatgcccttgggcatcttgggctcgtcgggacgacggtcggtgtacgggttctgcgaggggaagctcatcgtgccgtcggagttacggcgcggacgcctcatgtattcagagcgcttctcctcacggtactggcgcttctcttcctgcgaaaactcgcggaattcgccgtcacgacggttgttgtcgcggcggtcgtccctgcggaagttgcggcgatcgccatcacggcgatcgtcgtcgcggcggaagttgcgacgctcaccatcacgatggaaatcacggcgatcgttatcccttcgctcatcgcggcggaagtcacgacgatcattgtcacgacggaagtcacgacgctcaccatcgcggtggaagtcacggcgatcatcgcgacggaaatcacgacgatcgttgtcacggtgctggtagcgcgggttctcgccgttctcgccttcgtgggaacggtagccgccttcgcggcgcggcttgaaaccttcaccgtcacggcgcggaccactgccgcggtaaccacccttgtggaagccaccggacttgccgtacgacttacggtagccgccgtggccctcgccatcaccatcacggcgcggcgcgtaaccctcaccatcctcacggcggcgcggcttgaagccctcgccatcgcggtcgcggcgcggacggaagccgtcgccatcgcggcgcggaccgttgccgcgatagccgcccttgccaccgaaaccagagcggccgcccttgtggaagtcgccacccttgccgtacgacttgcggtagccgccgtggccctcgccatcaccatcacggcgcggcgcgtagccttcgccatcctcacgacgacgcggcttgaaaccttcaccgtcatgacgcggcttgaaaccgcccttgccgcgcggcttgaaacccttgccgccgcggttgcccggtcggcgatcgccataccccttatggccgccgccgtaggacttgccggaacgctcgttaccttctgccattacttgttttccttaattcgttgttgattaacggttttccacggcgccgagcgccttcttgccacgacggatgagcgcgaagcggcctgccaggaagtcggcttcggccagcacctgctcctcatcctcgatacggttgttgttgagatacacgccaccggacttgatggcgcggcgtgcctcggaagcggacttgaacagtccggcagcctgggcggcgtcgattacgcgatcgcccggcttggagacggggaagacgtgctcgccgtgctcgtcgaccaccttgaagccgtcgagcacggattccaacgtttcctcgtcgatgtcttcgaggttgccaccgcgtccgaacagcgcaccggaagcgtcgatggcggcctgggtagcggcctcgccatgcacgaagctggtgacctcccaggcgagggtcttctgggcctcgcgcttgccggggttggtcttggattcctcgaccagtcgttcgatttcggccttgggcaggaaggtgaacgccttcagcaggctttccatctccacgtccgggcggttgatccagaactggtagaacttgtacgggctgagcatcgtggcgtcgagccagacggcgttgccctcggacttgccgaacttcttgccggaagcatcagtgatgatcgggctggtgaacacgttgacgtccacaccgcgcaccttgtggatcaggtccaggccggaggtgaggttgccccactggtcggagccgccgagttccagcgtgcagtggtattcgtcaaacaggtggaggaagtcgttgccctgcagcacctggtagctgaactcggtgaaggagatgccttcctcagagttcaggcggcgggcgaccgtgtccttggcgagcatggtgcccagacggaagttcttgccgacgtcacgcaggaagtcgatgacggtcatcgaggcggtccaatcgtaattggacacgaaacgtacggcgttcgcgccttcggtgtccagaatgccgccgatctggttcttcagacgatcggcccagccggccaccacgtccttcgggttgagcgtgcgttcgccggactggcgcgggtcgccgatgagtccggtggcgccgccgaccagggcgattggatgatggcccgcaagctgcaggtgacgcatgttgatgagctgcacgaggttgccgatatgcaacgatgcagcagtggggtcgaagccgcaataataggtgatgggctcgccgttcagtgcttctgcgagtcgatcccggtccgtggactgggaaatcaacccgcgccattccagttcctcaagcagggtgttgaaacccgcttccttgaagtcggtgacgtgagccatagcttgtcgcttctccctatcgaattgtgaatgagactgcccaattgggcacagtcaagtttcgcagaacatggcgacagtgccgaacaccagccgagccgcgcgattcagtaaaacaccttattctagcggcgcgggcccataagttcgcgcaaagagtcgatgatgtcctgacgatccggcacctggaacttcgggaaggacttgagcatacgcttctgctgtgcgttgatgacgccattgacggcccagcgcagacgctcaaccgtatcctgcgaaagctcacgcatcctgtcggataccgcacgggagccccactgccacgtgccaccggcgcgtgccgccacatcctgcaccacctgagagacggaatcgagcacctgctcgaatccgagcatgcccgcaaccgtgaccgccaagtcgatgatggtgatcagggccagtaccgtgaccagcgtatgcagcatcggcagcggaatcatatccgtgacccgctcgacatatggctgcgaaccaagtaccacgcccacgccgccgagaccgaaaatcaacgcgcccagcaggcagacgcggccttggaggttgaagcggaaattcgagtaatcccaccagcgggcgtggaacagctgctccatgacccacgaggttgtgtattcgagtatcgtggcgcccaccatcgaaatcaggaagatgatgatcgggttatgtacgttgccgagaatggcgacgccgagtatcgcgccggtgccgtagatcgggcacagcgggccgttgaggaaccctcggttgaccaagcggtgctgttggcaggagacgagaatggattcgtacatccagccgacgaaactgtagaacagaaaccagaggaaataatgttcgagtgtgatgatcatcgacgggcttcgatctcggcgtagggcttcgcggcgggcaacgcgcgcttgttgaaccggtcgagcgagaaggtctcggcggtggcggagcatttgtccgccaaggtgaccagatagccttcgatatagcgcggcggcaccagggtcatcgggaacatgtggttctcgatgctgttgcgttcgatatcgttgagcttgaagtccttcagggcattgaccagggcggcgtggccatgggtgaagccatgccactggtgttcgccgttatcccagtcgtgccagtcgtacaggaagtaatcgtgcaggagggccgcgcgaatcagggatttgaggtcgacgcggtaccacaggtgcgcgcggtcggccatccacacagccaggcaggcgacacgcacggaatgttcgaacgtggtgacgttgccgtgctggtagcagcagcgttcgatctgcatgtggcgatgctcgatgacctcacggccgtgcttggcgaccaggcgttgaatctgcgttcgggtgagcagatgtcccacggcttcgaccctccgttcgggttggttcagtgcaatcccttgttgtgaattacgattacccgacgatattcaagaatccatcgagtaataccgtgaccgattgtagggcacacgtatgtccgtgcacactcatccaaaagaacgacaacgggaaccgttaatcgtggtgggtttcaagatagtcgagataaccctgaaaaccgccatcgaggcttgctacatcgtaaccgcgatcggcaaggatttcagctacttcctcgctccaccatccttgagcacaatagactacgacagttcgatctgtgggcacggttttgagcacatgggccagagggtcgagtggtgcattgatggcaccttcgaccgggtgggcggcgaagtcggctggttccctcaagtcgagcagcgtgaccgtattcgggtcgagcttggcaaattccgccggcgtgatgcggcggtacgatgcttcactgctctcatcgtcatcgaccgcattacgcaaagcaataggcatgttcttcccctctcgttccgatcttggctcccctcaaggaggggtgccacatagctctaaatcgcgcaagccggctgaatatagttggccggatcaatagcagtaatggtcggctgctcaccgcacaccgggcagtcgggcacatggttcggcaacggcacacggcggatgttcatggtcagggcatccacagtgagcatacgagccacgagcggctcccccacgccggcaatcagcttgacggcctcagtcgcctccagactgccgatcacaccgaccaccgcgcccagcacgccggcttccttgcaggtcggaatctcaccggcggcgggcatgtcgcggaagatgcagcggtagcaggggccttcgccgggaatgacggtcatcacctgaccggcgaatccgaccacgccggcatggatgtacggcttgccggccagcacgcaggcgtcattgatgaggaattttgcggcgaagttgtcggtggcatcgatcaccagatcgtacggttcgatgaggccggcgatgttgctcgcgtcgacgagctcgtagtaggtatcaaccgtcacatccgggttgagcgcgcggatggccgtggccgcggattccactttgggcgctccgacacgtgcagtggtatggatgatctgacgttgcagattgctcatatccaccacatcgccgtccaccagtccgatatggccgacgccggccgccgccagatacagggcggccggagaaccaagcccgcccgctccgatgatgagcacgctggaggccagcaaccgcttctgccctttgacgcccagccccttcaaaatcagatggcgcgcgtaccgctccacctgttcatcagtcaatgccatgttctctccatgtttccagctcccctcagtccgctacgcggccagctcccctcagagaggggagctaataaaagtgtcagtgcaaatatcccgtagtcggactggacggcacggcctgtccctcggtcaccttgcccagaccggacagatacgccgcacgaccagcatcgatggcgtgcttgaacgcctcagccatcagcgggatattgccagcagaggcaacggccgtgtacgccatcaccgcatccgcacccatctccatggcgtcgcatgcctgactcgggcgtccgatgccggcatcgatgatgaccggcacatgcgcattggcgatgatgatctcgatgaagtcacgcatgcgcaggcccatgttggagccgatcagcgaaccgagcggcataacggcggcggcaccggcctcctccagctggcgtgcggcaatcgggtccgggaacatgtagggcatgaccacgaagccttccttggccagcatttcggtggctcggatggtttcggcgttgtccggcaggaggtacttggtctcgtgttcaatttcgaccttgacgaagtcggtgtggcacacttcgcgtgccagtcgggcgatacgcacggcttcctcggcgttgcgcgcaccggaggtgttgggcagcaacgtgatgccttcgggaatgtagtcgagcacgctgttctcggtggtctgcgcgcggcgcagtgccatggtgacgatttgcgtgcctgcatgttcgaccgtggccttgatgaggttcaggtcgtagcggccggagcccagaatgaatcgcgactggaactcgtgaccgcccagggtcagcggcttgtcttccactggcagaatcggcgcggcggtgccgaccggattggtgacggcgggctgcggcggcagcggagtcgcctcaacagatgcttcagtaaccggattaatattgctcatagcttttcctttcatccaccctgtacaaactgcacaatttccatgacgcactggtcgtcgagcatggcgtcggcacgcttatcgcgcgggataatctcaccattgagttcgatggccacacgctcggcgcggaatccgtgcgcttcgagataatcggcgacgctgaccggcgtctcgagcgtgacctgctctccgttgacctgcataatatcctttcagatagtaaaaaagggtgcacgaaacgaaccgtaccttaagtggtgcgcccattcatgaacccaatcatgcgaccgttcgaccgctgtgatgtattggctccatcacgaccgtctcacggctgaattatgcaaacggaatgaaagctgtatcggagaacccggcaaatctgcaacaacgattccttacggcggcatgacccgcgtcaagttccccggtcgaagtctggcgacttcctctcagcctcacggctcccgttcgttacgatttctcagtgtatgccgttgcagtgacaacagcaaaatagagctccctctgacgagggagctctattgggactagaacgtgccgggggctttgtaggcggagccatccgacgtggatgcggggaagagcttgagttcttcgacctcggccttggcgtcggcgatctgctcgcgcacgcgaccgtaagcggtgccgcccttgccgttgcgggagtcgaccgaaccgtggctggagagcacttcgcgtactcccggagccttgtcggccggcaggaacgcggcgaaggtctcgatgaagtcattgtcggtcagatcccacagttcctggccgcggccttcggcgagcttgacgcaggcaccagagagctcgtgcgcatggcggaacggcacaccgttcttgacaagccattcggcgatgtcggtggccagcgcgaagccggtcggggcttcctcttcaagccgctcgctgtcgaagtgcatggtcttgaccatgccggtgaaggcgggcagcagcacttcgagcgtatcgacctggtcgaacacggcctccttgtcctcctgcaggtcgcgagcgtaggcggtgggcaggcccttcagggtggccagcagaccggtcagatcgccgatgagtcggccggacttgccgcgggcgagctcggcgatatccgggttcttcttctgcggcatgatggaggagccggtggaatagccgtcgtcgagcttgacgaaggcgaactcctgggtgttccagatgatgatctcctcggacaggcgggagatgtccacgccggtcatggcggccacgaacgcgaattcggccacgagatcacgtgcggcggtgccatcgatggagttgtcggtcacgcgggagaagccgagctcacgcgccacggcctccgggtcgaggccgagcgtgttgccggccagtgcgccggagccgtacggagaggcgttgatgcgcttgtcccagtcgatcagtcgctgcacgtcgcgaatcagcggccaagcgtgggccatgagctggtgcgcgagcagcacgggctgggcgtgctgcatgtgggtgcggcccggcatcacggtgcggccggccttttcgctctgctcgatcagggcgttgacgaggtcaagcaggagtccggcaatcgcacgggagtggcggcgcagccacatacgaatcaggcaggcgatctggtcgttgcgggagcgtccggcacgcagtttgccgccgagttcgtcgccggcaatgtcgatcagtccgcgttcgagggcggtggcctcgtcctcatcgtcttcgatgggggcgaaggagccgtcatccacatgacgctggagcgtgtcgagcgcatcctccatgcgctgcagctcgtcggcggtcaaaagtcccgcacggccgagagcacgggcgtgggcgcgggaaccggcgatatcgtcgtcggccaagcgccagtcgaactgcgtggacttggacagtcgggccaactccggagacggaccggatgtaaaacgaccaccccacagggccagatgttcgttgttctcagtcatgaaagctccttgaaaagtgaaaatagctgtgtttaagcgtagcaatgtgttcaaacatacagttgcccccgctggcgagggctgtcacatggagtgtgactgaggacagtcctttcaaagaccactcccagtcagctatgccgacagcctcgcagcgggggcgactgagtaagaattactcgacggtgttcttcgggacctcgatgccgttgccgaacttgacgtcgcgggctgcggccacgcgggacggcaggccgtagatgtcgatgaagccgttggaggacttctggtcgaaggtatcgccggaatcgtaggtggcgagcttgtagtcgtacagcgaggagtcggaacgacggccggtcaccacggcgcggccaccgtgcaggaccatgcgaatctcaccggacacgtacttctgggtgtcttcgatgaaggcgttgagcgactgggttgccggggagaaccactgcgcatcgtagaccagctcgccccagcgcttgtcgatgtcgcgcttgatgcggtgctgttcgcgttcgaggcagcagttttcgagttcctggtgagcggtaatcagggccacggcacccggagcctcgtacagctcgcgggacttgatgccgaccaggcggtcctcgatgaggtcgatgcggccgatgccctgggctccggcgcggcggttcatctcttcgatggcctgcagcggggtgacgtcacgtccgtcgatcttgaccggcacaccttccttgaactcgatgacgacttcatcttcgaccggcgggaaggccgggtcgtcggtgtaggagtagcagtccttggtcgggccgttccacggatcctcgaggaagccggtctcaatggcgcggccccatacgttctggtcgatggagtacggggacttctcggtctgggtgatcggcagcttgtgctccttggcgaacgcgatctcgacgtcgcgggtcagggacaggtcgcgaatcgggctgatggccttcagcgtcgggtcgatggaggcgatggagacctcgaaacgaacctgatcgttacccttgccggtgcaaccgtgggagatggtgtcggcgccgaactggtgggcggcgcgcacgaggtgcttggagatcagcggacgggagatggcggagaccagcgggtagacgccttcgtacatggcgttggccttgagggccttcatgcaatattcgttggcgaactcgtcacgggcgtcgaccacgtaggattcgacggctccgcaggcgagggcgcgctgcttgatggtctcaaggctttcaccaccttggccgacatcgagggacacggccacgacgtccttgccggtgcgctccttcaggtacgagatggcgacggaggtgtcaagaccgccggagtaggccagaacaatgcgcttgttatctgccattggttccctttcattcaaggtctgaaaaaacaaactgatgcaagtatatacagaggactgtatatttatgcacggcgtgttggttatttggaagcgaggcttagtagccagtcggagcgggagacggcggtgtcgtcattggtgcaaatcaccatgacggtgtcgtctccggcgatggtgcccagcacgccttcgatcggctgcctgtcaatcaccgaggccacgtattgtgcggcaccggaaggcgtgtgcaccacaaccagatttccggcggcggccaccgaggtgaccagtccgttcagcacgcgggacatctgtgcctcaccgcgctcccctacatcctcaccttctgaagcaacgacgctgcgacccaccgtgtaggccaccgtgccgtccttcagccgggtcttcaccgcatgcatctcgtcaagatcgcggctcagggtcgcctgagtcaccgcaatgccctcgtcgataaggattttggacagctgtgattgcgaggtgatgatatgcgtggcgagcgcctgttctatggcactcagccgcgccgccctggtggcagggcgctgcagggacggaccggtttcactcatgcgagcaggctttcgtctccacgggccttgccggtcaaccaagtcagcaacgctttctgtgcgtgcagacggttctcggcctcgtcccacaccacggactgcgggccatcgatcacttcagcggtgacttccttgccgcggtaggcgggcaggcagtgctggaagagcgcatccggcttggccaatgccataagttcggtgttgacctggtaatcccagaacggcttggaacggatggcgtattcggcctcctcgcccatggagacccaggtgtcggtgaacacgcagtcggcgtccttcactgcttccttggcatcggtggtgaccaggatggagccgccggtctcggccgcgacgcgcttggcgtcggccacgatgtccgggcggggcaggtagccgtgggggccggccacgcgcacgtccatgccggccacggcaccgccgagcaggtaggagttagccatgttgttggccgcgtcaccgaggtaggcgatggtctggttcttcaggttgtcgacgccgcctcggtgctcggcgatggtctggaagtcggcaagaatctggcagggatggaagtcatcggtcagggcgttgaccaccggatgggtggagtacttggccatttcttcgacgcggtcctggccgaaggtgcgccacaccacgccgtaagccatgcggtcgagcacacgagcggtatcggccacgggctcgccacggcccagctgggagccggacttgtcgatgaccagcgggtagccgccaagctcggcaacgccgatggagaagctggaacgggtgcgggtggatggcttgtcgaacagtacggcgacggcctgcggaccggcgaacggctgcttgtagaagcggtcatggtggaacttgatggcaagttcgagcacctgcttctgctcctcatggttgaggtcgtcgtcacgcagcatgtggcgaagttctggggtcatgatgatctccttggatcggtgggtcggcagtgacggcgagaaatcagtcgtcgggcaggtccgtaggcacatccttgaggatggcaagtgcctgatccacgtcttgagcggttacaatcagcggcggtgcgaaacgcagcgcattgggagccaccgcgttgacgatgagcccgtgttcgaggcagtagttcatcaccgcgtgggagcagggatgcttgagctcgacggcgtccagcaaaccacgaccgcgtacggaaacgaacagcggattaccggtggccataatgccatcgcgcagctgttcgccgcgagcttcggcgttggccaccagattctcgtcttcaatcacgccaagagtggcgagtcccgcagccgcacccagcggattgccggcaaaggtggagccgtgggaaccaggagtgaacagagccgcaagtttctcgccgaaagcgatcatgccgcccatcgggaatccgcctgccacgcccttggcgaaagtcaccatatccggcgtcacgccgccggacagatcgtcacgctggaatgcgaaccacttgccggtacgtccgataccggtctgtacttcatcgatgatgagcagcgcgtggttgatatcgcacagttcgcgcacgaacttgacgtaatcggcgcccaacggctgcacgccggcttcgccctggataagttccagaatcacagcagccaccggacccttgccatagcggccgagaccggtctgtgcaaaagcgtcgtgcagggcgaccttgtcgccggcgcgcacgaattcaatgttcggcaccagcggatcatacggcttgcggataccgggtttccatgtggcggacagcgcacccatcgtacggccatggaagccgtgagtcattgcgagaatgcgtgcgggcttgccgccgatggaaggcagggcaccaggcaaggtgcggccatacagcttggcaagcttgagggcagcttcattgccttcagcaccggagttgccgaagtagactttggagccttcaggtgcaccagccagcttgaccagtttggatgccagctcaatttgcggctcggacgcgaaatagttgctgatatgagccaccttggcagcctgatcggcaaccgctttgacccacttggggtgggcgtatccgagggaattgacggcgatgcctgccaggaaatcgaggtattcgttaccgtcaacatcccagatgtgggcaccttggccgtgatccatgacgcgcaacggcgtaccgaacacattcatgtggacctgagagtactctcccagccacttgctgtcttccgtacctagtttttcctcatgctcagtagccataagagctcctcatttccagtccttcatcgggcataaccatggtaccgatgcctgcggaggtgaatatctcgttcaaaatcgaatgcggcttgcgcccgtcgatgatatgggcttggggcacgccaccgtcgatggccctgacacaggcctccatcttgggtcgcataccggattccaggtccggcagcatatcgcgcaggttttccacaccgatccggccaatcagagaattcttgtccggccaatcggcgtacagaccatccacatcggtcaagataacaagcttgcgtgcgcccacagcggcagccaaagcggcggcggcggaatcggcgttcacgttgagcacttcagtggcatcttcttcgttcggagccacggaagagacgaccgggatacgaccggcggccaccagatcctcgactgccgaggcatcgacggaaaccacatcgccgaccaagccgatatcggtgggcttgccattgatgatgggcctgcgctgcatggccgagaacaggccgccgtcttcaccggacaggcctacggccagcgggccgtgcgcgttgatcaggccgaccagttcgcgtgacaccttgccggtcaggaccatgcgcaccacgtccatggcctcgggggtggtgaccctcaggccgcctttgaattcggatttgatgccgagggccttgagcatgtgggagatctgcgggccgccgccgtgcacgacgatcggatgcaggcccacctgacgcaggaagaccatgtcttcggcgaagcactgcttcagatggtcatcgaccatggcgttgccgccgtatttgacgacgatacgctggccggcgaactcctccagccatggcagcgcttcaataagcacttctgccttctgatcggcgcgcaaatcggtgtgcacgtcgaaatggaacccaggtcccttcaattctgtagccaatttttctcttttctgcgacgccggcgacgctatcgccgccggctgctacaaacagcccactgggctgtttgtcagctttcgtagtcggcgttgatgtggacgtattcgtgggtgaggtcgtcggtccagacggtggcctcggcgtccgagccggtgttcaggtcgatgtcgatgtggacttcgcgcggggtcatgtcgacctcgctgcggtcgcggccggcgccgccgttctcgcagatgcgcacgccgttgacgtccacggtcaccttgttcgaatcgtaaggcgcgacttcaggcggcacagtgcccagggagctgacgatgcggccccagttcggatcgttgccggagatggcgcacttgagcaggttcgaggcggcgacggcacgaccacaggcaagtgccgcgtcttcgctggtggcaccggtgacggtgatacggatgtcgtgggaggcaccttcgccgtcgccgatgatttggcgggacagggatgcgcaggcctcacgcaccagcttgttgaattcgtccttgtccggttcgacgccggaggcaccggaggcgagcagcaggaccgtgtcgttggtggacatgcagccgtccacgtcgatgcggttgaacgaatgttcggcggccacggcgagtgcggcctgcatctggccggcggagacgaccgcatcggtggtgatgacgcacagcatggtggccagctgcggggcaatcatgcccgagcccttgaccatgccgccgatcttccagccgttggagccggtcagttcgaccgttttcggcttggtgtcggtggtcatgatggcgtgggaggcggcggcgccggcttcggcggtggcggcaagagcctcatgggcactcttggcaccagccaacacgttgtccaacggcagcagttcaccgatgagaccggtggagcagacagccacatcattcggttcggcgccgatgagaccggcgaccgtttccgcggtggtgacggactgggcgtaaccggcctcgccggtgcaggcgttggcaccgccggagttcagaatcacggccttgacgtgaccgtcggcgacgaccttacggctccactgcaccggggcggcacagaaacggttcgaggtgaacacgcctgcagccgcgtcgagcgggccgttgttgaccacgagggccaagtccttcttgccttcgacggatgaaataccagccgccacgccggcggcggagaaaccttgtgcaaatgtaacgctcacggtgctactccgatcttggtcaggcccgcgtcttccggcaggccgagtgcgatgttcagtgattggaccgcttgtccggcggtgccacggttgaggttgtctatggcggcaaaagcgtagatgcggccggccttgcggtcggcgacgacctgcaggtgggctgcgttggatccgatgatgttgccggtggcgggcagtgtgccctcgggcagcagcaccatgaagtcctggccttcataggccttggaccatacggcgcgaatctcctcatcgctcagtgccttggccttgtccgtcatgcgggcggacacggtggcgaggatgcctcgggacatgggggcgagaatcggcgtgaagccgagcgtgaattcgctggcttcggccgcgctcttgccggccgcgtgggcgaagttctgcaggatttcgggaatgtggcggtgcttgccgcccaccgaatacggcagggcggattgcagggcctcggcggcaagcaggttggtgcgcttgagattcttgccggcacccgagtatccgacgaccagatcggccacgatatcctgcgattcaaccagtccttcggcgatgccgggctggagggccagcgtggtggcggtgacgttgcagccagggcctgcgatgcgcttggtgccaggaagcgccgcgcgctggcgggtgtatgagccgtccgcggctttgccggtgatgagctcgggcatgccgtaggtccaatgctcatagaaatcgccgccgtagaactcatcccaagcggcctgttcttcgagacgatggtcggcgcccaaatccacaaccacggcattcggatcgagctgcgaggcgagcttgcccgaagcaccgtgcggcagtgcgaggatgataacgtcatgcccgttcagcacttcgggcgtggtatcttcgacgaccagattggccagttggggaatatgcggcatgtgcttggccattgactcccccactgaggaatggcctgccacgcaggtgatgtcgaagtcggggtgcgcggccagaatgcgcagcgcttcaccgccggcatagcccgtggcaccggccacggccactgtatatttcgccatactcatctcttttcactgatgtttcttcggatgagtatacgcgattatgcagactattgcatatttatgcagtgggtgtgttggtatgtgaacgctacttatgcggagatggagtcggaggaggagccggtgccgccggtgagttgctggagggcttcctggtagaggctcatggcgtcatagccattgaaggccatccagatgacggcgatggtgtacagcacgttgatcaccacggcggccacagccaaaccgaagcctttcatatggaaggtgcgcgtgcgccacattgccaccgcgcccatcagtgccgagagcactggcaccgggaagaacagggcgaggataaaggagatgatcgcatacgaatcccagtgcccgtagagtgggttctggtttggatcgttcaggtcgatgccgtggtaataatgcggctggtgaggctgaccgttcggctgttgaccatacgactgcccctgcatgcccgggtacccgcccggatatgcgcccggaccggactgttggccgccttgagcatacggccagccgcccgcctgctgattgccgggccacgccggctgctgaccgtacggctggccggcctgctgggattgcgccgcgccaccgttgatgccagcggctgcggcggaatccttcttggtatccggctcgggagcgccataaatatacgggttgtaattcggcccgtattggccagacatagcaccatattcaggctgctggtactgcccgtatttcggcttgtcctgctccggttggctcatgacgctcctcgattcggatgatcggttgggtcaggcgcgcagctgggcgccgatttcggcggcctcagccacgatggccttgcggatggcgtcgctgtcttcggcggacagcgtcttgctcggcgaacggaacaccaccgcataggccagggacttcttgccctcgcccacctgttcgccggtgaacacgtcgaacagttcgatggattcgaggttcgcgccggcggccttgcgaatcacgttctcaagctggcctgcggtcacggtctcgtccacggtgaaggccaaatcctgcttgaccggcgggaacgtggagatcggcttggcctggacgggcttgccggtcagcgtggcgaacagcgcggtgaggttcagctcgaaggccgcggaatgggccgggaagccgagcgcctcgttgacgcgcgggtgcagttcaccaacccagccggtgaagacgtcgcccaccatgacgcgggcgacgcggccggggtgccattggacgggcacatcgtcggcggcgggctggtcgagttcgattgcggcaccgatacggccggcgatgcggcgcacggcctcgacggcgtcggaccagtcgaccgggcgcttgccgcccatccagccatcgtcctcggccagaccggtcaggatgccggccacatggtcgggctgttcgggcagaccggcgtcaagcgcggcgagctgttcgtcggtggggcgcacgccgccgggcagtgccgggatggcgggcgcgttcggatcccacaggtagacgtggccgagctcatacagggacacgttttcgatgccgcggcggatgttgcgctgcacggtggtggccagggtcggcagaatctcgcgacgcaggtacggacggtcgccgtagagcgggttggcgatctcgacgctgaccttcttggtggcttccgggtcgaagccgaaggccttgtaatcgtcgtcgcccacgaacgggtagctcagcgattcgaccatgccgaactcggcgagctcgtccgccacgcgacggcgacgctgctggtccggggtcaggcccaccagaccctcgaccggtgccggcggcacggtgatcggaatctggtcgtagccgaccagtcgggcgatttcctcgaccaggtcgcacggctcgttcaagtccggacgccagctcggcgcggttacggcgaactcgccgttgccgccgccggccaccgtgcagccaatgtcggtcaggatgtcggagatgcggttgatgtccacgtcgaggccggccacgcgggccacttcggaggccttgaagtggatgaccttggcgcgcggcgtgttgttcacgtcgttcgggtgttcgctgggctcgccgttgccgtacttggccatgagctcggcggccatctgggtggcggcgggctgcagcgcggtgtcgacgccacgttcgaagcggcgggaggcctcggatggaatcttgtggcgacgggccgaacgggcgatggtcacctgatcgaagtgcgctgcctccagaagaatgttcttggtgtcagcggtcacttcgccatacaggccgcccatcacaccggcaaggccgaggatgcgcgagccgcgttcgccgttcggcgaatcggtgataagcagatcttcgacgctcaggtcatgttccttgccgtccagggtggtgagtttctcaccctcgttggcgcggcgcacgacaatcgggccttcgagcttgtcgaggtcgtaggcgtgcatcggctggccgaggtcaagcatcacgtagttggtcacgtccacggccaaggagatggagcgcatgccggcgcgaatcaggcggcggcgcatccagttgggcgtgtgggcgttgggattgaagtccttgacgatacgcgcgtagtagcggtcgcaaccgggcacgccgtgaatcggattgttatcgtcgatttcaacatcgatgtccaccggggtgccgggctggtagtcagcaggttccggggccttctcgttcagtgccacggccggatcggtgtaggcggcaccggtggagtggtggtattcgcgggccacgccacggtaggacagcgtgtagccacggtccggggtgatgttgatctcaagcagaggctggtcgaggtgcagcaggtgcatggcgtcctgaccaggcttcagagcctcatattcagcctcggagaagccgtactgacgcagcagaatgatgccattgtggttgtcgcccagacccagctcacgttcggaggcacacatgccgttggagatgtggccgtaggtcttgcgcggctcgatcttgaagtcgccgggcagcacggcaccgggcagggtgacgacgaccttttcgccggccttcatgttgggcgcgccgcagatgatgccgcgcggcaccttgttgccgtcttcgtcggtctcgttccattcgtcgccgcagtccacgtggcaccagttgatggtcttgccgttcttctgcggttcgggggtggcgtcgaccacgtagccgaccacaatcgggccggtcacctgggaggagtggatctcctcttcctcaagacccaccttgacaaggtccttggcgagctgttcgtaggtcaggccttcgggaacctcgacatggtccttgagccaatcgatatcgatcataggcatggctgaatcactcccccatcacaaactgttcggcgaaacgcacgtcaccttcgaccaggtcgtgcatgtcgttgatgtcgctgcgcagcaggagcgtgcgctccatgccgacgccgaaggcgaaaccggtgtagacgtccgggtcgatgccggcggacttcagcacgttcgggttcaccatgccgcagccgccccactcgagccagccggggccgcccttcttgtcggggaaccacaggtcgagctcggcgctcggctcggtgaacgggaagtagctcgggcgcaggcgcgtcttggcttcagggccgaacatggcgacggcgagcttgtccagcacgcccttcaggtcggccatggtcaggtgcttgtcgacggcgagggcttcgcactggtggaacaccggagtatgggtggcgtccagctcatcggtgcggaacacacggccgggggacgcgatgtacagcggcacgccacgggtcaggagggcacggacctgatcggaggaggtctgcgtacgcaccaccatgttggagccgacgaaaccggcggcgtccttggcttgattgcccttgacgtagaaggtgtcctgcatctggcgggccggatggtccgggccgaagttcagggagtcgaagttgtaccattcggcttcgatttccggaccggaggagatctgccagcccatggagatgaagaagtcctcgacgtcttccatcagcttgggcagcgggtgacgggcgcccagaggcttgcggttcaccggcagcgtcatgtccacggtttcagcggcgagtgcggccttctcggcggcttccttgagctcgacttccttggggccataggcacggccgaagtcggcgcgcagcttgcccatgagcttgccggcttccttcttctggtcgacgggcagggagccaatggccttgctggccttggtcatcgccgaatcggcacctgcgtacgttgtcttgatggccttgagctcctccaggttggaggcgttctggattttctcgatgccctcggcaacctcagcagtcacctggtcggcgtcgaacaccatttgttctgccacgagaaccctttcgtctgatgttttctcagcgtttcacagcgtttttaccggtttcacattctttcaacatgacccgacatagacagcgacatcagcatcaccgcggccgaggtgccgaggttcagcgattcggccttgccataaagcgggatggagacgatgcggccgcagcgcgtgaggatgtccggttccaaaccacgcgcctcattgccgaacaacacggctttcggagcctcgaccgccgccttgtccgccagtactgcgggcaggctttccggcttgcgttcttcggtgccgtatacgtcggcggcccagacgtccaaattatggtcgcctgtccaggtgaagaattcgtcggtgctcatggcgagtaccggcagatggaacagagagcctgcggtggagcggatgaccttggggttcagcacgtccacgcagtcgtccacgaagattacggcgtcacagccggccgcatcggccgcacggatcacggtgccggcgttgcccgggtcgcgcacctgccagaagacggcaatctgcggggcccgaccgttcttgccaagttcgacgtcatcggcaccggcgtgcatggactcggcattgccgacggccgcgatgccctgggcgtccggactgatgcggtgcatcacgtcgccggtgcagtagtgcacataaatcgtggcatcctgcgaggttccgacgatcttctccaacgtggaggagatgatacgcggatgttccaacgcctgcgaaacctccacatagaggtcctgcaccacgtccggccgccaagtgacggcctcgcgcacggattgcgggccttcgataagaaaacggcccgaacgttcgcggcctttggtgcgggtcagatcggcgatgcggcgaacgcggtcggatttcggattatcaagaatctgggcgttgatgggcataaccactaccctactgccgggtcattacgtcagtcgtggctcgctcccgctggcggaggcatcgtaagcctttcagacaccttgaaaggcactgtgccagtctgtcgcctttcagacaccttgaaaggcgaagtgccaattcccggtgccgatggctacgcctatggaggccagcgggacggccagacagatgacgtagaagatccagtcgataggcttcagacgcgagatacgggcttgggagcgtggggcgctggagccgaagccgcgcgcttccatggcggtggcaagtttggtggcgcgccggatggagagcaccagcagtccgaacgcttgggagagggcacgggcgatggcgttaccgtcgccaaggccgcgcgaacgctgggacaagccaagtgcgcgccaatcttcctgcagcagcgtaaacatgcgcaatccagccaacccgccgtatacgaatcgcggtgagaagtgcagaatctcaaccaaaccgtccgccaaatcagtgggatcgaggcccagggccaggatcacgccgggtacggcaatggccgccaccctgatagccgtggcgatggccagattaatggatccctcactgatcacaatccagccaccctgccacaggatctcgcccgaggtacggccgtagagaaacacggagataaaactgccggcggcggcgatccataccggccaggtcttacggcatacggtccacggagccacgccaccaatccacagcagcacgaattcgatgccgagcgccgtggatgcggataccacatccagactgatgaacatcggaacgcacagcaacagcgcaccgatgatgcggctgaccgcgttgatgcgcgctatgaaccatgagggcgatgaggctttgaccggctccacgcgcgtttcctgcgggctgacggttaccacgtcactcatgcctcgcctcctcgaacatcacgcgtcgtgcgcccagcgcatccaccagcgcctcatcgtgcgtcaccatgaccacgcacgagccttggtcgcggatggcggcgatcagcttgaccatttcattccacgtactgaaatcctgtccgaatgtcggttcgtccatcaccaacactttgggtgcggcggccagcatggaggccacggacagtcgccgcttctccccgccagacaaggtatacgggttggctttggcgaagcgcgtgagattcatctgctcaagcatgcggtcggcggtccgataagcctcgtcttggctctgccccatcgacttggggccgatggcgacttcgtcacgcacgaaattggcagcgaactggtgttcgggctcctggaacaccatgccgatacggcccagcagttccttgcttttccagtcaatcggctcacgcccggcatgcgcgggcttgaggttgtcggcgatgagcaccttgccggcgataggctcgagcagcccggccaaggtcagggccaaggtcgatttgcccgcgccgttcggacccatcagagccgttacttcgccgggatagaaatccagattgataccaacgccaagagcggtcccacggccaaagcttaagttctcagtgctgagcaccggcgcatcgtgcgcaggctcccgcttcggcgagtaatcgggaatcgcacggcccggcacccacgcgccaccggcggccaacacgtcgcccatctcggcgaacacctcgtccggcttgccgtcggcgatgaccgcgcccgtgggcgaacttgcatcgggtcggccgagcacaatcacgcgatcgaccagatcgagccatacatcgatatgatgttcgaccacaaccatggtctgtccggtggcctcgatgacctttttgaccgcgtcatgcacttcgaccacgccttcggggtcgaggttggcggtcggttcgtccaacaacagcagaccgggcttcatagccagcacgccggccaacgcgagacgttggcgctgaccgccggacagatggcgggtggaccgatccagttcgagtccgccgagtcccaccatatccaatgattcgcgcactcgctgccgaatctcctcgcgcggcacgttgaggttttcgcagccgaaggccgcgtcatcgcctagtcgttcaagaatgatctgcgagtccgggtcctgaagcaccagtcccacgcggcctcgcgcctcgcgcgcatcgacgccatcgatggtgagcgagccctcctgctcgccttcctcatcgccgccaagtacgcctgcgagaccggccatcatcgtgcttttgcccgcccccgaagcaccgagcagcaacacacgttcacctggccggatggtgaaatcgacggcacgcaacgcgaagtccttacgcgtggcgtgccgccatccccagccgctggcctctaccgcagccggattaacctgcatcagacgcgcgccttgctgcggccggattcaaagcgttccagagcgccggtggcggcgagcgcacgagacaagtaccagaccaccacgccggcgatcacgacgccggagatgatggagccaaccagataccaagtgacgcgcaggccgttccagcccgggttggtggcccagtagtaggcccagcagcccacgccggcgagcgcaccggacaggatggtggtgccgatgttccacttcttccaagcgaagacggcgaaggcgatttcggcacccagaccctggatgatgccgacgatcagcgagccgccgacaccccactggttgcccagcgtaagctcgaggaaggcggcgagggtttcggcgaacagtgcggcaccgggcttgcgcacgatgattgcggcgagcgggccggcgaacagccagaatccgttgagcagaccctcgaaaccgggggtcacgccctcgaacagggccagcggggcggagcagacaatgtcccagccccagaaaatgacgccggatgcgacggcgatgattgcggcgacgacgatatcgacgacgcgccacttgtaattggctttggccacagcttcagtcatgaatgtgcctttcttctgctcgtacgcaggccgaacatacatggatatatgtacgcacatgatgcacatgttcgtggccacgcgcgggttggttcaggcacgggtgggtaagagcgacatttccgtgcgccggcattatccggtcacgttccatcggtcgagactatgaatctcctctcagccgcctaacggcagctcccgtgtcaactccccgactataaagcaagccgccgtcaaaggcaatagccacatccgtgacctacctgacggcagctcgccaccattaccgatgcggttcggttacttgccgagcttgtccagcagcaaagcctcggtgatcacgttgttcttgaggccgggcagggagatggactcattggggctgtgggcgttggccttcgggtcttcggggccggtgaccagcacctgagcgttggggaaaatgcgctgcagttcggggatgaacggaatggagccgccctcgcccttgttgatgggctcaacgccgaaggcctcggtcatggcttccagcgcgtctttggtggccacggcggtcgggtccatggcccagcccatgccgttttcgccgcgttcgacagtgaccttggcaccgaacggcgcgtgggattcgaggaatgcagccagtgcttcctgcgcttcttcagggcgctgggtgggcgcggtgcgcagcgacagacggaagcgggtctccggggcgatcacgttgaaggatccctcgaccgggtgggcgtcgaagccgatcacggtcacggacggcttggtccacaggcgtgaggccagcgaaccggtgccggcgaactcgtaaccggccaccacgccggaatcctcgcgcacggtggtttcgtcaaggtcgcgttgcaaaccgccgattggctcttccgcggccacgccgggcacggccagatcgccgttctcgtcgtacatggaagcgatgagcatggcggccaacgtgttggagtcgagaatcgggccgccgtactgaccggagtgcaccgggtgctcaaggccctgcacggtcacgtccacgcaggtgttgccgcgcagcgaggtggtcaaagaaggaatgtccgccgaccagttgccggaatcggccacgataatcacgtcggcggcgaattcgtcgcggtgagcctcgatgaagggaatgaagcttggcgagcccatctcctcttcgccttcgatgaacactttgatattgacgttgaggtcgtcgcccaaagccttcagcgcaccggagtggattgcgatgccgccgccgtcatcggcggagccacggccgtaaagacggccgtcgatttcggtggccacgaacgggtcggtgttccactcggccgggtccggaacaggctgcacgtcgtgatgggcgtagagcagcacggtgggggcgtccggagaaacgatatgcgagccgatgacctcccatgcgcccggagtgccgtcggcattggaagcctggaccaccttggcatccacacccacgaggcgcagttcgtctgccacgaattcagcggagcgcttcatatgttcggcggtgatgcccttggcggagatcgactgcagcgcgaccttttcggccagcaccttgacgatgcggttccaatcggtttcgacgcgcgaacgaatctcgtcagcggtgagcgttgccatgatggtcctcctttatatatgtgcgtatatatgtgcgtgagcggcgtcattgcaatgactgcgccagtgtacaagtgtctgaacgtcaccgtaacctcaaagcatgacatggaatccgtttaggaaaaaagaagaggcccaagttcccgttgagcaggccccgaagaaggccgccgatccttctgagaaaaaaggccgtcctaccccgaagatgaagcaggctcaggccgccggtatccgtccgctggttccggtggaccgcaaggccagcgccaaggccgccaaagcccgtctgcgcgagagggagaacgccgagtacgaggcgatgcagaagggcgacatcaaccacatgcccaagtcggaacgcctgccttggcgtatctacatccgtgattatgtggatgcccgtttcaaccttggcgaatggttcatcccggtggccttcgcgattctgatcgtctccatgttcgtcacttctttgatgcagaaccagtgggcttccatcatcatgatggcgcttatgtacggttacctgattgccgtgatcatcgacgtatggctgatgtggcgcaagctcaaggccaagctcatcgccaagtacggcgaacagtccgtgtccaagggctcccgctccttctcctacgcttggagccgttcgattcagatgcgtcgttggaggcttcccaagccgcgttacccgaagcgcggtcactggccggcagactgatgtccatatatactttggctcccctcgttgaggggctgagccgtaaagaaaacagtccagtggactgtttttaggcgaagtggcggcgatagccgcatatggctccctagcatgggagccatacttatatgcaccaaggaggcaatcatgagcgaacagtttgatctggtcatcatcggggccggccccggcggctattccacagccctgcgcgccgccgaactcggcatgaaagtggcactcgtcgagcgtgacgccaccgtgggcggcacctgtctcaaccgtggctgcatcccctccaaggcgctcatcaccgccacccacaccatcgacaccgtgcaccgtgcggccgaactcggcgtcaacgcctcggtgaatggcatcgacttcggcacgctgcgcgactatcgcctgcgcgtggtcaaaacgatggtgggaggactggccggactgctggcccatcgcggcatcaccgtgttccgagccaatgccgcgttccatgcggatgagatcgctccagcaacttccaaccacatcgtccacctcgttccctcccccgaccaaagcgacatcctcacctatcacaaggccgatgtccccgaacccagcggccccacgatggacctcacggccacgaacatcgtcatcgccaccggtgccaagccacacccattgcccggtaacccgttcgccggcgccctcatcgactccacacaggcgctggaagtcaacgaatttccctcttcggcggtgattatcggcgccggggccatcgcccttgaattcgcctcgatgtggaacgccgccggttcgaaggtgaccctgctgattcgcaaggaccgcgtgctctcagcctgggaccggagagccggcaccacgctgacccgtgagctcaaacgtcatggcgtgaacatcatcacccgcgccagcgtcacccatgtggacaccggcgcgaaccttggcgccaccgtgcactacacgcgcgaaggccaggacggcgaacagagcgtttggggcgaaatcgcccttgtcgccatcgggcgtgacccgatcaccgacccagcatggggcgtgacgattgatgaccacggacatgtcgccacggatgcgtacggtcgcaccgacaaaccgggcgtatgggcggtgggcgacgtgacggccggtcacgcactggcgcatcgtgcttttgagcaaggcatcgtcatcgcggagaccatcgccggactcaatcccaagccggtggacgaagccgctgtgccgcagatcgtgttctccttccccgaagcggcgtcggtcgggctcaccgtcgaacaggcgcaggcgagagaggacctcgtcgaaatcaaggagaccaactatccgatgctggcgaacgcgcgcatgctgatgagcggcacggccggctcattgaccatcgtctccggctgcgacgcggccaacccgtgcaccccgcgcgtgctcggcgtgcacatggtctccccgatggcctccgacatcatcgccgaagccgaacagctggtcggcaaccatgtgccgctcgccgacgcagcccgcctcgttcacccgcatcccacattcagtgaaacgctcggcgaggcgctgctcaaggccgacggacgaccgttgcacacacgctgagaccaaccagcacaagcaagttcggaccagcgcacctgataagatattgcccagtgtgtttcgtcccaacaaaggaagaagtgatggcggaaaaggacgcgaagccgaagaagcagagcacaatcaagcagatcatccagatctacaagtacacggctaaggaagacaaggccctgccgtggcttgaggccggtgctttcctgctgcctgtagtcgtgatgatcatcatcggtctgattgtcaagtggacctggctgacctggatcttcaccatgattaccgccatcatgatcggcattctgctggccaccatgatgctcacccgccgcgcggatgcagtcggctacaagcagattgatggcaagcctggtgccgccatcggcgtgctgagcaacatgcagaaagccggctttgacttcccgcaggaaccggtgtggatcgacccgaagaccaaggatgccatctggcgcggcacttcgatgaacggcatctacctgatcggcgaaggcgaatacggtcgcgtcatgaaggcgatggatcgtcaggaacgcgatatcaagggcgtcaccgccggctcctccattccgatataccgcatcgccgtgggccacggccccaagcaggtgccgctgaccaagctgcgtagcacggtgatcaagtccaagagctacgagcccacggaccacaagaacgcactgatcgccaagattcatccgcgccgtcgcttcctgctgaccaaggccgagatggaaacgctgaacgatcgtcttcgcacgctgcaggccaagaagggctatgccatccccaagggcatggatccgaaccgcccgcagaagatctcccgccgcgcgatgcgcggtcgctgatcggcagcacaccaccaaatcgcacagaagccccggaatccgttcaatcggttccggggcttcgtcatatgtctcataatcgcgtccacttacatccacctacgtcacctgtcaatacccactgtccacgttgcggacatctctacctactcccccgatagtctccgtttccattctgtaatgatgtttcgttgaaataacgcgcctgcgcgattgtcggccacagtcacgaaacattctcgtaacccaagtttcgagccggcgaaacgcgctattttacgatatataccgttatatctcatacgaaaggagcggtcccgtgaccgaactcaagtccaaggaagacgtcgaggcccttatcaacaaggaaggcatcgagtatgtctccgtccgtttcaccgatcttatcggcgttcagcagcacttcaccgtgccggctagcgaattcctgaaggacgctttcaccgacggcatgccgttcgatggttcctctgttcagggcttccaggccatcaacgagtccgacatgaagctggtcccggacgttgagacctctttcgttgacccgttccgcaagcacaagacccttgacgtggccttctccatcgtcgacccgctgaccgacgagccgtactcccgcgacccgcgtcaggtcgccggcaaggccgaggcctacctgaagtccaccggcatcgccgacaccgcatccttcgctcctgaggccgagttcttcatcttcgacaaggtgcgtttcgagaactccatgcagcgctccttctacgaggtcgactccatcgaagctccgtggaactccggcgttgactccgaagaggacggcaccccgaacatcggtttcaagaatcgcgtcaagaagggctacttcccggttccgccgattgaccacacccaggatctgcgcgacgatatggtcgccaacctgcagaaggtcggtctgatcctcgagcgttcccaccacgaggtcgccggcgctggccagcaggagatcaactaccgcttcaacaccctgcagcacgcaggcgatgacctgatgaagtacaagtacgtcgtccacgagaccgccgctctggccggcaaggctgcgaccttcatgccgaagccgatcgccgacgacaacggcactggtatgcactgccaccagtccctgtggaaggacggcaagccgctgttctacgacgagaagggctacgctggtctgtccgatctggctcgctggtacatcggcggtctgatcaagcactcctcctccgtgctggccttcaccaacccgtccctgaactcctaccaccgtctggtcccgggcttcgaggctccggtcaacctggtgtactccgctcgtaaccgttctgccgccatccgtattccgctggccggcacctccccggctgccaagcgcatcgagttccgcgctccggatccgtcctgcaacccgttcctggccttctccgctcagctgatggctggcctggacggcatcctgaaccacatcgagcctccggagccggtcgacaaggacctctacgagctgccgccggaagagcacgctggcatcaagcaggtgccaagctccctggccgaggctatggacgccctggaagaggaccacgacttcctcaccgccggcgacgtgttcaccgacgacctgatcgagacctggattggcctcaagcgcgacgagatcgaccaggctcgcctggccccgaccccgctcgagtacgagctctacttccacatctgagtttgagagcttagcaacgttgggatttcgccattgctcttctcttgtgggagtctaatgggagtcattcagcgtaactagaaagaacctcgtgaaattcgtttcacgaggttcttttttgtatgttgcgttgtatgttatgcgatgtgtgttgctcctggaatattccaagggcgggccgctacttagtctcccaacgctccttgagtacataggcggcggctttgggctgacggtcgcgagtgaagacgcccttcttgttgccgtcgacgcgcatgatgccttcaccggtttggaagtcgcagaggttccatacctgctcgcccaccactgcctcgaacatgtcgaacacttcgtgctgcatggtgaggtactcgcattggtattcctcactccactgcacgcttggcagcttgtgcgcaccggcatcggtgtccgcaccgtattcggtgaacaggaatggcttgttgggttcggtgttcatccattggttcatctcgttgatgaaggccttcttggctccgatgagctgatacccatcttgcacataccagccgtaataccggttcaggcagatgacatccgcgaactgatggcacttgtctttgcctccggcggccatcagcagattggtgtaggtcagcgggcgatgctgcggatcgagcgtgcgcgcgtaatcgaatatctccttgaaatacggcacggccgcctcggatgccgagtcgttggcggcgtcgatgagattccaagcgccggaggcccccggcattcttttcgtcgaaggggacaattcagaacacaactgccgacacaatcgtcagggaggccagcgagaacagcgtgcttacaagcacgaagccgaccgcatactcgggcatgttgttcttgcgaccggtgaacatggcaatggtggtcatggtcggcagtccggcgatgaccgtgatcatcagcaccatgtcatgggtgatcggcagttgcggcaatgcgccggtcagcgcggtcagtagcgcgtagaaggcgagcgggaatgcgatcatcttggcgactaggccagcatagagttcgtagcgtttgaggacgccccaccacttggtcagcgcgaacaggccgcccaagtagattagcgacatcggcgtggccatattgccgatggtgtgcagcggcttcaggatgatgtccggcaccttgacgccgagcagaatcagaatcagggcgagcatcacgccgacgaaggcgggattgacgaatcgtttaagcaggccgaggacgcgggtgcctggcgaggggcggacgacggccggagaaccaccgtttgcggcattgctcgccgaaccagcattgcccaccgaaccggcgccgttcaccgaaccgttcacgaccgcacctcgcgcgccaatcgcgttgccgccagtcgtttcgtcgaccggctcgcacagccatacgccgtacgtccagagcagcgtctggtcgatgatcgacatcagcgccacataaatcgcgccgttctgcggccaaagtgccataatcaacggaatgccgatgaatccggcgttgccgaaaataagcgacgcctgaaatacatggctacgcgaacctttgagccgcaacagttcggcgaccagccagaacaccaggatgagcagcgcgtacatcacggcggtcagcagcatcacgccccagttggcggcaagctgcgcgcggtccgcgccgtcgacggcgttcgagaacacaagcacggggatgagcacgttgagcagcagcgagcacatgccgtccaacgccgtctgaccatagaaccggagcctcacacatccgtatccgaccatcagcatgatcagaaatccgactaactggccaatcatgacgccgaactgccccatgcacactcctctcgtttgctctcccgcgatttcctgtcactggttcatataggcagccatctggacaggctcggcggcacacgcatcagtatgttcgataccaccacatgccaatccacttctcgttcaaccgttccccgtgctaatgcgccgcctgccaccccgtgttgccggtgctgcgcgagcaccgctacgtgtattgcattccggtggccctcgggcgcaacgtgtgggtcggcgcgaacgtgtcgattctgccgggagtgaccatcggcgacaattgcgtgattggcgccggttcggtcgtgacacattccatccccgccaactccgtcacctacggcgcgccctgcgaggtcgtgcgtgaaatcggcgacaaggaccgcgagtatttctacaaaaatcgcaagctcgacgtgtgggagtgagctttcgcgctactgctctttgagcttaaaacgctcactgaattggcggtcgcgccagtagtagatgtcgtcgcgttcgttgatttcgcgaattaccttgcacgggctgccataggcgaccgtgttggcggggatgtccttggtgaccagcgagttggcgccaatgaccgcgttgtccccgatggtgaccccgggcagcacggtgacattcgcgccgatccagacgttctcgccgatgtggactggcaacgaatactgggcaccctgatagcgcaggtccggacgcacgggatggccggtggctacaagcgtgacgttggggccgatcatggtgtgggatccgatgaagatctcaccatcgtccaccagcgtcaggttgaagttggcgtaacagcgctcgccccaataagtattgcagccccagttcgcatacaccgggcattcgaggtacagaccctcccccgccgcgccgaagaacgcctgcatgagttcggtacggcgcttcgggttggtcagcggcgtggcgttgagttcgagctggagatcacgctgggcggcctgcagatcaaaaaagccgtccacatcatccggcaggtagacctcgccagagaacataagcgccattttctcgcgcgtcgcatcatcgataatcggcttggcgatcggcttgtcttcggtcatcattggctcctgttcggcgttttggcgattgtgtcggtcgaactattctgtcacagactcgttttcgacacccagcatcgagcgcagccagtcaaggattcagatgtgcgattggcaccgtgcgggcctcacacttttcttattgagaacgattcgccgtgcagtcaagccctccatccacccaaaaaggactcgcttttggccgcgtcgtcgcggtaggccttgccgaactcgtcaatgagcccatggaattcctgcaaatccttgacactgaggttcgtatccagcaccacgggcgaataggccctgtggaatgccggatagccggccggcacgtcgaatccaaggaaggcgaacagccgccgcgcgtaggtatcggccacgaatgtgcggcgcgagaacacgtacagcatcagatcgtcggccgtctcgccgccaataccaaataatccaagcaactcggcccgtaattcggcatcggaaatagccgcggcaccctcgggcgcggccccgcaacgctccacataccaccaactcagcgactgtacggtcttggatttgttgacataaaagcctgacggtcgaatcagttcctgcaaacgctccggctccatggccaccagcttatggggttcgagcacaccctccgcgttcaacgccgcaagcgaacgattcacattgccccacgccgtattctgcgtcagcaccgcgcccaccataatctcgaacgtggtctccgccggccaccatccggtcgggccgagtgcgtcagccatggtgcggtacagcaattcgatgcgctccggcacaggccacttgtgtgcctggttggctttcatacgtttcatattctgcattcaggctccgtattagccatccgccattcatttattaggtcgattatgcgttcattaggtcacttgtgatgaacactgccttcaagaatggcttcattccaatgctcattatctcatgctaagcagggcaccgacctaatgaacgcataatcgacctaatgaacgcaacggtaaggaaaaactacagagattcagcgagatatgctcggtccacctggtctggaagtcgaaaatcttgatgacatctaccgcaattcgtgcaggattcgccgcatgaacgggatagtgactaggaatgtcagcacgtcggacaccgattgtgccattcccacgccgagcacgccgaacatcatcggcagaatcagtacgatcggtgccaaaaacagaccttgtcggcacagggccaggaatgaggcgatgccagtgcggcccatggtctgggtcatcatattgcccatcatgttgaagccgttgagaatcaccgtgcagcattggatgtgcagcgcggccacacccaccgcgaccacggccgggtcggagcggaagatctcgaccagttgcggtgcgaacacccacagcaacaccgccaacaccacgagcacgcaggtggcgagccgcacgcagaaccagtacccttctttgacgcgcgcgaacaggccggcaccgtagttgtagccgcacaccggttggaaaccttggccgaggccgacgatcaccgagttggcgcccagcataatgcgcatcacaatggccatgccggcgatggccgcatcgccgaacggattggcggcaatgttcacgcaggtcacggaaatcgaaccggcgccttggcggatcagcgagggcaggccaccgccggccacttcgcgcatgagcagcacatccggcctgcaattgcgcagggacagtttcatcacgccgaatttgcggctcattgtggtcagaatcgtgaagctcaccgtctggcagatggcggtggccaggccggcaccaaaaattccgaggtgcagcacgaagataaacaacggcgcgagcaggaaattcagcaatgcgcccgaaaccagcccgatcatgccgaacgccgattgcccttggtatcgcagcagtccgttgagcgcgaacgacccgcatacacagggtgcggcgaccaacaacggcgtcaggtattgcacggcgtatggggcgatcgtcgaggtcgatcccagcatgacgaccagcggccgcagggtcagcaatccgattgtggcaatcaccaaaccagagagcaccgcacccgcgaagcccacggccagtagtcgggaggcgcgctcattgttctgtttgccgagttcgcggctcatcgagttgcccgcgccgttgccaaagaagaagccgagcgcctgcatcacggtcatgatggagaacgcgatgccgatggcaccggactgcgcggtgccgagctgaccaataaagaacgtgtccgtgagattgtaggcggtggtcaccaagttggagatgacggccggcaagcacagtttgagaatcagcggcttgaccggctgcccggtcatctgccgatatttcgcgtccgcgcttgcgcgtctaatgccatgaatctgcaccatggacggctatcctactcgcgcagggtcctatgcaaaggcgcgttaccgccatacgagtcagcgcagataccgcccggtgatgctgttcggattggccgcgatttgttccggcgttccggtggcgacgatgcgtccgccgctttcgccaccgcccggacccatgtcgatgatccagtccgcattggcgatcacgtcaaggtcatgttcgatgaccacgactgttgcgccgctcgccacgagccggtcgaacacgcccagcagcacgcgcacgtcgaacgggtgcagaccgatggtcggctcatcgaacacgaataccgcgtccgattgggccttgcccatttcgctggcgagtttcagccgctgggcttcgccgcccgaaagcgccggtgtcggctcgccaagcgtcaagtagccgaggcccaaatcacgcaaggtggtcaggcgcgcgtggaccttcttgaggtcgccggtcacggccagcgcctggtccacgctcatcgccatcagctgcggcagactcaacgaaaggtgcgattctcccttaaccgcacgccgaatcgcgtcggcttcggacgcatagcgggagcctccacaatccgggcattcgatggtcacgtccggcaggaactgcacatcgagcgagattgaaccggtgccgtcgcatgtggggcaacgcagtctgccagtgttgtacgagaaatcgccagccttccagccgcccgctttggcgtcgtccgcgcgggcgaaggcgcggcgcaattcgtcgtgaatatcggcataggtggccacggtggaacgcacatttgcgccaatcggcgtggcgtcgatgagattcgcgcgattgatgccctcggctttaagctcgagcacgtgttccggcaaccgctcccccgccgcctgcgctttgagtgcgggaatcagcgattcgagcaccatcgtggttttaccggagccggagacgcctgtcaccgccacgagccggccgcgcggaatatcaacgtccagcggcttgaccgtatgcaactggctggttgtcatgcggatacggccaaggtcgaacacctgcggttccgccacgcgctcacggatgcgcgcgctcacattatcggccaagaacggcgcaatacgactacttggattcgccgccacctcgccgaccgtcccttgcgcgatcacatgccctccttcggcgccggcaaccggtcccatttcgataagatggtcggcggccttgagcacgcgcacgtcatggtccacgaccaccacggaattgccgtccgccaccaagtcatgcatcacgccgagcagcccatccacgttcgagggatgcaggccaatggacggctcgtcgagcacatacagcacgccggtggtgcggttgcgcacggcacgggcgagctgcacacgctggcgttcaccggtcgaaagcgtggcaccggcgcggtcaagcgccagatagccgaggcccagatccaacagtcggcgggccacgtccaggaatgattcgcagatgttggtggccatcgtccgcatgtcggcaggcagggattccggcactccgcgcacccaatccaccgccgcatccaaggtcatcgcgctggcttcggcaaggttcagcccgcgcacgtgcggagcccgggcgacggcgctcagtcgggtacctccgcagtcggcgcatggtccctccttgagaaatcgagccacgcgctttaggcctttctcgtccttggctttggcgagcgcgttctccaccgtgtatacggcgttgaagtaggtgaaatcgagttcggcgaaatcgtcgcctttcttcggcttgtaaagaatatgctttttgacggccggcccgttgaatacgatgtcgcgttcttcgggcatgagctcgctgaacggcacgttggtgcgcacgcccatcgcgccgcacacctgcttcatgaggtcccacatgagcgaaccccatggcagcaccgcaccgtcgtcgatacttttcgactcatccggcaccagggccgcacggttcacttcgcgcacaatgccggttccggagcaggtcgggcaggcgccggccgagttgaaggcgagcgattcggcgccgggcgcgtggaattccttgccacagctgacgcaagtaatgggcagtccggccgccacgttcagcgtcggttcgttgcgcgccccgcaatgcgggcacacgtgcgaggcgacgcgggagaacaggagccgcagactgttgagcagttcggtcatcgtgccgaacgtcgagcggatgccaggcacggtgggccgctggtgcagggccagcgcggccggcacatgcagcacttcgtccacttgggcgcggctggcctgggtcaggcgacggcgcgtgtacgtggacagcgcttccaggtaacgccgcgaaccttccgcatacagcacgccgagcgccagcgagctctttcccgaaccggagacgccggccacgcccaccagttcgcccagcggaatgtcgatgtcgatgttcttcaggttatgcacgcgcgccccgcgcacttcgatcgcctgcggccgttgatcgttgcctatgctcggcactgctccgccaccaccttactgtctgacctattatcaagcgtcacgccgttgcctctttctcgacctcgccctcccccgccgccgcacgagcttcatggtctccagtatcatcacgaccaacgacggcagccgagaggctttcgctattgagcaccgcctctcgcatgcagttcgccgcgtcattaccgagactatccgcgtttagcataatgagttcacgggcggcgggcataatggcaatagaagtccatccacaccgaaggagccccgaggatggaactgcgcgtcctgcgatattttctggcggttgccgaggaaggcaatatcacatgggccgcgcagttgctgcgtatttcccagccgacgctctcccgtcagctcaaacaattggaagaggaactgggcgtcacgctgttcgaacgcggcagtcacaccatcacgctcaccgaggaaggccggatgctgcgcgagtgtgcgcagaccaagtcaatacgagttcctgcgcaccggcattacaaagcactggtcagcgatggttcccggaaaccacccgttggcggaacgcgaatcgttgaccccgcagaatctcaaggatgtgccgctgctgttcccggtgcgcacgcccgtacacaatctgctgctgaactggttcgggcaatacgccgatcaaggcggagctcaacgccgggtatcacacgccggaacgcacccatgagcttttcgaggaactggtgagccatcctgttgaccccacgttccggttgaacgcgccattccgcaccgacttcggccgcaacgaacacggcacgcagggagccgtcaagcgagggcgtgaaggtggcgaccacaccgaatacggccacgccgatcgcgccgccgcgcagaccggcagcttcgccaaggccggccatcgtctgcatatttccacaccggcggtggccaaacagatcaatacgttcgaaaaagaatacgatctgacgctgttcgaccgatcacgcagtggagtgcaactcaccaaagccggcaaggagttcgtcgaggacgcacagatgatcgtgcgccaatgcgaggagagtctacgtcgtgcacaacggtgcagcaccgacggcatcgccaccgtccgccttggcgtttccatactgcgccccggccgccgcatcctcgacctatggcagcgcgacgccggcaagcacaccgacatccgcctggaactggtgtcgatgcccgatgactccgaagcgatcaacgacatcgtcacccacctcggcgaggacgtcgatctgatatccacggccttcgacaccggctattgggacgacacctgcaacaccctcgccctcgattccgagccgctgtgcgtggcggtgccgcgcaatcacgcactggcgagacgcgcacggctcacattgaaagacctcgaaggcacacgcagccgcattctcaaacgtcatcgcggcgccaacgacacagcccgggacctgtcagaacaatgccccgccatcgatttgatcgacatcgaccattacgacctcgacacgttcaacgactgcgccgaatccggcgacctgctcatctccaaaccgatgtgggccggcattcacccgcagctcgtcaacgtggccgtggactggcccgaaccggtcgtcatgcactacggactgctctacccgctcgacgcaagcccggcgattcacacattatggaatttctcgccgcagacggagatctcgaaccgtgaccgtccaacgaaaccgcgccgatgctccggcgtgaagtgcggtaatctctaagaaaaggccattgtgtcgagatggcggggcaacgggcagcgttgcggatttgggctgaggccccgtcgcttgcggtgttacatattgtgacgatgaggagggcagcatggaggccgcagagagcaggcagccgacgattttcgatgtcgctgcggaggccggcgtctccaagtccatggtttcccgcgtgatgcgcggcgaagggggcgtgcgtcaggagaaggtggaccgtgtgctcgccgcggcgaagaagcttggatacgtgccgagcgccatggccagcgggctcgcctcgaagcgcacaaaaacgctgggagtggtggtcaggaacgcgaagctgcctttctatgggttccttcagggcgccatgcagaagcgggcgcgtgagcgcggctatcagatggtgtccatcagcggcgtggaggaactgtccgcggatgatgcgcgccaggcgctgcgcgatttgatcgccctgcgcgtcgaggggctgatcgtatgctccgccatgcttgcggtggaggatttcatgccgttcatcgaccggatcccgttcgtgatggccgggcacgaggacacgacgtgcaccgtgtcctcggtgttttgcgatgaggaggacggcggccgcaggctcgcgcaatacgtccacgacttcgggcaccgggaggtggcggtgtttctggtgcccagggaatactcggtcagccagtacggccgcggcatggccatgatcgagctgctcgggcagctcggcatccgcgtgaaggtgatggatatgaaaggggccgaagaggttggaacgctggtggacgaggtgctgtgccatcccaggatcaccgcgtatatgtgtccgtccgacgtggtcatgctcaatgtgatggacgagttgcgccggcgcgacgtttccgtgccgcaggatgtgtccgtcaccggctatgacgggtttggcccgctcgcgtcgccgtaccttggatttaccacatatcggcagcctttggaggagatcggttcccgcgctgtggatctggtgctcgagcgtctggatggcggggaccacgccgtggaggcgctgccagtaaagggggaattcatccacgggcgcaccgtggcgctgccacgttggaaagacgggcgatagacgggcaataggcggaacggaagccgcatcccgcgccgcaatcccaggcacccgcgcgtggtggcggcggagcgatagcacccgtcgcccgaggatgcatcacagtggcagcagatcgagcccgttggctgcggcgtagcccaggatccaggccatgggcagggttgccgtccatgcgatgaggatcctgcgcgcctcgccccagcggaccttgcgccagtcgttcgtctggcaggtgccgatgagcgcgcccgatatggactgggtcatgctgaccgggcttcccagcgccgagctgacgagcacggcggcggaggccgcccacagggtgacccagatctgccgggaatccggcacgatggtgccgcgctgcagtgcggctgctcccttgggcatgccggtgagcacgccggtcaggaacgtcgcggcgacgattgcggtgatggcggcgctgtgcgtggcggttcccaattcgactcccatggcggtgccgaacaggacgatcatcttctgcccgtcattgctgccataggcgatgcaggtgagcaggaatccgaggaagaccatggtggtcgaggactgcggggttctggattggaacagcaggtagatggtgcgggagacggcgaacgccaccagaggcgaaagtatcgctatcccgaggacgcgcagcaccagatgccattggggatgtccgccggcgaagccggctccggaggatgctccgaccagggcgagcgtgatcgaggtgggcacgccgcctccgttgagcgccagcagggtggccgatgcggcgacgagcaccgtcgccagcaggagcggactttgtccgccggatccttcggaggagaccatggcgacgatggttcctccgacgcggctgttggcggccggcagcaaggccaccgccgtcgccagcatcaggaagggggccgccgtgacgcggcgcgcggccttgaggttgatggccaccaggggagacccgtcgttccttcctccaagcaggcagaacaccaatgccaacatgggaataacccacatatctcaccctccttgctgagaacgctcccaatactgtaattattgagtttataaatgttagcactgaattcagcgaacgttcatctttagcctgaaatggctgtatatcgtcgattagactttcttatgtcgaaaggatatactatgaatcactgggagcgctccgaagatggagtgacctccccccccatacaacaacggatatagatagcagcaaatcagcaactcgatacgccgcgtccgtcatcggaacggctgcggctcacaaccaaaagacgtaaaagggtattacccatggctctcggcaaggcaatgccggagccggagaaagaaaggaagcgcgagatggcgtcatcaacccatttgtcgcaatccccgcacggcgccaagacgcacggcggacgcacggcgaacgttctcgttgcgaagaatcgcctgaccggtgcggtcatgctggttccggcattggcattgctggtcgtgttcgtgttcggcccgctggtgcgcgtggtgatgatgagcatgcagggcacggacatcttcggttcgccctcaggcttcatcgggctggagaactacaggacggtcttcacggacccggcgtttgtcaaggtgcttatccagacgttcctctacgccgtgctggtcgtggcggggcgcatcgccttgggcgtgctgctggcgattctgctgacgaggcacatcatgggcatcaagatactgcgtgtggccatgacctcgatcgtcagcgtctcggtggcggccgcatcgctgggcttcctggcgttgttcggttcgagcggcgtgatcaattcgatcatcgagaaactgggcatccggccggtcgggttcctcaccgacgcgaagtgggcgttcttcacggtcaccttggtgaccatctggaccggtctcggattcgcgctgatcctgttgtgcgccgcgatcgacggtgtggaccaggagatcctggaggccgcgcgcatcgacggcgcgaacgaagcccgcatccagtggtccatcgtgctgccgctgatcacaccgacgctgttctacatcgccgtgaccacatgcatcgaggccctgcaggcgttcgcccagatcaacatcctgaccaagggcggaccaggccaggcgaccacgaccatcacctacaacatctacaccaccgcgttcaacgcgggcagcgcgaatttcggcatcgcgtccgcactgggcatcgtgctgttcctgttcgtgttcgtcctgacattgctgcagttccgcttcctggaaggcaaggtgaactactgatgatccgcaagacctcccccgtgagccagggcctgtgggccgtgctggccctgatcgtgaccgtgctggtcatgctgccggttctgtacatctacgtcggcgcgttcttcttcgacgccaacggcctgttcaagggcttcaccctgggcaatttcatgcgcgccatgtcccagatgcccctgacccagcagctgggcaacagcatcgttgtgaccgtctgccagaccgcgggccagatcgtgaccgcgttcctcgccgcctacgcgatcgtgttctgcaacctgaggcgcccgggcatgtggatgatggtgttcctcatgagcatgatggtccccggcgagaccacgctcctgtcgaactatctgaacatcgccaactggggcctcatggacacgattccggcgatcttcctgccgttcctcgtgcagggcttcaccgtgttcctgttccgccaggcgttccgctccttccccaaggagctgcgcgaggcctccctgatcgacggcgccggccacctgaggttcatggtcgacgtgctcctgcccatcgtcaagcccaccatcatcgccgcgaccatcaacgccatggtcgccgcctggaacggctacttctggcccctgctcgtgaccaacaagcccgagcaccgcaccatccaggtcggcatcacccagctgagcggcaccgacggctccaacatcggcgtggtcctcgccggagcggccatcgcggtcatcccggccatgatcctcacgctcatgttcaacaagtccctgcgcggcatgagcgtcgcgggcagcatcaagtaacccctggccgcggccgtccacgcgacggctgcggatcgtgggccgatccccatctgtacgacacaagaaaaaccaacaaaaccattttttccggccggcggccgtcgaaggccgtccgccgcaacgagaaaggaaacctatcatgaggaagtcaaccctgctgaaggcggtcgccgtcgcggccctgcccatgctcgccctgtccgcatgcggatccacgtcggacaccaacgccgacgccaagggcggcgagcagaccgtcacgttctggtactcgaactccggtccggccgtggacgccatcaaccagctcgtctccgagttcaacgacgcccacaagggcaagatcaaggtcgaggcctcctaccagggctcctattctgacgtgcagcagaagttctccgccgccgtccaggccaagtccaccccgtcgatcctgcagatgaacgacacgtccaccggctacatgatcgacagcaagatgaccaccccggtctacaagctcgccaagggcgactccgatttcgacaccgccgacctgcagcccgtggccctcaagtactacagcgacgacaacggcctgctgtccctgccgttcgccatcagccagcccgtgacctacatcaacaacaagctcgcccaggaggccggcctggacgtgtccaacccgccgaccacgttcgacgaggtcgtggactgggccaacaccatccacgagaagaccggcgcgtacggcttctcgatgaacatggtcgactcgtggattctggagatgctctccgccagccacggcgagctcatcgccaccccggacaacggccgcggcggcaaggacgtcaccggtgtgaacatgacctccaagactcagctcgacatgttccagaagatcgttgacatgttcaaggacggcaccgccctgaaccccggcaccgactctagctccatgatgaccgcgttcacctccgacaagctcggcctggtcctgacctcctccgcctcctacacgtccctgctgcccggcgactccacctcgaacgtgaccgtcgcccagttcccgcatgacgcctcgaacaagaaggccggcaccccgatcggcggcaactccctgtggatcgtggccgccgagcactccgaggccgagcagaaggccacctgggaattcggcaagtatatgatggccccgcacgcccaggccgtgttcgccaaggcctccggcaacctgttcgccaacaccaaggccgccgacgagaccgaaggcaaggaggccctggccgacccgaacgtcaaggtcttctacgagcagctcgaggccaacccgtccaccagcgtgtccctgggtgcccgcaccggcgcctacccgtccatccgcaaggacgtgatggcctccttcaacgaggtcgtcagcggctccaaggacctcaagaccgccatgcaggaggcccagacccagtccgctaaggacatcgccacctacaacaaggccgcaggcaagtaaacacccgcgatacccgcaacccaatcggccttcccgcctcggtcttctctcccggggcgggaaggcccgtatcacccatagcctcccggcagcagcaaaggagccgacatgaacaccgcagccacccccattcgattcggacgcgaacaatacgcgcagatcaacgccaatctcaaccaggcatgcgcccgctcgccgttcgtcatcgccgcccaccgcggcaccccgcgcggcgacattcgcgagaacacgctcaacagcgtcctcgccaccaagcaagtcaacgcagacatcgccgagatcgacgtaatccgctccaccgacggcgaatacttcgcgttccacgacggcactgaaatggcccgtctacgcatcaccgacgacatcctgtccaagactgccgccgaactcgacgaactgcgctacaccgaataccccggagcctactacggcaacgtcgaacgggtcgcgcacatcctgtccaacgcgcccgacatcctcatcaacatcgaccgctcctggcgctactggggcagcggattcctcgactggctcgaccagttccacctggaaagcaagctcatcctcaaatgccccgtcaccggaggcttccagcaggccctccacgaccacgacgtcaaatacatgttcatgggcatgatccagaacccagacgaactcgatctgttcgtcgacgacgagcagatcaacaccgtcggcgtggaactcgtagccaccaccgaggacaccccactcgccgaccccgcggtcttcaacaggatcaacgaactcggcctgtacacgttcgtcaacgccctcgacctgggcaacggatactgcggcctcaagggcatggacgacacccgttccatcctcgaaggcccccaggcaggctggggcgccctcctcgccctcggcgccgacgtcatccagaccgactggcccgagaaactcgacgagtatcgccgggtcatcgcctgattccggcggttctccgcgatttcccctcagcggctcctctgcgtttccggaccagcctgaaacggcgcccgttctgggctggtccggaaacgcagaggccgctgccttcgccgcgacaacgaacgaaagaaggtgccacaatgccgtggttcagcgtcaagaacgcgctcgcagaggatcccgtcatggggctgctccgggaacaggtgacgacaacccgcaaaggagtgtccatcgcgttggacgccgtcgaggggcatctgagcgtcgatgaatccagaaagagcgtcaacgatatcgagcacgagggggacgaggtccgttccaaggtcgttcacgcgttggccaaggcctggaccacgccgttggaccgtgaggatctgttccgtttctcccgatccatcgacgacgtgctcgacaacacccgcgatttcatacgcgagatccatctttggaaaggacatgccggcgaacatgccaatatcgcgttgacccacgtgaacgtcgccctgcacgatctggaactcgccgtgaccgcggaaggcgccgacatgcgccggtactgcctcgaggccagcaaggaatccgcccgcgtgcggcgcgcctacgaatcggggcttgcagccgtctacaccggcgaaatgagcatggacaccctgaaaacccgagatctgctgcgccgcgtcgacgtcataggcctgaggcttggggagtcctccgacgccatcctcgacggactcgtcaaacgcgggctgtgactcaccggaataccgcaaagggaaaggcgcgaatatgcgcaggaaactgattcttgatttggatacgggcatcgacgacgcgctggcgatcggatccatcttctcgcgtcacagacagtgggccatatacaacggcagcttgatgcgttctccatccacttcgagttggcggggatgcagaacgtattccttgcccaatcgttgggcataccttttgcggaatttgtcgagcgaagatacgccgtatcgtttcgtggatttcacttcaatcgggctgatgcgaggcttcatcgcggcattatcgtattcccgaacgatgaggaagtctatttccatggttttcgtggcatccgccctatccgagcgcgagaagaaatacagtttgcgcccattcgcccggaattgctgagccaccgcattctccaccagcattccttcgttgagcgagagtttatcgaacagaatatcccggtacacatcatccggcgttgtctctcgatcggcaaacgcctgcgacaccagcaaaccggtatccgccatatagcatttgaacgaattattatcttcgtacaatcccagtcccaccaaagggtcagtcgaattacggcacaaattcaccaagcgggcgtcttccaaccagaagaacgccgaatcgtattcacgagatcgagcatccttgtcgaccgatgccagagtgaatcgtttctcatgcttggacagctgccctggaatctgagcgaaaatgccccgcacacggccggcatcgccattggcgaacttgccgatatcatcactgtacagctgcaggatgccacgcttgatcaaatccacatcgccaaaatcgcgctgctcgacataatcggcaaccgcctgcggcataccgcccaccagcagatactcgcgccacagcctcatcgctcgtttgtgcagcgcatcgggcaacgggaccagacgctcgaacgatttgcgaatcgtttcagcaagcagctcctcccccatggcccagcagaactcctcaaaatcgagcggccccatatccattttccgttcctcggaaggaatgacgatattcgccacattcctcttgatggagatcagcgaaccagtttccacatagtcataccggccatccgcaaccagatatttgatgagctccctcgccgccggataccgctgtacctcgtcgaaaataatcaacgattcacgctcgtacagtcgcttgcggtaatacgcagacaacagcatgaaaaatgtgtcaaagtcatcacgctggttttcgaagatgtcgcgaacgtcacgcggcaaacgcgcgaaatcgatgagaatatatgacttgtactgagtgcggccgaattcctcgacaatggtacttttgcccacgcggcgagcgccttcgatgagaagagcctcacgcccacccgctttttgtttccatgcgatcagcttatccagcatcttgcgcttcaacatgagcaatcacctcattacacgaaaacaacggtataggcatatgctattctacacgaaaacagaggtatagaggtagccgattctacacgaaaacaacggtatggaaacatgcaccgaaccggctcacccccaatctctcccccatcacaccggcggcctgttcgattgtgcggttttgtgcgaatggctcacacggttcttagtgagaaccgttctctgcgcacctgaccctagaaccggatcagcgccttgatgaccttgcgctggtccatcgcctcgtaggcgtcctggatatggtcgaggtcgtactcggcggtgaacacgcgaccggggttgatttcgcccttgagcaccgcatccagcagaccgtcatcgaggtcatagtggcgcacgggagccgggccgcccttgatgccgatgttgccgtagaacgtgccttcggcgctgatctccacgtcgtgcggcaggcccacacgaccaatcacgccaccgcggcgaatcaggccaatcgccgtgtcgaaggactgcttggagcccacgcattcgagaactgcgtccgcaccatagccaccggtcatctccagcaccttgtcaatagcctcttggccacgctcgggcacgatatcagtcgcaccgaattcgcgggcgagcgccgcgcgatcctcgtgacggctcatggcaataacgcgcgtggcaccgcgcatcttggcggcaatcacaccgcacaggccaactgcgccatcgcccatgaccacggcggcgtcaccgggcttgacctcggcagaaaccgccgcgtgataaccggtggacatcacatcggaaacggtcagcagcgaagcgagcgtcgcgtcatcgtagtcttccggcgaaccgggcaccttgaccacggtgccgtccgcctcgggcacacgcaggtattcggcctgacaagcggagaagtagccgccgtgcgggcacacggattcgaagccggccttgcataccgggcacttgccgcagctgtatgggaatggcacgaccacgaaatcgccgggcttgacggattcgaccgccgcgccaacctcttcgaccacaccgatggactcgtgacccacctggctgtgcgcggcctgtccgctcagcccacgaaagaaccacaaatcagagccgcacacgcacgtgcgcaccacgcggatcacgatgtcatcatcctgttcaagcgtcgccttcggcacttcttccacggtcatcttgccaggctccacgaaaatcgcagctttcatggtttcagacatacgttcataactccttgttttccggcatcgagcgcttaagggccgttatcctcgtgttctattaaacaataatcgccttgcattaaccaatagccataaaccatgtttcgccatacccatgaggtatggcaacaaccgagcaattcactgcgataggccaatatccgagatacgctcactgttcgattcgtcgccatgagtaatctggagaaccggcgatgggacccgcctgaacttgtttcgaaccgcacactgctgatagttcctacacacgatttgacattgcatggaatcgttgtgtcttcagtaggattcagcggtttcaggaaaggctattatgggctcgcaatccccatccgcagatgcccggccgggcacgcgcacggccactcctccggcgcacaaactccccgatatccatcttgatattgtgttggtcgtcttctgcggcggtgccatcggcaccgcgattcgctatgcgttcgcgcagattcccgcagccggcagcttccataccggcacgtttgtggccaacatgctggcctgcttctgctatgcgggtctgaccgcctatttggccggctcttcccggttcgacacgcgtgccaaggagctcaccagccgtgggctcggcatgggcgtatgcggcggtttgtctacgatgtcgacgttggcattggaaggcttcaccgcgattcgcgacggtcaggtggcggccggcattgcctatctactggtgacgttcgcgctgggtctggtttgtgcgtctgccggcgtgtgggcaggaacgcatctggccggctcctcgaacgcatccgccgaagcgtccgctgatacgaatgccgctacgaccagcaagggaggtaaggcgtgatgaccgtattcctaccaatcttggtctgcctgtgcggcggcgtaggcgcctcctgccgctatctgcttgacgcgaccatcaaaacgtattggcaacgcgcattcccgctgtccacattcaccatcaatctcatcgccggattcctgaccggtctggttgcggcgctggcactgggcgggacacttgatgaaccgtggcggctggtgctggccaccggtttcctcggcggattctccacgttctcgaccgcgatcaacgaaatggtgacgctcttccacaaacgccgctaccccacggcaacggcctatctggtgctgtcgctgggtgtgccggtcgttgctgcggcctgcggttttctcgtctgaccgccacgacgattcccgacgcggtcagcggtatcatcgcgaggtcgaacgtcacaggtacatccgggaggtatatgggcatggcgaacaatggagcggatgtgaagcacaatcagggcgcggacgtcacgaatgcctcggccacaacgaacactgcggaaaataccgtgggcacggcaaccccgaagcaaaatggactcgccgtgttgggcaagtatatgggtgtttccgccacgcagaccattgtggagtatgcgacgttcgccatcctgcacttgatcggcgtgccctcgcagatctccaacggtatcgccgtggtgtgttcggcgacctacaacttcgtgatgaaccgcaacgtgacgttcaaatcgtcaagcaacttcacccgttccgtgatgcttttcgtgctgctgtggatctggaacttcacgttcagcacactgctgatcggctggatgccgggcacgacggacctgagcccgtatgtggtgaagttcattgcgatggcctgccagttcggctggggttatccgttgtgcaagtacgtgatttttaggtgacacattccaattgctcactgtcgttcgccttcgcctatttgtatttggagcgcttatcagaagaacagcatcgcaacacctgcggcgaagcacatgagcagaatcgatgtcaggaagctggcgagcatcggcttcttgcccttggaagcgatggccttgaagttcacgttgatgccgagcgcggccatggccatgccgagcacgatgtacgcaaagtccacgagctgcggggtgatggaggcgatgagcggcacgaaggtgccgatgatcgaagcgccgatgaagccgagcatgaaccacgggaaggccacggtcttcttgccggtgttctccacctcggagtgcttcttctcccaccagatagcgatgatgatggccgcgaacacgagcatgagcacgcgggaaagcttcatgatggtggcgatgtccaccgcgccgaaagcgtcgccggcggcgaccgcgtgggcgatttcgtgcagggaagcaccggcggtgatgcccagctggtccttggtcatgccggccagcgggccgagcgcgatctccagcaacgcgaacacagtacccataatggctacgatggccacggccatggtcacgtcgttgtccttctcgtcctgcttgtcctcaggcaccttgatggaaccggccaggcccatgacggcggccgcaccgcagatgccggtgccaccggcggtcaggatggcgagcatcgggtcgacaccgagcttgcgggcgatggcatagcacacgatgatggtcagcgtgacgaccacagctgcgatcggcagacacttgatgccctgcgtgaacagcacggcgaggttgagcttgaaaccgagcaggatgatgccgaggcgcagcagcttgttggaaatcaggccagcggcgtccttgacgcctgccttgcggccatcattggaaccgacgtaggcactgcggatcgggaactggatgatcataccgatgagcagcgcgatgataagcgcgccgaacaggctgaatccggggaactgcttgagccaggaggcgaacagcgaggccagcagagtcagaacgccaatgaacaacatgtcaacgg
